United States Patent Application Publication US 2014/0325702 A1 - sequence listing, part 13

SEQ ID NO: 12325 - DNA, 2165 bp, Heterodera glycines
cccccccccttttttttttatgaatacctgcccatgctacatcatttgaaaaatacaggatgtaaagcattttttttctagccagaaaatgcgcatattaaaatattcaaaaaaggaaaaccccaaagtttatcaggcttacttgataattttaagatttttcttttcttttttttgtgtttaaatttgctacaagaaaaatcctcgaaggaattttaagtaaaaagttagtttttatttttttcttagattttaaaacttaaattagaaatttattagaaaaaaaaaacttagaagttatttttattaaaatttcttgtaattataaagattttccagcgattttttggaaattttttttttgaaactcaataatttatcataaattttgcaaaaatcgctataaaaattttactattttttccttttaaatattaaatgctttctaacatttttttcaaaatttgttgtttaattttttcatattttaatgtttttcgctcttcatttaggttctttggttggagcaacaagtggtgaagaagcgggtaaagcgcgactttcgcccggtcattcaccggcgacgccggcaccggcgcgagtcgtcctcctctttgacttccactgacgcgtcgacagagcagcagcaacagtcgctgtcggcgtcccttgcggcgacgctggcgtcagcagtgagtgaaggcggcagctacagtgccgttgttggcggcggcgacaacaccagcgacgcggtcgccgtgttacgtccacgcgctcgccaccacaccacgacgctgttgcagcgacagcagcaacgacagcgacaacagcagcacccattccgaccgccggtcattcagaacagcgacgacgaatatgagggggaggggacagcggcgggcgacgggccggacgactttttgaacatgaacaggtgggcgatgcgatgtgattggacgaatggaggaaaaccgggaaaaaatgtttaaattttattcaagtttttaaatttgacacgaaaatcccccaaaatggcacctattgcaaattaacgaattttttttagatctttatggaaaattttttaaaaaatggaaattttaaaacttgaaaaaacctacaaaaatggccatttttgagttaaaaatataacaattcaaaaaatttattctcgtgctccactggcgcctaatttttgaaaataatattggaaaaaaaaattaagactaggattgaattaaaatctatgtattgctgatttaatgatttttcttttagattttcttgaaaatttgaaaaaatagcattttaaaatttgaaaaatgaatttaaaaattcaaagaactaaccgttaaacaacaggatcagtcacaatgatcagcaccggacacagtgggcacgtcttcggtacggcgtgccaaacgacccgtactggaaggacttgtggtatttgcatcgacgggacgaacagccggacgaaatggatcacaacgtgaaggaggcatggtacctgggctacaccggcaagggcattgtggtgaccattttggacgacggattggagcgcacccatccggacattgggccaaactatgtgagtgttggttggcatggcacacactcatcatttaactaaatatttgccatacttttatagaaaaatttgtctgacaggagggatggaatttagtcgatctaaaaaaaatttttttttcgaaattgggtaattccgaggcctaaaaaatgcataaaaaattttctcgcagccctgtcaaaaagacaccgagttcgctacaataagttgagttttttttttaaagaaaagacgttcaaattttgcatcaaatgaatctgaaaaacaatggatttaacgcaaaaaatgatgaggcgcttcggatggggctcgaacccgcgactccttgtcccatagctcagttggtaaagtgggtgtgtatgtgcatgatgcgcacgggttcgattccttcccaccgtttttttttaaattattttttgcttttgtcataattgtcaattgttcatgtattctaatttatctctcctttttttcaggatccggatgcctcctacgatgtcaatgatcgggacgaagacccgaccccgcgctacgagtacacggacgagaatcggcacggcactcgttgtgc

SEQ ID NO: 12326 - DNA, 2921 bp, Heterodera glycines
ggagaaacaaattgccaattccaaaaaggaaaattggaaatttacgaattggaacggccatgaaagtgaactccgcttcgcttttcaaaaccgacgtggcggtagatggcaaagacatcaaattcgtactcgacagcggggctgaaataattgtgatcgatgaactatcacatgaagtcatcggcagcccccgactccgcaaatgcaccgaaagtggatgcatgttcgatggaacacaagtcaaattcatcggaaagggagtcgccaatttcaaattccgcgatatttgcatcaaaagcgaatattatgtggcaaaaaggggatcgctaaatttgctaagtgtgcaaatgatggacgcttttggactcctgaacgaactcaaggccaaaattaatgcgccagtaaatctgtgccgagttggagacgagacaagaggttttacaaaagctccaaaaccgtcacaaaatttgacagtcaacgcgcacatcgaccatctcaaagcgacatttcccgacattttcaaaaacgaattgggccgatgtatgaagttcaaggcgcatctgactataaaagcagacgccgcaccggtctacagaaaggctcgcccagtcccatacaacgcacaagaagcgattgatggagaattggagcgatgggagaaaatgggtgtgattgggaaagttgaatacaccgaatgggcagctccgattttggcggtgaaaaaggccgacggaagcgcacgcctatgcatagactattcaaccggtctgaacaatgcccttcaagaccaccaacacccactgccgctacctgaggatattttcgcaaccttaaatggaggaaaatattttttcgcaaatcgacctcagggatgcatatctccaaatcgaattggatgatgagtcgagaaaaatctgctcgatttcaacacaccgtggcaactatgaagttaaaagacttccttttggcgtgaaatcagcgccagccatcttccaatcggtaatggaccaaattttggcagaatttgaattcgccacagcttacttggatgatgtgatcatcgtaagccaaagcgtcaaagagcacgctgatcacttgaagaaagttttggaaaaattccaagaatggggattccggatcaaattggaaaagtgttcgtttttccgagaagagattaaatatctcggacaaatcatcgacagaaacggacggagaccggacccagagaaaatctcggcaattagtaaaatgcccgcacccacagatgtgccatcgctgcgttcatacctcggaatggtgaaccactacgagcaattcgtcaaaaacatgcgttttgtacgaaaaccgctagacgatctgctgaagcaggacagcgaatggagtggagtgaaaaatgcaaacaagcatttgacaaaataaaggaaattttgtcatctgaacttctgctcacgcattacgacccaacaaaggaaatcgtggttgcagcagatgcatccgaactcgggattggagcggtaatctcccacaaatttcccgacggaacaataaaggcaattgcacatgcttcatcagctctaacaccggctgagaaaaactattctcaaatcgagaaagaaggattggcactgattttcgccgtgcaaaaattccataaaatgatttatggacggaaattcacgctgctaacggaccacaaaccacttcttgccatcttcggaagcaaaaagggggtgcgtcaatgtagtgccaaccgactcctccgatggtcgctgatcctcctcgcatacgatttcagcattgagtacatcagcaccaatgattttggtcaagccgatgtgctttcaaggctgatcgcaaatggaaaaagcgacgaagaccgagtgattgcatctctccgatcagattcggaaattgacgacattttgatcggatcaattgaagcactgccaattaaatttaaggaaattatcgcagctgctgaagccgacaaaaccattcaaaaagtcaagaaatttttgacgaatggttggccaaggaacgtcggagacgaaagtgccgaaataaagctttttcatcggatcaaagaacagctttgcatcacgagaaattgcctgatgtacgccgaccgagttgtcatccccgaaaaacttcggcagaaaactcttcatgcattccacaagggacacccgggaatcaaaagaatgaagcagttggcgagaaattatgcctattggccaaatatggacgccgacatccaacagatggtagaaaactgccaaccatgccaaatggaagcaaaggcaccagttaaaagtaatcttcaaccatggccaaaaccatctgcaccatggcaaagagtccacatcgactatgccggaccatttttcggcaaggaatatttaatcattgtcgatgctttttcgaaatacccggaggtattcgaaatggccaccaaatcgacagcggcaacaatcgaaaaacttcgatatttgttcagccgacacggcatcccggaaattttagtgtctgacaatggcacccaatttacgagcaacgaatttgccaaatttatggccgtcaacggtgttaaccacctgttttcagcgccgtataatccaatgtcaaacggccaggccgaacggttcgtggacgcgtttaagagaacgtttcgaaaattgaaaggggagggagccccaagcaaggaaatcatcgaaactttccttgtaagttaccggactacgccaaatgattcgttgccgaacagcaaaacacctgctgaaatgtttctgggaagaaaaccccgcacaactttggatttgttgcggccgccaccagcacaaccgatcgaaagagacgtagaaatggcgagacgcttcaataagcgataggaaccaaattaagggagttttcgatcggaaaca

SEQ ID NO: 12327 - DNA, 1923 bp, Heterodera glycines
  unsure (1)..(1923): unsure at all n locations
agactttacaaaataatacccctgtggagaagggtcgtttgaagcatgattgcgaaattttctattttttctagtctaatctactcaaaccggttcagaattcaataaaaataacattcacggtgcctagaaaagggggttgaaaagtttattattgaaaaaaagactttacaaaataatacccctgcgagaagggagtgggaaacatgatttcaaaattttcaattttttatagactaatctactcaaaacggctcagaattcatataaaaataacattcacggtgcgaaaaatggagcttgactagtttattgtggaatgaagactttacaaaataatacccctgtaataaggtagtgggaaacatgatttcaaaatttttggtgaaatatttgtcgtgctctgaagggcgtggtaggttggaggaattcacgattttttcgaatatatagatagatataatcgttttttcaaaaaacttttgctatttttttcttcaaaaggtttcaaacggatgaaagcaactaccgccgcctcacacagcgccgtcccactgcgcattaccgcaccattcgatgccgttggcactttctgatggccaaagaggagaggaaaagacgggcggggaccgaattgactgacggacaaagatgggaggaaaaacggacggggactgaattgactgatggctaaagaggagaggaaacgacgggcggggaccaaattgactgacggacaaagatggaggaaaagacggaagagggcggggacttaattgactgatggccaaagatggaggaactttttaacaaaccggtctcaaattaaatttttttaaatccccgcttccccgtcgtacatcgtttatcgcctagatcccttccaatatntttccattgtattattataagcgacatcatttacctatgcatataatcaatcaccgacaccattaccatgtttattaaacattaagttatctaaaataccatactaaattgaaaaaatcacatattaaaatactaattatcacattaaattgggaaacattacatattaaattgatcacatcgacgccaatattgccgcaaattgttgttattctttttcaaaataattgggcgatattggcgaataacgcgcgccacttgacggttgatgtccaactaggcagtttttaaaaagttttaaaattttttcaaattatcttttttaaatttttatatttttaaaattaatttttgatggaaaatcatccaaattatcaccaatttcctcgtgcccaacccaagcggcggcgctagtcgatggcaccaatccgttttgcaaaacttcttaaaaaatttttaaattaaatgtatgagttaaattgaagaaaattcataataattaaaaacgaaaaaactcaaatacaaattaattaaaatattttttcaaatcaaaaatttaatatattttattatttttcaccaattacctatttccgcagtatatttattttttattttctgacgatcatttttatatcccttccaaagatcggagatctttgttttcatctccttttttagatcggtaatttgcttctttcgtgcgttttcctagaaaatttaaaaggtgaaaaagagggggtgggataggcacctccaagtaataattgccaatgccgaatgaattattcataataaataattttgttgtttttttatattttgtatctgtaattgatcagtttttttttgagaggtatgttagaggataaaaaccatgaatgccactgatttccgatttaaaaaataggaacactgatggcgaaaactattcggaaattggacttccgaggtcaaataattttctaggatataatataatcggaattccacaccaaaagaaaaaacggaaatgtgtggcatactggcaac

SEQ ID NO: 12328 - DNA, 1877 bp, Heterodera glycines
taaattttcatcttccattttaaatactcgttccattaattttcatcatttttgcaattttttaatcacttactttcggattttcactcattattttattaaaaaatgaattattttctttttttttgatcagtagaggagaaaaaattaaattaaaaatatttttttctttaatataaatgtgatcagtagggaaggagatcatttcttctttttttcaaataaatttgtgatttttccggaaattcagtagagtcgtgattttttcaaatgaataaaaaggctcttaatggactaaatgaataatttggatttaaataaaattatataaattcatatttgggaatataatccagaaaaatgaatttattactgttattctgtttattttaattataattgccctaattagtccaattgaatcagaaaataaaaaattacaacaaaagtcatttggcaaaatatttggagaaaaatgggaagaaaaagtgcaaaaaatgcaaaatgaaaagaagaaacgggaaataattcaaaaatattcgaaacaaaatttatgaatgtattaatgaatttgttcttcaaaaacaaattcataaaagctacaaattaacaactgatgatgagaaatttgaaattttacaaaaattcattggaatggctttttataaactcttgaaaatgcaaaaaaaaaaaagtcaaaataaacacagaaatagtcattaaaaaaaatcatactagaaactccaaacccgttttttcaacgttaaagtggtaaaaattttagacatttcatttctcagtgaaactaagctgaagaaagaatattaaaaataaataaatataattttaagagtcgacaatttcaaaataatagtgcattaattttatttgttgggaatgtattcccaaaaatgtattaaaaatggtaattcttcgcaattctactgagcaaaagacgggattaaaaattcttgggttttcggtatctgtgatttattcaaattttgtgcctttttgaaatgtttaaattaaaaaaattagctattttttggccaaatctgttaataaattgaacatattccaaaaaatttcctcgtcgatactttccatcagcgccagaccaccaaatcctaccctaccataaaatctccaatccgttgcttttcagaacattcaatatttattttcattttttcttctattcaatcacttctttttaatctggtcagaaaaaaagtaatagaaacgtaatatagaattaataattcaaataatattggtatctacatatatggagatggtggattttgcaaaatgatttctatggtaagcaatcaatgatgttcggcaaaaacattttcaaacgcccttcaattaaaattaattcaggcccaaaattattttttccaagtttatgttgaatattatgcgacattcggattttggtcatattgcacgctttaacatccccttttacagatttaacacaactaataaaaaattttgtcacttactcaacgacacatttacctgaatattcattcgtcagagtaagtggttctcgcccttctgtgactagggccccgacttttagtgacgaaaaatcgcaaaatagttaactaaaatagtgacgacaaagtgccgaaatagtgaaaaaaaatccaaaatagtgacgaatagtggcataattttcagccaaaaactaagcaaacatttttttattcactggattgtagttgtaaatggaagtaaatttactttctaataatttcgtggcaaatattgacatttttaaccaaaaatttttgtcaagaaaaaaaaatttgggggatgaatttttaagaaaatttttctagaaaaattttggtcgattctta

SEQ ID NO: 12329 - DNA, 2357 bp, Heterodera glycines
taccaaaaatacgaataaatatttggaattcttaagtttcaatgatacatcggaaaatgaattttctaaaattattcattccaccccaccccccccccccccccccactcgctctggttggttggcctttattctcgagaaatgaacgttcccgaataggcggtcgaaacggcaatgagcaaaggtcagcccaacattaattaatcaccgggagaaactgggggggggggggcaggaaaaacaaacaaactctcgacaaacaaatatttgaggagaaggaatggacgggagtgagtgtcggtgaagcgcaacgagcagacctccatttgcgcacacgattttcatttgtcaaatcagaggatcgatcacctgctgccactttggactggacaaaaattgttttacccagaatcagcaccgaaaaattggccagagattctcgagagcccaaatacccgagaaattgcatgagtcattagtattaattcacaggaaccgcgagactcacgcacatccctcacgccgtaccctcttcttatttctaagaaaacttttacaatttttgaaaattaaaacttccataattttaagtatttttcaacagtttgatgggcggtgccaatcctttaaaattaaaaccactcaaaaaaagaagcagccaatgctcaaaacaaaattaaattgaatttttgttaacatttgatttggttagttttaagccaaggttatgccaaatataaacggggctttttacgaaacagcctagcagttagagcataataagcactacttttgtcgcttttgtcctttattctcacatatattaattaaaaattgataatgtgcctaattatttgcaaagaaaaattgtgtgcttaatcattcaaaatgattgcaattccaattattcttatattctttgttcaaccggttatttgtttaaaaattttatgcttcatacacagcaaaatggtaatcattgagctattataattaaaaaaatttaaaagtatttttaataaataataattttaaaaatgcaaaagcatttttgtttagtttgaagcaaattcttttcttcaacaacaaccaaactgttcacatttggtcattaaagatttcgcaaaaattggattaaaggaattcaaagcggatttgaatgcacgttataaggcacaatatctgaagtgaaaattatacaataagaattaattgaataaaaataaaattaaaatacaaatatttttcctgcaaaaaatatcttccaaaatatacatttaaattttataagtttattttatttcttataataaagaaattatcttacatattttctgtataatgaccaaaaaatctcaagaaagtaaatggctcagaccaaacaataatcaaaaatatattatatatttaataaatattaaagtattatttttattatatacttactcattgtccgtttatcacataattttggtatttttatttttcatatttttgcagggcttctgctcctccacacaatttaaaactgtttgccgaaatgtcaccaaaaaatggcaacacactggtctttcccattggcattgaagggcagaaaaattttgttcaaaaattaaaaagaaatttacggcatctccgttctttgaacccattgactggaaagccaatttttagcggactattttttcgtgccggttcgttttcaattttttttttagaatcatgaattaaacttgagtgacgagtttattttaacaattatatattatttaagctatttttcaaacaaaaaaaattgcgaaaatttattactagagattttaagaaatatttaacccattggttatgcttaaaattagcgaatttatctatattttggggcggagttcattttccattttttttttgagtgtttcgaatgatgaaaaatttcgattttattaattgattttaaatttaaaaaaattattccgttttttgcacctcctttagctgcattccaaaaagaaggcgaattttttggctttttccctttattggccaaattacgtgaagaaaagttgcgcaaaaagaatacaccgtcgtttggtgaatttatgcttggcattgattcccattttaatccgtacaccatcggtttccctgctaataagtcaattgccaatctcattgacattttctacctttccatgatgtcagacggtttgatcaaggtataaaacaataaagcatcatactaggggctaaaaacagaataatcttaaataaggcaggggggggggaagggataaagggccagtttaaaattgacacaaaaaaaagggattctaaaaaccaatcaaagttaaaaaaatttt

SEQ ID NO: 12330 - DNA, 1011 bp, Heterodera glycines
  unsure (1)..(1011): unsure at all n locations
aaaactgtttgcgnaaatgtcaccaaaaaatggcacnacactggtctttcccattggcatgaaggggcagaaaaatttgtttcaaaaattaaaaagaaatntacggcatctccgttctttgaacccattgactggaaagccaatttttagcggactattttttcgtgccggttcgttttcaatttttttttagaatcatgaattaaacttgagtgacgagtttattttaacaattatatattatttaatctatttttcaaacaaaaaaaaaattgcgaaaatttattactagaaattttaagaaatatttaacccattggttatgcttaaaattagcgaatttatctatgttttggggcggagttgattttccattttttttgagcgtttcgaatgatgaaaaatttcgattttattaattgattttaaatttaaaaaaattattccgtttttttcacctcctttagctgcattccaaaaagaaggcgaattttttggctttttccctttattggccaaattacgtgaagaaaagttgcgcaaaaagaatacaccgtcgtttggtgaatttatgcttggcattgattcccattttaatccgtacaccatcggtttccctgctaataagtcaattgccaatctcattgacattttctacctttccatgatgtcagacggtttgatcaaggtatagaacaataaagcatcatactaggctaaaacaagaatagtcttaaatagggcaggggggggggggggaagggataaagggccaggtttaaaattgacacagaaaaagggcatctataaatcaatcaaagctaaataaattttgtattcaaaattatttaatcaattttacaagttaaaatccaaatattatcagaataaatgtataattcctttttgattgggcaggctcactttggataaagcttttttatctgtgatccgcactaattacccttatttattaaaaattacttacataaacatttatattcgctgctt

SEQ ID NO: 12331 - DNA, 1915 bp, Heterodera glycines
taaaaaggatagaaaataattccatgcttaatattttttattttgttgttgaagaaatggagtccgcctcagatccaattagaaaattttcatttttgtcttgaaaagtttttcgcgtgctttttctgagtgattattgaaataatttttttagaggatttttttatatctaaatgcatttttatcgcctttttctcctgcaagtgaaattaattggcagtgaaaaaatggtgatttgtgactatttaccatgaaaatttatgcagcacttttaaaaaggatagaaaaagaataccttgcctaatattttttattttgttgttgaagaaattgagtccgcatcagatccaattggaaaatttttctgctttgtctcgaaaagtttaacagaaaatagattggataaataaaaaaattaaacacctcttatgaacaatttaaattcccttacattttgggcttactttactatgctggcctatgaaaaaatggagttttataagtgccaaatttttgtgaattttcttccggcgcgtcataaacgaattgtttggggacaaacccaaacaaatttggtgttcttcgaatgcgctaggcccgctctacattttcaaatgtatcaaccaagggtctatctccactctctggctaggtatggcccgtcaaagcagagtggggcataaaaacgaattttttaatctttggcatttcctctatttcagccggctccacttacatgtcttgtgccaataggttattgcaacagaaattttttcagctttcccgactaattgttgagataattttgttaaacgacttatttatatctatatgcatttttatcgcctttttctcctgcaagtgaaattaattggcagtgaaaaaaagttgttctatgactatttaccatgaaaatttatgcagcacttttaaaaaggatagaaaaataattccttgcctaatattttttattttgttgttgaagaaattgagtccgcctcagatccaattagaaaatttttcatttttgtcttgaaaagtttttcgcgtgctttttctgagtgattattgaaataatttttttagtggatttttttatatctatatgcatttttatcgcctttttctcctgcaagtgaaattaattggcagtgaaacaatggtgatttgtgactatttaccatgaaaatttatgcagcacttttaaaaaggatagaaaaagaattccttgcctaatattttttattttgttgttgaagaaattgagtccgcatcagatccaattggaaaatttttctgctttgtctcgaaaagtttaacagaaaattgattggataaataaaaaattaaacgcctcttatgaacaatttaaattcccttacattttgggcttactttactatgctggcctatgaaaaaatggagttttataagtgccaaatttttgtgaattttcttccggcgcgtcataagcgaattgtttggggacaaacccaaacaaatttggtgttcttcgaatgcgctaggcccgctctacattttcaaatgtatcaaccaagggtctatctccactctctggctaggtatggcccgtcaaagcagagtggggcataaaaacgaatttttaatctttggcatttcctctatttcagccggctccacttacatgtcttgtgccaataggttattgcaacagaaattttttcagctttcccgactaattgttgagataattttgttaaacgacttatttatatctatatgcatttttatcgcctttttctcctgcaagtgaaattaattggcagtgaaaaaaagttgttctatgactatttaccatgaaaatttatgcagcacttttaaaaaggatagaaagataattccttgcctaatattttttattttgttgttgaag

SEQ ID NO: 12332 - DNA, 1451 bp, Heterodera glycines
aagaaagcatgatgaaattcagtggattcttaacaaatttgtttgtgaaaatttacttagaaattgcattgtgtgtgtgtgtgtgcatttgttatgaggacattgaataaacagaactgatcatttggattcagagattcaaaacatccccagaggcgatcaaagcctggaattatggtggtctgatcaaaggcggacgaaaatggttgaaaaattgtaataactgacaaaatttgaaatgcgtaaagaaaaagacaaaaagaaagaaagatggaaagcgaagacggataaggcgatgggattcaagcaaacgaggagcggatgccggaacaacgcaagaaaccgatgactgacgatccttgacaaaacgacgatgaaccgattgatcaacaaatggacgaaccgacagacggacgaacggaacgagaccaacggacgcgaccgcggacccgagaatgcccatcccataataaaaaactaacagttgaaaatacccacccaaacattgccactccgccacactgccggcctcggcggtggtcgtcccccccgggcacggtgtgcacttcgtctgtcccgcttgtttggcaaatgtccccgtagggcatttggcacaagtgccgttggtggcaaaatgtccctgtcggtaaaatgccttttgtttaattgggttttgctacctttggacatatttcacatctgagcaattcatttggagcccatccattcagacattgtaaatggtaggcgaaatgccgtgattggacacctgcgatttgaaaatcggcaaaatggatgtcaataaaaatttatttactgccgtccgggcattggtcttcgaatgacgcgtcaattttgtcggaaaaggcggcgccaaaagcgccttttactcgccgaatgcagttcaccaacacttgtccatcattgctaaaagccaaagaatttattacaaatccacaagaaaattcaaagacattctgaccccccgtttattgtctctgcggtgaaattgtgcacagtcaaattggggtggacaaagtcaaaagcatttggggagacggaccattggacgccgggacaattcaaagcgaaaaagccactgaattttcattaattcctaatatttacactcctctcaattagtgcccactttgtgtgccgtgccaatgcctttgtgcatttttcaatgtccgatgccacgacaattgaaacggtcaccgcggaagggcttcaaaatggatttttttttttcactttttggcttttcccattttcctttaattttcaattcttccattttccctgcctttcttcctgcagacattgcgcttctccaatcaacgacatttcctgactttcgctccccatttctcttgtgtatgtcaaccctttgcccggtcggttccgccagaagcgcaactcgcgcaacccccgagggtattcgcgtcccc

SEQ ID NO: 12333 - DNA, 1194 bp, Heterodera glycines
tcgaaaataaaactcacgatctgataccaaaattggcacttttggacgccgttttctcctacagtgactaattttggcactgccaaaggaagcgaagtgccattgggggggatcaaaactaaaacaggaatgattatgagacctttggaagtcttatttttatttttgcctcaataatctgcgattttttgctaaaattggcggatattcagctcgaattaacggcggttcgtctgtcagcgggtcacctccaaattcggcactcacattcacttcgcgaatttgccattctggacattcaatgtctttgtcattagacgagtgtcccgcagctaaaatttataaaaatatttaaattaaaataataaatttaataataaatcacttactggcatcgtcagaagaggtaccaccttcgaagacaagctttgtcacacactgtttcaattcaccgtgaaaatcaacagctcgccaaacgatttccgtctcatcgccttgtggaaaaaaacaaattaaaagggaaataattttaaatttaaaaattattttttcaaaaaattattagaaaagcttaattcaaataagcagctaacaacacctctgaatttatatgcttttgccgaaatgttcatatttactgcactgatttgaatgtgcgggtcattgtcaactaccgtaggcctaaattcggttgtttcgagtcaatttcaaacaaaacaacttgccatgggattacggtaggcttaggttgtccggtgtcaatttggtgtctaattttgagttgagaagcgcaacgaagttccagcggttgtctatcaatgcagaaagggggcgcagaatcgaggtcaaactcattcaaattttgctgcgaattataccataaaaatgtttaaatcaaaaattaagattttatgcaattttaaaattaatcaacaccttttctctaattacagtttgagtcagtggaactgttgtggttgaaattgctgttggcattggcgttgtgctcgtgctaattgttctactaatagtggacaaaggtgctacagtatttctgctggttgttgactgtaaagattttaatattattaaattactgtcttcctttccctttttcataacgaccgtattcacttttccattttctaccgtattcctttcccatttttgatatcctacagataccttcccatt

SEQ ID NO: 12334 - DNA, 2046 bp, Heterodera glycines
  unsure (1)..(2046): unsure at all n locations
ccccccccccctccgaagccctacgcttttttattaccttgaaaatgccgcattcggcacgctctgcgcacctgcgtacgactttgaatggcatggctcgtcttccgcttcgttgtgtgccatccgcggcaccgttgcgcgtgtgcgattggaccatacacaatgcttttggactctcacaacgcacgttagtgcccgcgtcacgcgaagcgtcagcagcagtcaaagaaatgcaactggggtccgtgtcggaagagcacacgtggcaaagcagtggaactgaggcggaagggaaaatggcgaaaataaattaataaaaaaacatttattcgatttgcaaaataaaatatttaatgaatttacataaatattcacccttttccgcgcattttccatttgcgtttattttctgaccatttggacattggcaaccaaaaaaggacgactaaaagaacgaaaattaatttatttgtttattattttattagctcttttttcgaactccgttctctggcagaagccaattgccgcttggcgaacagatcagttgcatcgttttgccggattggcattttgccgaaattgtccgattttcaaaatgggccggtgtgcgcggaaaatttgccaacttttaaatattttagaataaaaatttttcaataaaaattattaaagatcggtaattttaaatttgcagatcccgctgcggtattggaattcaaaatttttgcgggattactggtggacaagccgtgctggacacgcggacacgttcaaccacaaagtttggccatttatcatcggcggagatttgaattcgaagtttggagtgcggggggaaaaattggatggaatggacgaacggatcggccataattcggcctaattaattgaaattaaaaattgatttggtaataaaatgataatagaccacaaacccaagggattgaaatgttccgctgaagggtccgcggaaagcgaagggccagcgaaataactgacccaaaccatacagtcgggacagggaataggcccaatttcaacggacagtgataaccaatcgccgcccgacacgtccatcaacggagtgatcagaaaacttagcggacatttcattaaatatatgaattatcaaaagagtagggacattgaacaaatgattgatcagtggattgaaagtgccaaaaaactcaatcagtcgatcaatcagttaattaagaagattaagcatcattaactaatattcaatcaatcagcagccaatcagtcggtcaatcaacaacaaataaaccaaacaaccaattaataatacctctgcagacgacgattggatggccaatacgcccaacttccatttgggtgaatttgatgccactaatttatgtaagaagatatctggctgatcaaacaaccaacaataataacctgaatggacgcgtgccatccgaacaatcgccgcgcactgtcaaaaaccacagctaaagaaggcactgatcagcaccaatcggctgttgtttttctcgcttttcaatcgactcgcctttctcgggctttgctgctctgaccagtgcgtctaattggccatattcggatgtttgatcagcagcagtgatcggctgcgtctgtccatcggccatcgcttctctcactgccctcctgacaaaatctaaaaactgggcgcatgacattaaattcaaaatgatttaaaacctaactttttacacatttccgcgctttccgatcgctcagagtgtaatttggttggacacattcaaaggacacttcctgcccctcaggtacactttcgcgggacggactcagcaaaatggtggaatttgctgtgaatttggacatatcacaaatgccgttactttctgttttggctaaaattaaataatttaaaaaatgttttcttttttgaccttcgcatttcggcaattcgtccattgaccatgccatttcaaagtttgtcaactttttgcaagtcattgtccattctttgccgaatgttctgagaattatttttttacganttaatttacccat

SEQ ID NO: 12335 - DNA, 2367 bp, Heterodera glycines
  unsure (1)..(2367): unsure at all n locations
cgcctaaaataanaggcgaaaaattcatagttagaaattatcagttttttcttacgtcacatagtctgccccctcccaaatgcgcttctttttgctggtcgttccttcgttgctcaatttttgtccaccatcagcttcggcacttcttttagctccaacggtagatgccgacctgcgtgcgggtcggtccgcagcagcaagcccatcattgtcagttccatcattttttgttggaattacctaaaaatgggagactttatactaaaaaactaatacatatttcccataaaacaaaatgctaaagaattttttggattggtttggctcactccgatcgtctctttggatgctcgccctcgcttcttcggttgctgttgttgaagcagtttagtgtcaccatcgatggtcaccgctttttccatttgctggcacagagttgaagcatttgctgctgccgcaccaccaccgccactggtgctaccaaacggaagcagttcgttgaactcgcgctgtatggtcgccatttgcttcttggtcagctttttggccaccggaggacggtggtgttgcagcggatagtgctgccgctgctgttcaattcttatatttgctgaaagcgtggaaaattaaaaatgaatgtggcctaatgagtaaatcatacgacaaataccccataagcaaggcacagagagagtgataggcttccccattcaaaccaagtggttgctctctatttgccaaaaagtgagtgtttttgggagaaggaacaattttaaatagctaacaataagctaaattgaaaaaaaaaccatcaatataaaaatgccatatgtttttttcaaacttttctattgaaatgtttattttctatccgatttgtcacggaccttcttcctcccgttgctgctggacagtgaaaacttgttgtcgatattctttcgggtggtataatatttctggccgattgtgagtgccgctgccattgtcattggttgccaccactttgaaatgcattgttggttgctgctgctgttggtgcgtttgtactggctgaacttgttgtagctgttgttgatgatttacagcaccagcagctgatgatgattgtgacggcggtgatggtggcccagaggcggtcgaagttgaccgcatcaaagaagaggtcgcatgttgcaacaagctggagctggcctgggccaagtcggccaaatcctccaaactctgaccagccgtcgagggcaaaagtgatgccgaatggcgcgccagcggctggcccattcccatcccatgagaactgtactgatgatgatgagcagccaaacgatggtggtggtggtgctgatgaaccattgttgtgccatctccacgtggcgtcgcaaagggcacattggggtgccgttgctgatggtggtaatgtttttgcggctgttgtgccgactggtcaacaaccaaatgttgctggtgcttggccggcgacaatggcgagacggtggtgacagaattcgcagttgtgtatggtgggtggatgaactgctgctgcggcacggatgtgatcgctgtagtggaggaaaatgttggagatggagcagtaactgcaacacaaccaccgccgcttatgccaaagcctgtggaggaagaggacgaagctggagcagaagcagcgggaaagttttgcattaccaacgcgtcaccacggacaacggaatcaatggcggaatcaatgctggactcatattgctggtggtgacgatgctgctgattttggtcgctaaatcgatggtgtggagggaggtggtggtcaaccggtgggatggggtcgtctggtggtttcgaagattcctgttgttgttgctgatgataggtggtgattgcgtctaatgatttggggggttaattttctgtgaaatatatttctcgtgtcaaaattaaaaattttagtcttatatttttaaattgtgcatgtacttaaaggcgaaaaactttcgggatcattaagtctgactcgatcacaaagtcggctgagaagacaaacttttttagttttccgttatttccaatcaaaaatttagcaagactttctttgaaaataatttcagagtgcggtatgaaatgggtttccgtttccccagttaaatttttaaacttactaaattgaaaatttctcaaggacaaaatcttatagttttatataagaaaaatttttgaaaaagattttttccttgagaaactaagatagtaaattttttttaaaactttctcgggggaaaaagtaatgcacctgaatttctccgatatagctcatcttacaattattatgacagactttcccaacaaaccatcaaaaatctcctcattctgttgttttct

SEQ ID NO: 12336 - DNA, 1920 bp, Heterodera glycines
  unsure (1)..(1920): unsure at all n locations
tgttgtagttgctgtccgccgctcagtttgaaaagaatttctcatattgcaggtcctcctccgccatcgtgtcaacaattgtgtgctgtggctgttggttgtgctgctctcgaccgaccatcaccaaattatgctgctgctgatggtgtcgctgaaattttggaaaaccaattattttttgtatactacgaataataactaacaataagaaaagaaaggaatgaattagccaagcctttttcatatgagaaggtcggggttttttttattagtgataaacccatcccncatctataattggttccgtaacttaaataatcgacgcttctcataaagtcatattttttttattacaaatgaaaagaagtcctccgtcatcttttggtttgcaaaaaaaatgtgataattctcgtgaaaacttgttcccgggatttttgggcccatgatcacgaatctgctatttttgcttgaccaatttctaaacgaactcaaactcgaaaagacaaaaattcaattttctcgatttagattttttttaaataaaatttaagttgaggacaaaatagacgtcagatttgtgattagagggaccccaaaaaacccggaaacaaagtagctgattatcgctaattgtttattcacttcgtcaaaatgatgttgttgctgttggcgtttaaccatttgcgttgcgctgctgctgtacggtcgtttgactaacgacggaatttgtgacactggacgcgaaccaccgctgtggctgtttggatggaccacaccaccaacaccgactccaccgcgtgccattgtctgcgctgacaacgccgttgacattctttgttgtgccgccgaatgtacagcttggtgctgttgctgtccatgctgaccaccacgccaaccgccaacgggcgcatgttgcgacgacagcgtataggaggaggacagacgaggtgacagacggcgctgctggcgcaacgattgcggaagagcagccgcagacgaaatgaacgccggcgccacatggtgggaagacaaatgcttttgaggatgggctacagggattttaaacgcgaaattatgggcatattgaaaaacatgggtcaggattcataaagaagcggaaattaagattgagaaaagcaaattccgtctctgtactaccgaaaaaggggaaataaaaaggaaattttgaattcttttaactgccttttgaaaaagtgactcgtttttcatggttgtcctggacaaaaaatccaagccaagcaaaatcctttcacatttaattttattcaataaacattgtattttgattaagtttaaaaaaaccaacctatcaaagctctctttggatgctgttgcttgtaaaaatccattgactcatagctcggaaatttgatggcacggcgttggacatggagaaaaggtgcagaaaaagtgccgggcattgcagggacggtgtttgcttcgtcttcaattggatctgaagttcattgctattaaaacaagtttataatatagttcttagaaaatttataattttaaaatatcaattataattaatgaaatgcaaaaaaaaaaccaatgttaattccgtgcataacgggaaaatcgcgtttggtctgtgacgcaacatttgttggtgtttcagctgattgcgaaattgacgaaacataatcatggtcctgaacaaaatattggaaatcaaaagtatataagaaaaatttgttaaatcatttaaatccgattcgaaatggcgtaatgttatagtaaaactgaagcaattttttattgaattatattttgtgaattatcggtcactaccctttttaataatgcgttaatgtatttattaacatttatagattacaaacccaagttcagagcggtcccaatgacaaattgtgacctgccaggccatgcaag

SEQ ID NO: 12337 - DNA, 632 bp, Heterodera glycines
atctatcgtaaatgtagcggtaatttaaatcgattgtgtacggtacgaccattttttaataaagtggctgcgatgccactaaaagccatattggagactctttttccaaatccgcgtaataaatgaaataaagcactttgaacaaaagattttcctgtccctcctggtccatctatataaaaacaatgtggttcattttttccttggtcttcacaaatatttttcacacaattaaaaagttctttttgatcattattcattaaagaatactttcttaaagcaaaattaagttcttctttgggatcaaatatttgatcttcagaaatatgttcagttattttggttatttttggcatatccgtaaaatcttttaaggattttccataattattaatgttttgatcaatgaatgataaggccatttgataagcaatgttttcagtatattgttttttaagatcataacttaagtcgtctttatatttgttccataataaacctgggtgttttggttcacaattaataaggatattagcaaaaagcgaacgaagtcctcttggaaatttaaaaaggcttgcttcatttaaacatttatcccattctaaatcatctcttgttattcctaaagccaa

SEQ ID NO: 12338 - DNA, 1021 bp, Heterodera glycines
ccatcccatcggcggattgtgatgggtgcccgagctgtcattggattagccacataaaactgctggtcaattagagttcgtaaacggagaattccctcatttttgcgggagtgcgattctcggggcacaaaatgccgcggggggaagagaagggaagggaagggaattcgttgcgttggccgcgggggcggcacattttgccaatgcgttttattatgtttttgtttgtttgtttgttgtctctgttcccttttctcaatgtgtttgcttattattttgtgcttttgcctctttttctttcttttcttttttttctttgcctttttcgaaaagtgccaaaaacgaatttttgaattccctggggacaaaaaaagcaatgaaagaatggcaaaagaagaaaaagcattaaaaagcgaaaggaaagaaacaaatggaaatccgccgaaagaaaaactcaatttcagaacgaaagtcggaatgacagcagggcattttgagtctgagctgattggagtgtgctgtgagctgtgagcgataagaaaagtgggcgatggacgcaaaagaaatgggcaaatttaattgcccatttattaatggacggattcttactaatgatcgaattaattaattaattggacaaaaagaaataaaattcgaataaataaataaggcataaataaaagaggaaaagtgaaacatctttcaacagacaaatgaatgaatgaaaatggaatgagaatatgaagaatgaattttcatgataattatgtataaaccgcgagaaatttgtgctcttttggatgatcctccgatttgttacattttattgctatggtgacagcactaaaaacaatctgaggaagagagaaatgagtgattggaaggggaaaaggcaacactcataaaaagggggagagagagagagagagaggggggggagagagaaaggagaggggagagagagagaggaagagagagagaaagagagagagagaaaggagaggggagagagacagagaga

SEQ ID NO: 12339 - DNA, 1351 bp, Heterodera glycines
  unsure (1)..(1351): unsure at all n locations
ggggtaatagatgagagagaaagtacgggtaaagaaggtgagaaagagaggtgtgatatcgtccagcagggcattaataaattagtgatcggggagaaatgatcgttcgttctgtcagtcattcattcatcataacagcaacggttataaattgtaattaatggcctaagtaggcaattaattgaagagaaagatgaaaagtccgcaaaaaggaaacgtacaattgcgaattttaagtgattgacttttcagcagaatcagtgatataaaccgttcactgatttcccaattaatccactaaaagcgtaatgcttttccttctccctttccttacgattcgttcgactttttccataaatttgttgtccaattcattacaataaaatatccgcgcccaattaccaaagtgtttatttaaattaacaaaaaatatctaggtataataaacaaaatctgtttaaatttctgggatattgaataaatagacaattcaaaaaatgagtgattttcattaatttttatttgggattcgcacgaggattttttcattcgtcgtttttttatattaaaaattttaattaaaaaattatttcttattttatgtgtttaaatcccaaattttaaagaaaaaaaaacgcaaaagaaaaatggcgagaaaaaaaggaaaaaagaaagaaaatcaaaattgaaatgaaatgagcaaatgccaattttgttctgctttctttcgtcttttcttgctgatcattcatcggtttcttctcgacggcggcggcattaagggcaaagggggaggcaaaggcgaaaattggcacattatcggagtgcgacggtagcgggagggatcgacggcggaatgaacgcttctgaagggacagctaatttgatcaaaaagaaagaaagaacagtgatcagaaattaagggaaccgaaaagaaagaaatggaaattggaaagaaaatgagtgatcagaaaaggacgtctttcttcaaaaaaagaatgatggtgattgatcagacaggaaagatcagtaatcggaaagagttgcttcttccactcactcattgcccacaaatgatgctatgctgtattcactggacggaaaatgcctcagtttcgcccgtcgcgtcgcttcaccagtgaaaagaaaatgagaaggacacgcggaggaagaagccaatggcctaaagagtccgattgatcaattggactttggacaattgtccactgatttggacactttctcaccttttctcgatgtcgaattgcgtcggctcttccgggtccgcgtatttgtccgntgtcctcctccgacgcttttcctccgctgatncatgcccttttcacatttt

SEQ ID NO: 12340 - DNA, 1258 bp, Heterodera glycines
cagagacagagcagggcacagcccaaaacgaacgcacatacaaatgccactgaaggtgggaggggggggggggggggaaggtgggacattaggtttctttaaattaaattttcaagcatttttaaataattttgcgaactaatgatattgaattaaaatatttttaataatttatcagcatcagcttcgccgtaccctcctcacctatcaaaagacaatctgtgccgtccgtcgtcctttgcctttgcttttcgtcgccgtttccttctgcgctttgtccaatttcaaatgtttcactttttggggtcaaattcgaattttgtccttccaaaattgtttttgctccgtttgaaacgtcttctgaaaagattaaaattccttccgaagttgcgctttttctattcacccgactcggttcgaatttcgctgatcagcagccatttcgcagcatttccaaaatgcaattccaagcggactttggtcccaattcggtgcggaatcggaacgcgaatccatcgggcggactcagccagaaagtcgggcggcacatcgaactgaaatttcgattttgatcgtttagtgccaactcaaaagtcatcagaattgcctgaacgattctcgatgaaaaagtgtcgccgatgggagcgaaaaggacgcggacaaagcgaaaaaggggggcaccggcacggcgaaagttggacgagtgaagagaaaaggaggaaaagttttgaggtttggagaaaaacagttcgatggagacgaacggagctaagggagagggaaaagtgatcaaagcaaaatgatcagaagaagaaattggaagaagggaattagaaaattaaaaacagcgaccgaatttcccgaaaaattaaaatttgcgcgacaaagtgttgcagggacggttccagtggtaccctccccccctgagacagtccctgaggagttgtgccgttcgctgcccccccccccctctcaccccccatttggtctgtcctccatccgacccatccctcgggtcgttcctcaaaattgtcttctccaactgttccgtcgaacagtcgaccgatccctccacacagcaaagtgtcggccaattgtctgcttccatttttcacttcggtcgccgatccatcgtaagacgaatcgcgaaggtcaagagcatcggcgaaagaagcggaaggagcggaataggagagaagggcatctgaaaagccaattggcaaaagagcggaagggaaaaggaaaacgaaagacggaa

SEQ ID NO: 12341 - DNA, 1413 bp, Heterodera glycines
  unsure (1)..(1413): unsure at all n locations
cttgcatggcnnctgcaggtccgaatggtgagtgccacannttctctgagccaaacacaaatgccagcctatcgttggtgcattttcggtacaccagtgccgggatggtggattcgtatggggtgaagccgtgtttctgggaatttttaaattttttcaattttttcaaacaacctctttgcaaaaatcgagacaaaaaacactgtctgtgccgacggtcaacggcatttggcgctttattaataatcaatattctaattatgcttggtaattaaacatttaaattacgaaaggaagcagaattaaattcaattttttaatttaaaaatatttttcattcaaaaataaaaattatgaaaaaaaaaaattgaaatttgttggaattaaatttatatttaatgaatttaatgacaattgtataattttctaaacagaataaaggagttaattaatgcaattgttttgattgatgcaatgttctaattaataaataaattaatccaaaaaacaaagaaaaatgattaaaattttcacattattgaagacgatttacaacaacactaattacactaattaaaatgctgctgaatgatgattggctcccaattgatcggacggacaatgttccgatcagttagcaggccaaaggcacaaatcgtccgtccccaataacgccccccgccagcggcggtgggtggaaagagggcatatgggcattgatcgctttaacaggcgaccccatttaacggaagcctgggacacaaaaatagcactgaaaagccaatttgcccccaggcggacggagaaaggccgccttaatttatcaaagggggaaatccgctgtttgaacaacaaaacattgaggggcagagagggggaggggggcaaaagccgggacgggggagacaaagcacagatgttcggaaaagaggtggaaaatcggggaagagaaatttccgtaaataaatggtagggctgctcgagatttggggtctgtcgaaaattttggggtttttaaggtgtcggtctcgattctcagggggtcgattctcggtttatgtcatggttgtcaactcgagaaatttctcgggtttttaggtgtcagtctcgactctcgtgtttaattctcagtctcgttctcgagccgcgaaatttctcggattttacgctgtcgttctcgactactcttgagttcatttctcggtcttgttctcgagtcgagaatttctcgggttttttgggtgttgttctcgtctcttgcgttcatttttcgggctcggtcgccgagtcatggatatcttggatagtatgattcaacgattcgaaatcatttgataatataattgatggtataactataataattagcaatcaacgattttgaaatttaattcattagcttacactgatgaa

SEQ ID NO: 12342 - DNA, 2919 bp, Heterodera glycines
agattaaaattttgaaaagcctcatttggcaagcaaaaaagcctcattttgactcgaaaagcctcatttctacaaatttattcaaaacacatttaaaatgttcaaatcttatatttttgattgtccatgaccaattttagcagttttttgctagctttttgtgaaattctgagcatgaaaaatcgaagttgatttttgcagcgctttttccaattttttgggggaacaggggggtccggttagcagattttcattaaaaatttcagccgtcaatttgccgccctcggcggtgccaaacgcgagcattttggacaaaattgtgccaaagccgggccaacgcatgcgcattactgatcgcattcggacatttgagcaaattgtgaccgaaattgacgtaagcgtttgcaaaaataggaaaattggttgctaatgccaataaaaattgaaaattttttgcgggtggcgggaaattggtgcaatagcaaaaattcaccatttgccaaatttcttgccccaccccctaacaaaaaatggtcatttttttaattttcacccttttccgtatttttaaaaattaattacgaactctccattatttttcgctaccctaccccaaaaaataaatatatatatttttacttttttcaaaattctcaccctcccccctccacagtttttagagcgtccaattttgtatttcaccctcccccctttaattttttttttctataacctgcctcaaatattttcacccccccccctccatccgttttttcaaattttcttttaaaatttgccaaccccttcctaatttttttaaaaatttcctaccccctctgattttcagtttctttacactgtgtccacggaagtgccgtcggcactctctgatgagcattgggtccaattgttggacacggtcagcgctgctgaacgtgaacatttgctgcgcaccattcactacgcccagctggtggagaaggcggcggccgcggaacgccaaacactgaaaaatggcacaaaaacggtaaaaaatggaaattttttgaaaaatttttttttgaggacgaccaccatatagaaggtcacgggattatctgggtcagttcaggaacgattctcgaattttggatagcaaataacgaaaaaaaaatttttttaaatttaaatacaaaaaattttccgccgttttttttttcgtttttgagtccttggcttggcgttggctgtccggttctggcaaaatgtacaaaaaaaaaggctcccttttccattgattggcatttccgggggagggggccttgaaaaatttccagtaagaattttttttttttggtcgacttgaaggaaaaaggactaaaaaattgccaaaaaaaatacgggcgccaaattttttttacattttttttctgttttttttttacctaatttaaactcatttaaaaaatgcgcatttttttaaagttggacgtcattgctggagttaatgatgatgatgatgatggttgtgttgctcattcttcctcctccgccacaacagcaacaaactctccaaattatcagcaaatgtttggcgacgaattctgtgaccaaagcgcactgaaaagtataaaatttattttcaaaaaaatttttttttttttttataaattttggccaaaaaagtaatttttttttaatttatccccaaaaagtgcgataaaaacgcatttttgtgcctggaaataaattttaaaatcgaaatttattttcccacaataaaatttagcatgaaaaagttctaaattcaaacaaatttttaccgtttatattagtaaaatgggaaaattcttgcaaaattttattgtttcagcagactttttttgcgtgcatttttcaaatctaaaaaatcgctttttttaggccgaatggacacacatttcgggttggcattgtgccgcaattttttgctggagccctccgatcgaatgcccaatttattcgtggactgtcgctttatgtacgcgcacaaaacggcgcacattctcagcgcggcaaagtgagcgatagcaaaaaaataattaattaattatccaataaaaataatataattaatttttgtgccggaaaaaaattttggaaggaaaaaatttcaaaattttttcaaaaccaaaaaatgttgcaaaatttttcataaaaaagtgcatcactttttttaagttagcatgtgtttctttatttaaatagcatatgatttttttactttctcgactttattaatttttttaaaaattttaagagttttttcctttggatcaaaaatttgtctgtcattatctttattttcaaaattaattaccataattaatttgttaattgcttttaacggcgtgtcaaccaattgcacatgacaaattggacgagttcagcaccatttcccgttaatattgtcaacttttttgcggacgacacagtgaatcgaattgtcaaaaagtttatttgtttttatgccaattaaattttatttttccaaattttagccaatggcactttttgcacggcacgccaaatgaacagtcaaaggaaatgggcggcggggtaattaattaatttttattatttttgtaaatatgtttcagcatttcgtgccccacccattcgcaccgcaagtgaccacgcgggggctaagcgaaatttgtgaacgcaattccatcccaaaaggtgggggcagagagagagagaaattttaaaaatatatttttcaattggtggattaaaaattaaaaatataatttccattcaaatttctaatttattttacgaaatagtttaaattaactttaaaaaaaaatttttattaaataatttcaaacggatttgctcacacaatttaattgttctaaaattttaaacaattttttggtaattataatttttaaa

SEQ ID NO: 12343 - DNA, 4398 bp, Heterodera glycines
cttctccttcctgtcgttccttcggccaacaaatcccctaatgtctcatgcttttcctcacttattaaatcccccaaatttttctttttttgcttttcctctgcttgtaaattctccgctttatctttgccttccttggccttcagttggcccaatgtttctcctcgtttcttcgcttctacggatttccctgtttttgtcccatcgacaaaaatttggtgcttcaaaagcagcataaagagaatagaaacaaaaaaataagttaaatttttcatttattaaaaaatctaaaaaatatgtaaattcaaatgtaaattagttatgcgtgggcaattttattacatgtaatatataaattacgaattataagagctttctatatttattgattttgaattatccttcatagatttgatttaggattatcattggatggtgctaatatggagaatacaactgctaggaaatccccacaaaaaaaaatttgttcactttccttaaattgtttttataaaaaatcaaaaattcttttcaattttttcatttatttggattcatgacccaagtcaggggttgatgctgcaattatgccctttaatcacaaaatttcgcttctatctattcttaccagttttttaaataacaaagaatagggtttttattactaattttcatataataaatttttaaattattaatttagattaaattgaagaatgaatgtggaaaatttataaatgtcaattcataaaaaattgcacatgtgatatgtgattgacatgaattgattttcaatgctttattaggttaaagattttttaaaggtgcaaccttaagaaagtttatttgaaaaataaaaataatttagtcattaaaagtgaatttataaatggagcaaacttacaaaggaagggcctcaattgtccgtgggatttctgaatgaaattttgtgggtggatagagcgccgcagtgacaaaggacccacagtcaaaggaaattctttattttaaagtaaatttttttttgttattttatttttaattttaaaaaatattaaaaaaaaaatcgttttttttaatttaatttttattttttttgaagtttcaggtgtaaaaaaaaattatttaaaaaaaaaataaaaaaatctgtttttttaaattttttttccagacccacgacaaaggacccacaaaggcaaaggacccacagacaaagggcacaaaataataatttaattaaaaatattagagaatgggatgatgattgtgctaattcagggatgggatcgcccaatgtcggtttccaaggacgggtatgccgatttgcaaggacatagtggggaaaattcatgaaattcaaaggacatttaaaatttttattatatgcaatgaaaatggttaatattaattcaaatggcttgtatttttcaccggaatggattttttccaatatttttttgtttccattgatcattttcctcatttccgcgcacgtgagatcaaagttcacctgcaccagtagcaacgctttgactgattcaacttccaatagatttctttctttggtccattgactgcttgccagtgaaaaaactcgttccacgaatgcgttggatgtcggaatctttaaaataaattttcatttatccattattttttaatgaccgagaaagctgcactgacgattcgatacaaatttgcataggcctctgttgcaccatccgcctcaaaaatgcccttccatttatcttcggctgatttgagccaaaattcttcgggaatgtcggccaatgtttggttcaccgcagacacttcatcaaacagttcatccaattgcgctatttcgggacaaatttgctcagcaagttgcacaacttctgcagaattcaaaggatgattttgtaaatttgtccatgaaatattttttggtagtaattggagttggaaccagcgatcaatgtatttgagcacaattttgtaaaaattctttaaaaaaatgcattaataaaacaaaaataccaaaaaattttacgcaaaaatctttttcaagttccgttgatgcacggcgcaacgcaaaatgtcctccaaaaaatggccttcccgaatttccagtgccgtgcaaacgacctttaattttggcacgaaattgttccataatactgattaaatccggcagcatcaaatttgatttctgtaaaaacattgtgaccttaattaaaaaaataattgttaacttgtaatgccaaaatgggctcatcaaacgtcttcaacacattttgtaaaaagtaacaaattggttcagaattttccgattgaaaaaattcatgtaaaacacgcggcttgttcggcattgcaaaaagctcttttaattggtgccatttctctaacatccggctgaccacttttgatagggtagtccaacgtgtgggtgcatgagttggcaatggtacaaaagtcgtctttaaaacaaaattaattttaaaatttgaaaattgagcacctcatattggtcacaaatttcatgaaattcggtgtgtctttgcgttgatcctttgaaatatgaagttaatttgtaaacgacggactcaatgtcaaattgcaattgttcggcacccttttttgctgcattatgcaaaatatgggctgaaatttttaaataagaagaacaaacaatttaaaaataatcggaacagccaatcggaattttcccaatcgggattgaaagaacatttgcgcttatttgaaaacattctgaaataaaaatgggtatcacgaaagattcctaataccatattaataataataataaacaataattctgaactatgagcaaaaaaaattgacataatgccataatttaatatccaaattacgttgacttttaaagtaaaattttagaaaaaaaatttttttcttaaaaaaatttttgccgttcccggcgggatttccgttaaaattgacgggatttttacgggaacgggaaaaaggcaatcccgtccgggaatcccgccaaactcttaaaaatggggaaattatataaaagaagaattaaatataataaaatggtaattagctaattaatattaccaaaatcgcacgcacaatgacaaggacaaaaaaagcggagttaaactcggcaaagttggcgatgatcacccacaactccaagcagtacagcacagctgatggaatgccgatgatcagcgcaaaagcaaaagggacgaactcagcattggcaattagttgaatgacggtgaaaaaggtgaaggaaggcatttgaaagtaaaattttatcttaattagctgacaaatttaaatgctccatttgccattaatttgtgctcccattttatgccacaaatattctttaaaaaattatttttggtatttgaagaattaatttgtgacatatttaataagcttttaactcattttacatcttttgcaggtgccttttactgatcaaaaattgttttattgtcattggtatttatttttggaaattgctttttaattatgcgtagctcattttattctattccgtgctcattttgccttattgtgaataataaatttggatatttgtaagattaatttttgaatatttgataagtgttgcgtttgttagggacaatgaaaggtgctaaaaataaaaaacattgttaagaaaatcctcttcctataaaggatgcgcttcctaaaaaggtaaataatttgttggaatcctattaaaacatgctttttgtccgggatccttcgggttcagtttggaatacggatcctggcccaagtccggattttcaactccaggttctacgtatccttaccaataacgaccagtgttgcgaatccatatttttttttcacgtcccgcggcaaccccttgaaaattatctcacttacatacttttgttgataagaagaaaaatgtaattccaatatagaaattaaaaataaaaccaaatttttagctttcgtttttaaacctgctatttttgttacaagcatcaaaattatattaagctattacgaacaattaaggaaatctgtaatccttcgctatggaacacatgatatgatcgtttttttcttctatcgtttgaaaaatttttgatttgaaatatcatagccttttctgcagcaaatcaattaataaaaagaatttccaataatcctttatcaaaaaacagtggtaattcaaatacaatgacatcatcaaagtttgttttataaaaataaaaaagaatttaaaaataaacgagaaaaacggaaaataaaaggccaaaaaaagaaagatgaaaaaagaagaaaaagcgactttccaaataaagacagctgaaatttaaccccaattaagggatttcatcatcaaaagcccaaaaacggggggggggattt

SEQ ID NO: 12344 - DNA, 1537 bp, Heterodera glycines
  unsure (1)..(1537): unsure at all n locations
ccaccggttcgacgtgctttctctgttttttagaaataggctaatcaagagctcttcttgaatgaaatccacttttctcgagttttgaaccagttcaaaaaccgtttaaattttcaatgttttttttttggggtttctatcgttttcagcaccaaaaaaccctataaaagtggtttgggtattcccacctcctcctccccctcgggcattattttcttcattgccatcctcatccaattccgccgcagacggctgtgccacgttcagatcggtgctctccgcacactttgggcaaaacacattttcgagcagtacactggcacaaggcgtccaatccgccaacggcccgtacatttcttttggcgtaccgtcctttttaaaatttaaaaaatgaacaaatattgagaggtggacggaaaggggggcattatcgtagttgtagtactgtacttgttgaaggatgagcaacagttggtgtcggatttgttcaatttgttcgtccagcgcggggatgacacccaacaccttttttaaagggcaatagaaaaattaaattcaacgggagcagttgattcacaccacctcccggaaatttaaaaaaaacttagaaattttcaaaaaaaaaatgaaaaaaaaattttaaagaaaacttcatgaaaattatttttttaaatgttctagtgatttgactttaaaattttatgacgaattactaaattttcccaaaaaatcactataaaaaagtttcaaaattttttcaaacaaacatcaatttgtcttttttgaacatttgatttattctgcgtaaaacaaaatgccaaaaaaaaaagaaattttttttactcggcaaatgcaattgacaaattcaaagggcatgtcctcgcccccgtccccgcagtgttcggccagcggacggagttggggccgtgcagcgacaaggagggaggttaacttgaacaggccgggcaccaactcctcccgcagttgggccacacagaacgtggccaagtcctgctcctcctccgagtcgacgtccgcttcttcctgccgcctccgccgccttccttttgaagaagtgttggttttgttgctgctgctcgtagtggtggtggtgatggattgggaattctgcggtgcaaataattaaataatttaggatttatgttttaaaaattacataatcaacaagattatccgtaaaattttagtatcgggagtgggccataatgcatgaacccaactctttgttttagtttttaaaaatgaactatttattaaaacaaattgaaaataaaatttttgggtatttttaaaagaattttaaaaaaacaaaaattattgtacgagttgccaatgagccaaaattgtaggataaaagagctatgaaagcggtaggtaattttaatttaagattttgccgaaaatcgaaaatttcaatcgaaaaatcaaaaatgttttttgacgaccggctaggtcgaccattaaaacttcacagcgcattttgcattttcaaatccccccanagtgtcgtcgtcgt

SEQ ID NO: 12345 - DNA, 1493 bp, Heterodera glycines
  unsure (1)..(1493): unsure at all n locations
ttaaatgtacacctccaaaaataattttctaaatgttaacaggtgattctaaacatatttaggtcatttttatgccattttacgcctatttaacactttacgaaggttttttcccaaaaaataaccatttaaaaaaattttatttacatattttcgtacatattttgggtttatatacatatttcttacatatttggggattttttttacatatttatgtacatattttgaccaatttttgtacatatttttgacatccctattcattattatcctttttctaaagatattttgtatgaatttcttgaatttaagcaaagcaaatggctgaaaaacctgattccatttggttttatttccatcgtcctataaatggcgcaattcgctgcaaatattgcagtgccatttgatttttaaacaaattaaaaatttgtcaattgacccgaaacccggcctttttctcgacccgaaacccgacccgatgattttcgacccgatatttttctcgacccggaacaaccctgaaatgtacaagaaagcttcccgtttttaacgggacagactcattttaagagaaacaatttttgaaaaaattttcagtgatttttagagaatttttattaattaaaaacttagtttttcataataaaaaaaatgtttcaaaattttttttttaaataatatctaatttttagttaggaaatttttctttaaaatttttttttttttggggcggggacgacgggaagaaatgatctgctcctaattgctgaccaccgaaccgatcgactgacctgtttgtggagaacacaatgcgcgtgaatgagcagtggatgacagtggcgcctaacttttgcatttcggcaaccagcagcaggcacagtttgcgcatcagtgtgatcagtgtggcgcgcagtgacgggtggaacagcaacgagctgggatcactgatccatctgatcagaaaaagaaagaatgaatgagaatatccaaagacagataaagagaatgcaattggatcactgatccatctgatcagaaataaaatgaaggaatgggagataaagagaacaaactgaatcactgatcagaaagaatgagggaaaaggtgcttatccgatcagaaagatatagtgaataaaatttgatcactgatccatctgatcagaaaaagaaagaatgaatgagaatatccaaagacagataaagagaatgcaattggatcactgatccatctgatcagaaaagaaataatagtgcgggaaatgatagcttatccgaagccagctgataaagaagaataaaattggattaatgagccctgtgataaaagcaaatgcctgcagaaatggctaatcagtgacagatcagaggctanattaatttgggttgaaatttgatttcgactccaggcaattaatttgaccgacggacgacgacctgtgcatgttgaccaccaactgatcggcaaacacgttggagtgatgatggat

SEQ ID NO: 12346 - DNA, 1354 bp, Heterodera glycines
  unsure (1)..(1354): unsure at all n locations
ataattttatttaaataatattaatggcattaaaattcctttttatgggccgcacttgcggttgcggcaaagcccgtctgctcggaggtgccttcggcctccgaaatgttggcactttgcaacagtgcggtcactgccaccgcacccaaactcagctcagcagtcacaaaattggcctgggaaagataataaataatattcaaatataaatgttcaataatactttttaaaattttaaatgcgaattaataaaaaaaaaattcctttttccccgatccgttctttggggttttcgggaccgccgatcacgaacccatacccatttcggtcatccctaatcaccaacttgaattcgaacaaaaccccgaaaaattgattatccanattttcgtcgtttgtttcaaatttggatgagggattagaattgatcaaagtgaatgccatattcgtgagcaaatgtttttcacaaaaaatacaacattttgtttcccaaatggcattttcattaatcactgccccaccaccattttacgggaacaggacaaaatcacgccgccagaaattttttaaaaaattttcaaacctagaattttttcaagaaaaaattctcagaaaattttttataagaaagtttaaagaaaaaaaaatttttgaaaaattttcagcgatttttttttgaattttatgataaattactaagtttttttgaaaattttccaaaaaaaattttttaaaaatttctagcggcgtgattttgtcccggcgttatttcggcggcgtgattttggggtgcaccccattttacgacctcaaatgtctctttgttgaacacaaacggacgcgcttcggtgaacgcggcactttcccattcgttggcgagacgccaatccttaaaaattttaattaattcgagtcaaatttcatgccattttagtcaaccatccctctcccccaccacctccaactctttgcccccaaaatcgggcaccgccgacggcgaagcccacaacaaatggtttttggcgtgtaacgcgcgcgcaaatgccacatccagcgccagggacggcacatcggcgggcaaattgccgacggggatttcactgtacatggatacggtccagtgctccttggggagggcgaacggagttagagggatgatttaaaatgtaattattacatttttcattaaagcgttattttaatttaatttattatttttactattttgtattttaagactaattttcatccataaattttaaagttaaaaaaaaggaaataataattcacaataaaattattctaattgtttctacaaaatctgaaaataaaaatatttataatcaccagtaaa

SEQ ID NO: 12347 - DNA, 3301 bp, Heterodera glycines
tttctacaaaaaatcattaaaatgactaattattaaacaaatatatttttttggaattcataattattattagtccatgtttattgaaaagatggaatttgcttatacaaaattttgaaaatttttaatcatgaaaattgaatcaatttttatatttagtcattaatcacttcctaattaatattttttgaattaattttatatttttgacatttttaaattaataataatttagcttaattacatgttcgaggtgttaatgccaaaatatggcctaaatgacaaatttttgattttactcgaagaggaccatattgtggcaccggattttttgcatacacttcaattgattgtcaaaaatcgtaaaaagtaaataaaaatattttttaatcctaacaattttttttgtaatttttgaattttgggcaattattttatggtataaattaaaataaaaaattaatttaagcatttgctccaattgtgaaatgctttgtcttggaacatatccaagcacatttgccaattatgcggagaatataaataaattgggtgtcgaagtgtggttcagcagcaagaacaatttgggccttgcaatggaccggcaattatggcgacaaattcaaaattgtgcaaaggttttaaaataaattttgacttttacatgaatatttttaaatattttgtgagaaatttttgtaaaaaaggttaaataatatatatataaaaataaattgatactaattggaaattcttaatttgtttaatcaaaatattaagtaaagagtttaaataaaatattgcttaattctaaacttttttttcattctgttcaccgctttttcatactttttattaaatttttaatttttaatcaaattaacaaataaattaattaaaattagaaataaaatttaaatcattataattcgctgcttttcctgtttttctgtacatgggacgattacaattgggattggaccttgttgcagttgagcattcaatgtttgcccaaaaggtttgaagtgatctacaccgaggcaccacggtcggatttaatgacacattttaaaatatataaaaataaaaatgtcattaattaaaggcttggtcctaattaaacattaattaattgggttacaatttattttactattaattaagggtaattcatgtcggtgactgtggcgtgcattggcacaaatgtgagaacgatcgccgatcattggaccaggcattgtcagcttgatcaattaattgactaattaattaatgtaaatggtaattatcatttatttttgaagggatttgttcgatagagttaacgattcatttttcccgtcaaaattggaagtgtctcatgtcaatgggcatatgaaaggtgttccgtccggaccaaatggtggttgggcggatccaaggcaaattttttttaaataaatttccgaaaaaatgagatatttaataaaaaataaatttaattataaattttgggtacttttccgttatggggccgcactttcaacttttaaaagtgcggcctcataactggaaattgccaattttgtaaaattagaccagaattcttgacaaaaaggcaaaatttcaaaataatatgacaaaaggaattttactcttttttaattgtttagggaccacagattatgtgaattgaacactcatccatcagctgatgataatcccgccaaaatactaaatgaagctcgtctggctgattaagacgaagaaaatgaaatgtaaaaacaaattttatttttgatatttctaatcatttttaaatttgttttaaattttatgcttttgttgtttttgggttgtataaatgtaaaaattataattgatatattttccttaattagacttgaaccgaataaattgagaaaatcacgaaaaacattttttagaatacaaaaaatttttgtaaaagagaattttcaacaaaaaaaataaacaatttaggagaataaacatatgaaagtttccaaatccaataatccctaggaaatacaaggttgaaaatgggaaaaaaagtgttcatcagttcatctgctgttctcttttgcccaacagttggccaaatcctgaaaggatttaaatttaataaaaaaattaaaattacaattttggcattacatttgtgtttgcatttcgcctctgctctcgcttctttaacctccttcataatttcgttatccccatttactaatgatgctggcacatacattgcttctctgagcggttccaatgccatcaaatcattatggcgatttggcctagtcaaccctgcgccgctgctggccgttcgccttaatggcgtgccagaaatcgccccatcatccaggccattatgacgatttgcgccgctgctggccgttcgccttaatggcgtgccggaagtggtcccaccactgccaaatgggaagccaagaccgccaccaaatggaactgtcgaaccaaccacgcttgaaattgcttttgcgctctcaccaatgtatcgcataaaacctgaaacccactggatagttaggtaaaaaaaatttttggtggttatattatggttttcttttaaaatcataaaaatttccaggcccaggttactagggacttgttttcgagtgttggcgggggggggggtggtagaggggtgatagggccataataataaaagcagaaaaatagaaaaaaaaatatatttttttaaacaaatttaccaggcatttatttatataattttaaatattaatgtagtatttataagggaagaagttgcgaggcaataaaaaattttggaagtcggaattacgtgcaacaaatattttagacgttgaacccaaacattttcttaaaaaatttcggaactctgttatcaaatttccaaaaattttctggctttataaaaataaaacactaatattccatacccataaaaatattttaaaagtattatttaatataaattgtaaatgaaatgaaatttggtcctacttttcttcacatctatcatcattacccgggggcacacgacacactcaaaaagcagataaacaagaattgcatcaaatgatgatcccgcccccccccccgcccttcaaaattttgaaaaaaaaataaaataataggagactcagaattttgaaaattttttataaaaactgatgacaagctaatgtgataaaacaggttaattcttttcctttcagtatccctgcaaagtttggggcgcttctgatcagtttctgaaaaaaaagttaagcctaaactttttggcctgtttaaaaag

SEQ ID NO: 12348 - DNA, 2048 bp, Heterodera glycines
  unsure (1)..(2048): unsure at all n locations
attttttcggttttcattgcattttttcttataaaaatcccagaaaaaatttatcttcgaataatagtgacccgaaatgattaaaaaaaaaatacagaaaggaaatttttttgagttatataaaatcaaagcaaaatttagtcatgtaaaagccaataaagaaccctagaagagtatgatgttaattgttgtttttctgctgattattgcgaagcgtcatctctttcaaatttttttctgccatatcaagagcctttatctaaaatttcattaaaaaaaagaatacaactgcgaaattccttaattacacaaataaaaacttttaaaatttgtacaataatctatgtaaaataacacaaaatttaatttatatgctaatgatcagacagcgaccttatttatttgttgattattagggttgcaaattatatggaataaaaacaccatacatggactaataaaactgtcaaaatattatcgaaaaaattctcttttggggggggggggggtgtatttttaaaaaattttccgaacatcgatttttaggagtatttttcgcatttatttttgcgtttttattgggaaaatgtcaaaaaaatggctgaaacatggattaaaaacgtaaaaatggcgaaatatggatttattccaaaagttctaaatattgatttataggtatgtgcgaaaaagcttcaccaaatataaaaaatttaaacgtagaattgctatttttgagcccctttctttaatttaaggcgtaaaatgaaatttttctctcggattttggccgagtttgggttgggttttcagatcataaaccttcaccttacatctagggaagcaactctttagtgatttaactattttttatcactatttttgcgcttcgtcactaaaatagttaaaattcactattttggctttttgtcactattttactatttttcactatgtcgacatttttggaaatacattaacaaaatgaatttttgatttaaaaatgttcaattttttgctaagaaaacatttgaaatatttaaaattttgccaaaaatttggaaatatatttgcaaatacaaccagtgaataaaaatttatttttgctcgattttggctgaaaattatgtcgctatttgtcattattttggcatttttgctcattattttagttaaatatttcgagatttttcgtaactaaaagttgcttccctaattgtgaaatttaatccgatttgaaatcaattgaaatccagatgatgccctgcggccctcaatattctttaaaaattgtttttcttttttttcacctcatcttccattcgcattttctcgagctgcttagccttgctttccgccgcttgcttgccattgccaacattttgttgtcggttatttgttcgaagtgtcgcgtgcggtttggtggaaaggagccagtctggaagatggaaattttgaaaagcctcatttggctggcaaaaaaaaaaaaaatcatttttaacgattaattttcaaatgtaaaaatcaaaaaaaaaaataatcaatgcttgatcagatttaatttttttttccacaaaaaaccccacaaatgccttagataatcgcaaaaaaccactaaaaaacctcaaaatcttctcatttttgaaaattgcgctttatcggtcttcaaaaaaccaaaaaatgggactaaagcctcacttccgttagctccgtgaataagcagctcattcgatttctaaaaattaaataaaattaaaaaaaaacgattttttaattataaccttttctccttttttcacttctataaatttatattttttacaataatttttcatattttttactttttccaatttctctacattttgtatttctttctctcttcccatatccgcttccgctttatctgcttgcataagaaattcggaatttttgttgcataattctgatgacgcgtattttcctgattcagcatatggcgaatatagcggtgccggtgccatatgcccaatctgttgacttggcctcggtgctcttccggaccnntgcag

SEQ ID NO: 12349 - DNA, 2929 bp, Heterodera glycines
  unsure (1)..(2929): unsure at all n locations
agatcggctganccatgtgtgggatgcgtatttccatgcggtcaccgcccgtttcccgcgctgtcgctaccgtgtcgggtgggacgcaattttactgtacataccgtactcgttcctacccaccggactggctgactttgtgttccacacgctaacccaacagctcagtgagcatgttttgccagccgtgttggagaagaagcagcaaccaaaacagcaacaaaatgcagagcaacagaagaaaaaagtgatttgaagcagaaaaattatcaaaaaaatttgcatttgatttaaaaaaaaattgtgaaattattttttcaggaaaacaataattttttgtatgaaaatttgaaatgccattctttaagtggcgctttttcagttttgtttgaattttttaaaggatttatgagaaaatacggcagatgtaaaaaaaatatatatacaatagacggagaaaatataataaaacttagaaaaaaaattgagaaaatatttttaaagcagaaaaaacattactcatccctatttaagaaaatttgaaaatttagactttataaaagtgaaattggttaagaaaatggcgtcaaatcaaaaaaggagtaaatatgctgcaataaatttgatgttcgaattcgggattgggaattcgccaaaaataatgccgggttcgtattcagcgcctaaaaatgctagaaacatgttaatggaattttcaaaaaagtcctatttttgaaatattaaggtttattaaatatatataataattttttaaattcttagtagttttttaataattatttatttgtttattagtattaggttagcttattatttccttcagattaaatttttgcataacatatgatttccggccccgttaaattacaacgttgacacggctcataaaacaaatttaaatataataaaataaaaattttctctccaaaattctcatttcttttaaattaaatattaaaaaaataaatatttatctcaaataaataagatatccctcccaaaaaatgaagaatttgatgaaatttgttcttttgataatgtttattttgaatgtttccgctgatgaaacaggcaattttaaatcttttcgtacaataaaaatttatgtaaaatttatataaatttagaggaccaaaaaacgcaagccctaaaagctccaaaatcgaatgaagctggtttgtttggcaatggcagcttttcttttctgaacaaccttaatccttttaggaattttaaaaacgtacaaaaacaaattaatagcatttttacccgtatctttccccgcccatgaaaaaaaattattattttttttatttcttgatttcttagaaccagcaaacaatggcactggtaatagtgctttcggcataattgggagagctataaccagacttactgccatttcgtccatgattcatggtgtcggagctacagccggaaatgccgtcaattccgatgtgccaaaacttcgctcataccccggggtgtggaagccagcagaccgagacttcaatttggcaaatttgaagcgctttaagccacattattaaaccaggacacatgtatttgctaaaagccctaatgatcggagtcggagtggaacaaaatttgcttttccatcagcatcatcaccatcaaaatcggacaaagaaaatggtggacaaggaccagctgaatagcggattgttttaaaagccaaaaactgctgaataaaagaagccatgaattttataatgagaggaagaagaactgagatgaatttagtatatatataaaattcttaactcctattgtagattttttcagtatttctttagtttcggtcgttatatataaatactttaaatatttcgtgccgcatttataatttattcgagaagaagatttgaattttgaaaacccggaccatgatttccgaggtggaccaggagaggtttcggcaaaaaatcatgttttaacaggacaattcccaaggctgcacgtaactagatcttcaattacggaaattcgtaatcccataattgcagtgatttttttttttgaattatggaaatcatcctaataatgaggggccccattatttatcttaagaaaatttaattcaaattttacaaattttttcataagctcatgtcggcaccgctgactcgttcttcctattttattattattataatataaaaataaatattacttataaatttaatattttttttgcaaattctacattgatttttttgaaaaattcatcaatggctttgtttgtcatcatgtgtataagtttattcaattctattcttatgatatattaaaaaaaaaatttgcagctaaatctattgcgaatatttaattacctattctgctaaaacaaaatcataggcaatgtaataattttaaagaaaattttttatatgtgggatggaaggagtttttgctaaatttaaatttaaaataataatgataatggtaaagaattaaataggagtggggtgaaaaaatttataatttaattaaaaatgtttctttcatttatcaaaatacttttttattaaaactgagagaatttttaacaaaacatcatgctgatatttttgattgtcatcagcgctgtcctcattaattcagcattgggaaacggtaattaattaattataaaaattaatatcgaaaattaccgatgattaatcagcaattaaacttcattttttaataaaatatatacatattcatttcagtagatcaccctaaaacggctgtggataaatcaactaatgaaggtatagtaactattttttaaatatgcacgacgctggggttcttttggtgtgtgccgttttatgcggaatttttcttacaaaaaaaaaaccaaatcacatatttgtggcatttcgattgctttaaatgcggg

SEQ ID NO: 12350 - DNA, 1961 bp, Heterodera glycines
  unsure (1)..(1961): unsure at all n locations
ttcaaaatatgagaaacgataggaaattaatttttttgaccataattttagggtgccaggttttgaagttttaaccataaatttttcgaaacttaataaaaaaacaatttttttttttgaaatttgcattcttttttacctctgctactggtaagatatattttcataaattcataaaaaaatcatcaaaattttgttctatggatcagccccaaccgatgaaaacaatgaccagcagcaagacaatgccattggtagcggaaaacttatgaaaggcatggtttggcttcttgcggcttcatcggggttcaacggtgccaatgccgtgggcgacaacggtgtagtacaagttaatccgaccattccaccggcgaacgcacctctcccaccaaaacatttcgtcaatttgcgtgacttaaaacctcatacacaactggtgccaaatgtaccacgaaaatttggcaaaaatgccaacaatgggaaggtcagttcttgggttaaatatggaaatttaaaaataataattgggctaatttttcaaattttagaagaacggtggtcaatgatcgcatggatagaaacgaatatatatccgatatcgcccagcccaatacttgcattatggcatatgaaaggaccgaacctatagataggagtttgaattattttctattcatttttttcatatttggttgcgaaaattgtttttgtaaaattcattttcctttttccattatggataaattttttcggtaaaaatatatttttgtgattcttgaataagttattcgtttaatccttcaaaaaattatatataaaatttacggtaattaatgtatgccgtgaaagacttttacccggcgctcgaataatctaacgttgtcccgttgattggaatactatttgttacaccgttaattagtaaaaaaaattctcaatttaatgaatcaaattgtttcgataaaaataaaagttttcaatcccattttgtttagagcatcataacttttttttttgttgaccaaattcaacaaagttggtataattcgaaaactcttagcaagctctagtaggtttccaaaaatcacaaaaatataccgacatgaaaaaagttacaaataaaatatgcaaaattctgtctttttttgcggtattcgtgtagcagctttttataaatttttaagcgcttagtaaaaacatatcaatagcttctagacatattgagctttcaagaaatgtcaaatatataaaatttggtccatcaagaaaaaagttatgatgctttaaacttggctcagtcagtcgtgcttaggctttgttagaccaaacctttcgacgttgaagttagagatcgttgacataaaaccattctttctagaaaagcctgtccataaaaaagggtctgctgtaggactaattttctatgaaaatattttaattaattaaattttacacataaatgcaattaattattatttggcggatgtaaaaatctcgaaaaatatttttccctaaaattataatgtttatgttaaacatttttacggaaatacatatcacatcaattccatgtcaatttcatgtgtcatttttttaagatttctttttcataaaaataataatattcctttaattgcttgctaatgaatattcattactctcaatatttaattaaaaaaaaaaatcattattggcaaatacttattgccatattttcattgaaggtaaaaaaaaatattattttaatggtggcaaaattatttttgttggcaaatgaatattaaaaaaatgttttcatttaaggcaaaaaagaaatttttttaatggtggcaaatcataagatgccacccatttagccctngcgatgtaaaagaaattcattcattctattgatcacagtttttattaaaatgtgcttcagtttgtagctttcagaaatccatctttttattaaatttttc

SEQ ID NO: 12351 - DNA, 1754 bp, Heterodera glycines
gtttttaatttttataatttttgcgttaattttctccattgactcttcttattttagcttagcctcactaataaaaaatgctgtttttaattttaatttcaagaaaaaaccctggaaaagagtgacgtaatcattttccgcggcccgaaaatgtgccaaaaacggacattttaggggaaatgccaaaaaaatttatatttattttggtatttaaatgagctttttctaattgatggttttatgctgctgattctgacattgttgccttttcttataccaccaaccaataatggcatttttcgagagcattaaattaaaatttcaaagaaatagattccaacaatttatttgttagggcctaaaaagtaaattcaaaaattcatcgatattcggcaatatataagttttggacattaatagttatgatcccaacaatttatggttcatacattttcggcaatatgatttaggcattatgtttaaaaaaatttttttaatttttgtaaatctaattattttcatttaccgaattatttttatttaaaattattattttttgcggttcttttttaattattaatgaaattactctctcacgtatccctccggcgctttgttattttggcttaattagcggcaaatgtgtgtgcacatttgtgcctaattgccatattaagtaaccattcagacataatatgattaaaaaaatagcatcgccccattttctactttaatggcattttttgccaatttgtgccaaaaaacatctgcccaaccaacaaaatacttttttactggcacatgaattaattggcccaaatgccttcatttcgccaatcatattttgcctctttttggcacttaattatccccaacggagttaaatctggcttcaactaaaaagaagcattattataaaataagagataactatattcgcttttaagcccagcaaaccaaaaggcattactaaaaagaggatttgtgagagccgctttaatctgcgcctcgagaatctcgagtttcagctcaatgccggattttcataggatcaaaaccctaaagcctgcattttcttttttgaccgaattttttttttgccggattaacggtattaatgcccgccgattcttttctggcaataattttgaatgcctttttccagccattcgaatacgcaaatttaatttttcattttctctaaattaacaaaatgcatctcattcatcaatgactctccttgactctctattttttatttgttcatttttctcccattttggcattttccgttgcctccatttttggcattgccgtgccaaatgccttggccattttaattatctcgtgcccttttatgtgtgtatttttcccctaatttagtggccaattctgttgcggagttggccactgttccgctctgatgcgctcatttcgcgcactgttccacggcaccggtggtgacggcacggcacaaaattcggagacggcgacgcaaaaagtgcggcggtggcaaaaaatggtggtacaaaaatggccaatgggcaaacaaatggtgggacagcaatttaatgatgtttgaaacaattaaagaaacctttaatgattacacattactggacctggatccaggaaacatccagactcctcgagacctggatccaggaaacatccagactcctcgagacctggatcccaggaacatccagactcctcgagacctggatccaggaaacatccagactcctcgagac

SEQ ID NO: 12352 - DNA, 2386 bp, Heterodera glycines
taaattagggttggtcgggaccgggaattttgggcaaaaccgggaccggaacttttcgggttgaaaaactgggactttttggctgggaaaaccgggaaaaaacgagaatttcccggtcccggtcaaaactggtcaaaaccgggacttcggtactcagttgtgcatgttttgatcccagtcccgacctaccctactttaaataataaattcgaaaattttgtccaggaaatccaggtttttttgtgttttgcctggacctggatttttttttcacattttacctggggctggatttcctggacaaaaatccaggaaaatccatgttgacaaaaaatgacctggacctggaactggatccaggaatccaggaaaaattcaggcctggacccaggaaaaatccaggcttggacccaggtccaggtcgagctctacacattactaaaattagagaaggctttaatttaggtttcaaaaaaattaaaataaattagtcaaaaaggtgggctttaaagaactgaatcttttaggcttttatgagtaaacgtaaattatcgcttgagatattttttaataaaattatttaattttgaataaatttttttttaaattttttttaataattatttattttaattttaagacgagaagtcaccaccaccaacaacacagcagcagcagcaaaaaccgagcgaaatttcgaaaataaatgtaagtaaaatatattttaaacatttaaaaaagaaaattattattattttttattttaaattaaaacattttttcctcaatgaatttaaatccatcggctacccattaaactcattgaattttgaatttttccattaaatttcacaaaaattttccaatttttaggccccttcggtggacgacagtttggacggatggaatgaagaacaaatagtcggctgggagcccgacgactacgaaaaggagttggtgaagcgcacatggagcgacgacttcgactttttgtacgaattgggcgcttcgatttacgacgtaaggccaagttttattttaaaaattttgaaattggtaaaaaataaacaaattattgtttttaatgttatcaaatttaaaaatttgacttaaatttttcgtcttttttaatttaatattgaattaaattaatttaaaaaattatttaataaatatattaaattttttatataaattataatttttcagtatatttttgagcacaatcctcaagcaaagcaattattccccaaaattcatcggcatggcgacgagtggcgccaatcggccgactttcgctcccaggccctcaaatttgtccaggcaataattaattaatttaatttaattaattaaaactaaaatttatttaggctaaagaaaaaagaaggaaaccatttggaatatcagctgaaaaaatagaatatttcgaaaataaaaatttaaaacttttcaatttttctcataaataaatgaatttaaaaattaattaaaacatttgtttgtatatttttttggcttttccctacattaaaattcacttgctattaaatgataaattaattattaattagtattatatccaattaaccttttaattgggtgtccgccttcccatcagcagacaatcgcttatgctgctaaaaatctctaccacatggaggagtgtttgaagccgtctctgctcgccatcggtgaacggcacgtgcagtacgcggcacgcggctttcggcccgaacattggaacatatttttggcgagaatttcaacaaaaattatattggatgggtgtgcgtgcattatgcccccgccccttagtgctactcgagagtctcgatcgagtctcgactcgagaaaagtcttgggttttttcggtctcgagtctcgatctcggatttttcacattattagcttttgctaaaaaatttaatatatttaagaaattgttttttctctaatttttcaaaacaattttttttcaatggaaaattcaaaataataatatgattgatcgccatttggtcgggatcccgactcgggattggtctggatcctgactcgggatccgttccgatcgtttttccaaaataatcgggatttggtcgggatttggtctggaccctgactcgggatccgttccgatcgtttttccaaaataatcgggatttggtcgggatttggtctggaccctgactcgggatccgttccgatcatttttccaaaatcatcgggattgatcggcacttggtctggatcccgactcgggatacaatccgagggtctttccaaaatcatcgggatttggtagggatttggtctggaccctgactagggatccgttcctgtgggatccaaaatcatcgggattgatcaccatttggtctgg

SEQ ID NO: 12353 - DNA, 1219 bp, Heterodera glycines
attatcgcaacgcaatcgcttgggttggccatcttttctcgtagagtgcaaccatttggacaatgcttgaccagtagaaattgttgcatttggcacatcaaaatcatcaccaatcgcctcgggcaacaaatcaaatgaatggattgaaaccaattggttgagatcgatgagaattgtcggcgaaatttgacgaagcaaatggtccaaatgatcaccattgtaaaagcccaagtggcgaatgtttgtcgaaaaaaagtgccaaatttcacgggtaaaaatgtcccaaatccgctggccattcgtggtatgtgaagaaggaagccacaattttaaattggtgcctcttttgttgaaaatttggtgatttgaacgaagaaaagcgatgacggagtgaccgatgtacctaaaaatgggatgaatgcttttattgcgatagctctgatttttaattaccacatccgaaggcgcttaaaacggattttgctgggcaacggacggtccggcaatggaaatggcacaaatttgtcatccatttgtacagacagcttcggttctggtcctttgcccttctgaatttcgatcgttctccaaattgtcaattcgcttttgccattgaaatgtttgtccaccaacgcattgaaacgtggcgaaagaagtgccaatttgaggccgagttgagcacggtcaaaagaggggaaaatgtccatccaaacgtcgttgcaaatccaactgaaattatggaaaacagtttagttaaataaatgatgaatttgtgtgactattaaaattcttttaccgtcggttcatttttgtggcaattagcacaatttggccgagtccgaatgatgtcgtcgtcacagagggaagaataattgcagaattattgcgttagaaatttttttttttttcaaatgcgaggaaaagcgaaaaaacaaacatttttatagtcatgaaaaggaattgatgaagtttttgtatctttttgttggtaatctttcggaattggtgttccgcccgaaaaaataaataaataaaaatttcttacaaaatcactttttctatggtaaaaaatagagtgccacgggaccgggacctggtagcgcacaactgagtaccaaggtcccggttttgggggccaggacattttcgcgtggcccgttttcgcgtggggtacgttttcgcgtgagtgcctattaggactgaaattggtcggatgtgt

SEQ ID NO: 12354 - DNA, 2897 bp, Heterodera glycines
gccggtagcggagacaatggccttaattaagcgaaatttgaattatttaaacaaaattaaatgcctttttttaatttctcacccaatgcaatcagtgccagcaaaaagccaaatgggcacattgttacaattgttgtcccaattttcatctttgccaaaatcggacttattaagttgctggcttattgtgacaagtacatacggccgtttttatacatccgatttatttaccgaaattgaggtttttgttcataaaatacattttgatcactgatgaattatgatcggtcggtcattcgtaattaattcatttcttctgcggccaatcactgtttttgttggtttgtccgtcactcatttgtcagcagaagacggcccttttgtgatgctttgtcccgcttcgtcttcttcaacttctgccggtggcggagacaatggcctaaattaagcgcaaatctcaaatttggataaaaatcaaatccctttttttaattgctcacccaatgcaaacataattaacacacaacatgaggaggatttgaacctgtgaccccccattttttgactaactcacagaccactaagacgaaaaaaccaacttaattgtacttggagcgcaaaatttactcgccgtgtataaaaacaaatcccctttttattgctcacccaatgcaattagtggtactgaaaagccaaaataacacattgttccaatcgccctctttgtgctgctgaaccgccgcggtcttattcccaattttgcatcgtttcattatccatcggttgtccaattcattttccattgctttggccaatgtcagcttttcctttgtcgattcgttcaccaattcaaatggcaccatttgtattgacggcacatgaacatgaaaatgaatttcgtaactgacggaagaaatggcattggcacggagaaaatgctagacaatttggaaactaaaaatcacaaaaatgttaggccacacctccttgaaattgttgatccaatctaagtccgtttgttcgttgtaaccatcgcaacgcaatcgcttgggttggccatcttttctcggagagtgcaaccatttggacaatgcttggccagcagaaattgttgaaaacatcccaaattggctgctcttccgtggtgtgtggtgatggaatccgcaagtgtaaataggtgcctcttttgtcgaaaatttggtgattggaacgaagaaaagcgatgacggagtgatcgatgtacctgaaaatggaatgaatgcttttattgccataaaactgttttttaagtactcaatccgaaggtaattaaaacggattttgctgggcaacggacggtccggcaatagaaatggcacaaatttgtcatcgattcgtacagacagcttcggttctggtcctttgtccttgcgacgaatttcgattggtctccaaattgtcaattcgcttttgccatcgaaatgtttgtccaccaacgcatcgaaacgtggcgaaagaagtgccaatttgaggccgagttgaggacggtcaaaagaggggaaaatgtccatccaaacgtcgttgcaaatccaactgaaattatagaaaacagttttttgttagctaaataaatgatgaatttgtgtgactattaaaattcttttaccgtcggttcattttttggcaattaacacaattttggccgagctccgaatgatgtcgtcgtcacagagggaagaataattgcagaattattgcgttagaaaatttattttttttcaaatgcgaggaaaagcgaaaaaacaaacatttttatagtcatgaaaaggaattgatgaagtttttgtatctttttgttggtaatctttcggaattggtgttccgcccgaaaaaataaataaataaaaatttcttacaaaatcactttttctatggtaaaaaatagagtgccacgggaccgggacctggtagcgcacaactgagtaccaaggtcccggttttgggggccaggacgttttcgcgtggggtacgttttcgcgtgagtgcctgtttacgactgaaattggtcggatgtgtgccgaacatacattcgacctatttcgaatcccaaacccgatttcaaacaattttttgcttttatttttcgtcaaggacttgattttttcaaaattttggctaaaattgttgtgccatggcatttattgtgttgcgtcacattttatcatcagcaattttatcaacgattaatcacaattaatgagttatgtaattacatataaataaaatacaaaggaaatggacgaatttgcggtgagcaagcaaaggtcaaacacatccaaacaataacataccgtatatgctctaattatagcccatgggggattatttttcaacctcctcagaaaaggggggataattagagaatgggggattaatagagactgggctataattagagcatatacggtaattaagtaataacaataacacaatgtaacatcacatcattttcggtcacataatcgcatcaatcaatcaatcgattaattaattgattaattaattcatgcatctttcttctgctgatcactcggcccgggagaagcggcgtcgagaagactgaaaaacgatgattcaattgcaattataactcatcattggcattttatgagagtttatgagtccaatcaattctaactttccttgattttttgtactttaccataattctgtccatttcaaaacaaaaccgtacatttttggatacgaattgaaagcacaaagtctaagcaattgttgacgattggactcataaaatcattaagcatttaaaattgttcacccatcgtcgcatccgccgtcactgatcagaatgtcaattgggttctgtcgagcttggaattcgttcaacacattat

SEQ ID NO: 12355 - DNA, 2425 bp, Heterodera glycines
  unsure (1)..(2425): unsure at all n locations
agagatcaacctttgaaaaaagcctggacctggattgcatgttggacctggatttcctggataaaaaatccaggaaacnnccagtttcctgaaaaatccaggctcctctggacctggatccaggcctggctggacctgtattttttgaaatttgttttaaaagcaaaacaatgtttgaaaaaatgaactaatttcttaggaacctccaaaaatttataattttaaaagaaaatgtgtttttatatctaaataatcattttttgaaaacttgaaaaaacatcgatcacttgaaataataaattctaaaattttgttcaggaaatccaagtttttcatatttggtcattattttcatatttgacctggacctggattcctggacaaaatccaggaaaacacaggtccaacaaaatccaggttgcctaaaaaatagcctggacctggagttggatccaggaaaaatccgggcctatatacaggtccaagtcgatctctagaaaatactcttacgcccacagtttgtgctaaagcggactttcacaaataaaattagtaaaaatgacctttctatggattttgccaaaaaaggtgtagcccgagccgaagagcattccttcgaagaaaataattgcaaaaacgaacaaaatgtgcggaacaaaactgaacagagcctggccaaagaaaattgccaaatttgctaactaaaataaatttaatttaaaaattttagatgtaaaaataccataagaataggaagtgagtacaaaatgagcgatggcatttcgacaaaaatggcacttagccgagcaaggaaaagaccgatcacatggaaagtttggagccaacggaattggctggccaacgacaagccaaaactgcgagcacaatcgaatttgacgtgttgcagctgacaaaatggattttgagaaaataaaaatttattttaattggtaaaataaaaattcattttgtcaaaaatacagagtgacaaattaagtaatgtcccacttttaacattcttaaatctcgaaaggtatacattatctcgagtagtccttttgttttccttgtaatttaggaatttcgaattttgtttgaattcgggttcgggattcgtaattttgaaaaataaatgtcatattcgtgatcagcgccccaaattaccctataaatgactttatttgaaaatttcagggggggggggtcacaaaaccaaaaaatgtttattttcattaagcatttctccggaaaattgccaaaatttgatccgtgagttcagtgccatctgcaaaatttttgttggcacatttatgtctccatctcaggaccccctaatgattaattgttaccctgtaaaaaaatatttaataattataaaaaaagtatttggatgcttcaccaatcctgagttgattagaaagtccaaaacatagacactgctaattgggagcatgtagcgaagaagcggctgaaccaattaaatgttaatttgttttcttattttaaaatcggtttgtttcttaagaccaattgggatcataaaatagttagtcattgtaattattgccttaatcaatttgagcttttgcaaaaatgtgaattcgtgcgttcctccgccggtggtgccgttttttgagtccgaaatggcattttccgttatataaacttggccagaacaatttggccgtcggattgccggcacaatccatgatgatggccgcaagagttgtgctttatgcatccgcggagaatggaccaaaacgaaccaatatcttaataagaaaagcataaaaatcatttaaaatttaataaataaattataaaaaggtaaaaaatatatcattaagtcattagctcatgaatacttatgattaaagtcataagtaaacttacgtcaaaaaataaacagttggcacaattagcattgtcaaaatggcattttggggagacattcccagcagttttggctcagtcagtgcggcgtaagcggtagcgctgacaattccggacccgccagtgccaaaacaccacgccgaaactgttgatctaaaacattgcttaaatttaaaatttttggcttatattttgaatgattttttgtggattattccggttgcctgtcataaaatgaagaaagtgccaaaaaacaaatttcgccaaatcccgcggcggcagagccaaacgcaacgccaacaagtgccattgacattgttgtggaaaagccgatcagtagaaaagaaatggcttgaagtgagcacgccaaaaaatggcgaaagctttataaaaaaaaatcaaaaatataaatataaaattgttttanaaataaaatttattttgtttagaaattatttgaaataaaatatttgaaataattattattttttacctanatggaatccgattcatanagaatganacagtgaat

SEQ ID NO: 12356 - DNA, 1767 bp, Heterodera glycines
agcaatcaataattaaaatcggaattatgccattcaatttgtttttacttacaatgcaatacgaatttgatgagtttgtgctgccattttggtaatttatgccattattttgcatttttattatgtcctccgatgcactgatcatcagagggatgggcaaattgttggccaaaccgagcacaaaaaaagcaaaggcatttcgccacagcgaagcggcggcacccttttgctcatcggcaccattcaacatttgaaaaaataaaacgggaaaatattaaaaattgtaagccactgtgtttacgttccaggctgtaagattttttttcttacagtccatactctaatcattagtagtgtaatactcgagagcatcggtctcgactcaagaaaagtctcggggttttttggggtttttggcttacggtctctgcctcgagtctttgtgggtccaatctcggtctcgtatcgaggaaactacggtttttggcatttcttggggtctttggctctcggtcttggcctcgacattggggtaaattctcgagtttagggaaaatttctggccatcactaataattaggtcgcgtgatacctatgctaataaacacaaaaactttttaatgggaataattattgtccagcaaaataaacacaagtaattaactaactaatgaactgataacaaaattctcatagaagaaacattctctttttgtattattaaataaaatatttaaaaattaatttaattattattttctttttaagtaatatttttagaacctacaccatttattatgttatatacataaaaaacacatatttttaattacccaattctgattccttttgaattttaattactccaaccataattgcgtcactttttcttctttaatcactttttttcttcagtattttatgcattatcccaccacagagaagggtcattagcaacaaaacccttcaaaatgcggcaattgagaagaagccatcatgaaaagcatgtggtatcgtcgccaatttcaacttaccgccattttcaccaaaatgaaattattcattttgttgttttcttcaggttttggtgagagaaattaatttttattatctaaattacaaatttggctttttaacacaattaaaaagtgatgtcaattagtcaaaaaagggaatttacataaaaagcgaacttttgtaagaaaagaaattaaatggcgtcaactgtttgtggggcgacagcttctgaagaaggctctgatttttctcagaggtataaaatgcctaaattcaatattttttgctaagtaaaaaattaataattttggaatttgcatttttaataatactaaatagggcttcctttttaggcacaaaaaatcgcgaaataggcacctaaaaagcataaaaatccacaaataggcacaaaaataggcaaaaacaattttttattaacgctttttaggtagtaaaacactaaaaaaattaaatatttcaattgtaaatgaaattattaaataatttaaggttttttccaaattaggacaaattttaaaccaaaaatttttattaagaaaaaaattttaaactttgggatcaattttttgaaaattttcttcaatttttacgggtgtatttttgaaattttttttttttgggtcatttcttaggggtgtgtttttcatttttattgcatttttgttaaggattttttcaaaaatcttcaaataggcaacattaggcacaaaaacccagaataggcaaaaa

SEQ ID NO: 12357 - DNA, 3273 bp, Heterodera glycines
  unsure (1)..(3273): unsure at all n locations
tttcaaaaaaaacatatctccaaaccntcggaatacaaacaaatgttctccaaacctcggaatccagtcttctgccgttccgtgcggttccgactcgcccccatcgttctccatggcattttcgtcgcccttcgtcgtttgatctttgacaatgcattcgtccaatttgctgttgtcctcctctttggcgtcatttgccatgacaatttttgtcaaaaaaaattggtggccaagaaaaaataggtaatagatttgtatgatactgaaaattcagttaaattaatgcaaataaaggtttcaatgtaccaggaagtgggtttgtttcacatcatttgcaagacaattcatctttttagttttacatttgtagttttttcactgtgtgggttttttcttattgtcagtttttgctcttgttctataatttttgagactaagcttttgaatggaaccaagaaactcatatttgaatgagggattttgtaaaaaaaatgatgtgaaatattggaatgtgggtcgttttggcggagccggcattccgacactagccgagttttaggacaacttttttaattgccgaccaaacccaacaagcatagtatcaatcgcaacaagcttaccatgtttggaagctattgcttcgtgattaaacaattacaaaaaagtcatacaatgagaattcaaaatagtcgaaatctttcttataacttttttgcatgcttaaaatagttacttgggttttttgtaagactactagaggcatgtgaagaggctttcagaatgataccaagattgttggatttggtttacaatgaaaaaagttaaaatagcacaaaagtttggccgaaacaatccattcctggaataactattttgtgaacacgagcagggaagaaatgtgatagagaagaatgaccaatttacatttttaaatgcccttatatatgctgctgcgtggaaaattgaagaatgtgtgtatctcatcaaattcaacaaatttttttttgcttttttatgaattttcgtgacttttttcactttttaatgcaaaatttgaatttaagcaaaagaaacgctgaccaacgaaatgtccaagcctcgaaatgtccataagagtaaaaaacacgaaatgtccaaaagtctaaaaagcacataaaaacccggaaaacggatctaatttagggtttttggagtcgctgagtacgaatttgacatttacctaacccatttcctaacccaggacccaaatataaatataaaaaatgaatgaatttattaaacattcaataactgacgctgtgtcaagcctatgtatgttcgagagaagtaaaggaaaaactcatgcattcctgcaggagctgacgccaaaataattgagaaagccattctgacaatgctgggaggcaaaagaggcaaagcaagaacacttctgaaaaggaatttgaatttcaccaaaattttaaccggaatgtgttgcgaacttcctccccacgttctgtcttctcaccgtacaaatggacaagaccaagtcgtttgaagttcctgtaaaggctttgcctgtagtggaacatgcagcacttaatctgtgccgtgggaaatgccgtacggaccgaagtaatttcggccttttcaaagtcacacaaaactaaaaatcacatttttgatttgttttttttgtaaatttcaaagggttgacctttgcttgggacctccggagagatgcgttcacggagaaagttcagtgcttcttcgtagtagcgtcgctgtttcccaggcagaagacaccacatacagatgcacattttctgattcactgacgcaccaatgacgaagcactgctcccacatcgctggagcgcatttgaaagttccgtcgaggtgccacgtgccacattggcgcaaaatgtccagtctaaaggaataccaataacaaacagaattttatagccaaaaaatgtaccttaacactgccgaaaataaggacaacgtccttttcgccttgcctgacatttagactgtcatacaagacgatgtcctcaccgcccttttcgcgtaacgttgctgggatgacaaaggccagtgggttctgcacgtcgacgtttcccagcaactttctcttctcacgccgcatcatttgggtcaacgcattgtttgaactcatggccacaaatgcttcatctgttgctgatcgcctcacttttgccaaaagtcgcgtgggcttcagacacggctcggccaggacactttctttgattttctgtcgccttgattccgcctttaacacagcattaattatttggttttaaatttaaacaaacttgttgtttctgaggcgctgggaggtggttgtgttctttttgacccaaggttccagtagctccaatttcgtcattgtttgtgatgtttgcatatgctgagcaactacgaattgtgcatctccaacggtcccctgagtggtgtgtgtaacgaaatcctgaacatttggagtctatttttttgcgtcgcttcaaacgtaccattcaaccataggcaatgtcccccaaaatttgtttttccgcgctcaaaggtcattactgagacttcagcttcgttcaaagtctgttgttcaacgttgtcgaaagttatcacggcattcggttcgccaaattccactcccaaattcacggcatcctcatttgtgtttgaaatgtctgaaatataacgcttcttccgacttttttgttgactttcaagcttattacgaatcatttggtccaaatgaatagaaaaatctaaagtcgtcagtacagcacacatttaaaataattcttgaacttatttcatgttcgggtggatcaagggatagacaaggggcaatgtaaatgtcatattcgtactcagcgactccaaaaaccctaaattagatccgttttccgggtttttatgtactttttagacttttggacatttcgtgttttttacccttatggacatttcgaggcttgaacatttcgtggcttggacatttcgaggcttggacatttcgaggcttggacatttcgaggcttggacactttgtaggggcgccattttgtcacactaaaatactgaaaattcgggtcggggtcggttcgccgcggggttttttcgccgcggccagttcgccgcccgtagaaaaatgtccttttcgccgccataattaaaaaaacccaaaaaatttttgcaattatgttaaaaaagcgctaaatactggtacgactactgaattcgtttggatttttcttattgctgatta

SEQ ID NO: 12358 - DNA, 3111 bp, Heterodera glycines
  unsure (1)..(3111): unsure at all n locations
tttaattgatacatattttatcatttttaaagaaaatccgtacaaatgggtcggggttagttcggcacggccagttcggcgcgcgtttttcggcgattgcgaaaacttaacatatatcatgaacattgtgcatgctcttatggctcccagtagccgctcaaataacggcgcaaattggctattaaaatttttctttttttcctcgaaattaaaaaaaaaatttggaaaattacatttttttcgggggaagagagacgacatgggggagtgtagcgtactctaatttgagcccctcaaatgcgttgttcagcaccacaaattgtaattcgtgaaggcgaatcaccttaaaattaggaaattgttgaaaaagagttgggcggggaaagccggggaatgccgaaatcaaagagtcgggaatttttatcagactaataaaccggcatgaccaaggggcgaacataatctctcccgagaaaaaaaaaattaaaactttattgaaaaattattattcgtttcaattcaaaatttttcattaaaaaatcaatttaaaatattttagcgaaaaaataattgatgcagataatattttcttagattattagaaattttggaataaattccaaataaattaaaataaaaaattcaattgccagcagaatttaaattgtttgaaaattatatattaaaatttaattatcttacttttttcctctcatttccatcgtcctccttccgcttggcatacagcttcattttgaagcacatgaacatggtgttcatcatggatttgtgaatagtgttgctgtttttcttcgtggactgcttgcccttctcggattgaccgctgatcactccgtcgattacataagccgcatatttgtctaacacttcatccatttttgcgggctcatcatgctcagggttcagattctttaaaatgaatttgtcgtccttggttctgaaaaacacacctccgctgcctccgcgctctttcaacggcacaagctcggacagtgacacctgttcgaaacaattttcaaaaaagcttgcactaaggataattttcaataagggtgggtccggagtcgccaaaaattcaaagtcctaaatccagaattccggcttcccgaatccgatattccaaccctaacaagacatccgccggagaaaatttaagaatttatgttagattgtagttaattagcggtttttgaccaaacacaataatcaatttttcaatttaaaacaacaatttctaaaatataaaatggggatttttttaaataaaaaaaaacccgaacccattccccgaatccctggcttttcccataccagcaattgctcgtcactgatcccatttttgactctgatacgtccaaaaattttctccgccctaactttaaattcatttgaattcttttcaggcgtggtccaccacacattcttctccacgccataatccaatttctcattattttttccgtgtctttgctccccgcctttgccccgtaatttttggcacaaataattgcctaacaaagtgctaagccatgctttatttttagcatccattgtctcttctgccgctttctcttcccgcttttccttttcctcctgcttttcctccgctttcttctctttgttttccatccataaaacttcggcatttccagttttaaccttgaataactccttgaacttctgttcatggatggcacacagttcgctcatgcttctttgttcttcctcctccaccgcccttttttgtctgtcgccgatgccagcggcattggtaatgccaagcataattggaagcagcagaacggataacggtagcagttttgttgataaaattattatcattttatcagaatgagtttagagaattggaaatatattttttaaaatgtaaagaaatgaaaatgaataagcaataactgcagatgaatatgtaaattgctataattggataggcttttatatgcattaaaaaaactctactcaatttatgaagggcaccattagagaagaagaagcagagttgaaaataatgtaaaagccagagaaaggggcaaaaattgggtttttgcctcttggccatttcagttggatttggccataatcctactgatcatcctcacccaccggtcataatcctactgatcatcctctcccacttggctataattgtactgattatcttctcccatcacctatcattctaacccacactcattggtcataattctactgattgatcatcctcccatcgaccataattctaatttggacatcgatctcccgacccgaattcagacctgacaatttgctcgacccgcgcgactaaaaataccccagaaaaaactccaaatgaatgataagaaatatagttcgtcgatattttgggaatgtttgttatctggattccataattgaaatacaagtacattgaaaaaatacaagttgctgaaaaataacacctgtatctatacacctcgggagtccagcaggaaaagcctggacccagttagaacctaatctttaataagaaatttactaaaaaaaataacaaaaaccttgcttataaaaccgcattttttgactaaatcctttaataaattcattcaacttttaaaaatattctcgcattcggcaccgccggaacaaatactgaaattcttttgtttttgcatcataatgtcaaaatcaaaatttcaaattaggaaattcagttttgggtcacattaatcgctcgctaactatgtataagtaatctaatttaattatttttacagtttcgaataattagcaaaagaaaatttaaatgaaaactcaacaaataaaaatgaacattcaaaaatttatcccaattatcgcgtttttaatggattttttcggaaaaaatcggtcaagaggcttaatgaccacatttgctccacatttctgtcaatcgaacattgatcaatcagccatacccaaaatttcgctgagatcaatttctttccacaattaaaagtaaataaaattagcaaattagcatctaaaatagaaattaacaaattaatcattttattanatttaaatttattgaagattatttttcctaaaatc

SEQ ID NO: 12359 - DNA, 1909 bp, Heterodera glycines
aataattgtttttgctcgtaaagtttttgcgtcacatttattttcgccgatgttctgtttttagtttttgtattgtacacaacaatccgcccaacagaattagtaatgacagtttaatgggtttttgttcgtcaatcacagtcacagtcacatccttgacattatttcaccatttttggtttttaatcggttcagaattaattattattactaatgccatgggtgtgaggaaagcaatgccaaaacagcatataaaaggggcacaaattggagcaacaaatcattcattaattccgctcaaaagtgccgtcgatttcctcccaataaaaagcatcaaattctcgaagaagaaatgaagccatcattcaacttcaaacttttcgcatccgtctttcttgtgctttgtgtggtaagcttggaattagtaaaaattttctaggtttttttttcgtttaggcctcacttgtcctctgtcagcataagccagcagcagtaagacggggaatggacgaggcgggggctgaacccgggggagagaaaatcagcaaactaagcattaaccaacaagaaaattttttattggatatatttatagcataaaaataggttgttttttgtatgggcctattaagaagggtttcctcctccccgacccagttcggagaattacgaatttagtctttcattaacatatgcatcagatgctagttagtgtctttaaatgagtttctgattttgttttacaaaaatttctattttcttttttatgaagatttcctcccaggcaaagagatcctcgacattttttaaaatttcttccatccgcgacaattaatttttgtcgggaaattttctcaccgattcccgacttttctctccccgaacgtgtgggaggaaccctaccataagttcctaaaactaccaagataaaatgttccttcaaaattaggcatgtaaaccgcccaaaaacgtgggaagaggcaacttggcactcacgcgatggtggtgggacggccgtagttgtaaggtacaacaaaaagtacaaattaaatggacgagaaaagcaccggcggcttttcccgttttaatttttatttatttaagcaattcatctacaaagggcagggcggcaacacaaacaatttcccatcaaagaagctttgtgatcaagtgtgcaaggtgaagttgcgcaccagaggggcgaccatggtagagtgagtgcttctcgaaagtcacggtattgagtcattactcttgacttgagaaaaaaaactcgtcgaaaagcctcaaatctcgagaaatttgggtctcgagcagcactagcgccagggacgtacccataccaatgggggaggggggagggtaacccaggggctaattgaaattttgtaataatctcacaaattcttcattttcccggcggggtttattacagtgttttcctcacctatccattggtttttcctaaaaatcttaatttatatttctgtcgaaccttcctccgtccctaaaagttttggatgccctgtcaaaatgcgaatgattttttaactttagccctaaatgaatgaatgatgaatgagatgagtcggacggagaaagaatgtgctgcaacccaagaagagaattcaaagaaaaaaggagatggaaatgattgaaatttgtcaaaaaataaataaattcatagcggtagaaaatttttgataaataaatcatttttaaaaattcaaatttactttgaattaagtaagggaccggaacttttaattaataatttaaattctttaattaaaattcttaaaaaatattttatttcaaaaattcatttcttgtttcttttttaaaattcatttttctttttaatgtctgacaaatttgagtaagttgaaaattgctgagtttccattga

SEQ ID NO: 12360 - DNA, 2804 bp, Heterodera glycines
tataaattcatcagatttaaatgatgtttggaattgtgtataattaataaaaaccttaaaagaatattttaatttatttcctattttcataataaagtacgagtcgtacagttttcattattcgctataatataattaccatttatttttcgataattagtttattaattaattaatttacctgcacctccgatataaggggctcgtccagagagaattgactttgcatgtacatggagacggaggtgttggcgaagtggtggacgctgtgattgctcatgaggtacgaggccaaccgatcggtatggccacgaacaaaatgactcgtgaaatggggaaaaaataaaaaatgaataacaaagaataaaatattaataattaaattgacagggtgcaattgaaaaataaattgtctaatttccaacaaaataaaataagatggaaaactcagaatttcaaaagaatgttagaaccattaagcgtggaaatattttcaagataaatgactcccataccggagatgtgcccaccaaagttggagccactttattaattatagaaagtagggttcctccccgacatgtttcggggaattacgaaagtcgtaaattgcacttgaaataagatggacgaatctttaaatgagtttttaagacttttttgttctggactttttctttttgtattttttagactttttatgaaaatttcctccccgacgaaggtgttgctccccgacattttttaaatttctccagccatccccgacaaattctttcggggaatttcctccccgttccccgacattttgctccccgaggctcggggaggaaccctaatagaaagacctaattgtaagttcgataaaacattttaaaataaaagttatattttagtgaaaatttaatcccctcataattttttcgaaaaagtgatcagaagtgcaccagattttgcaggataacagctgagataaagacttatttataaaaaattaatttttttcaatcccataggctttccttaaaattttttggattttcaatgttttctaatttttgaaatacttttgccccaaaagtttttcgaatagtgatcagaagcttaccaaactttgccagggaaactaaaaggaagagaattaacttattttaatccttctcatcccatatcctgaatatatttcaacgcttattggcttttagaaattttttcgaaattctaagttttcgaattattttattttttgcaaaattattaaatatgtaaaatatttaataaatatatataaaaagggattaactaagaaaattaaaacatatttttgatattaaaaaaataattgtccaattcccaacaaattaataaaaagaaaacaaaacaaaataaaacacagtttgatatcaaatatttaaatattagaaaaaatttttttgtataatcccaaaaaacaaattaataaaaaaaggaaaataattttttcgttatgaatttaaataaaattttaataatatttgaaaaagataaaatgaattaaataatttaaaaaacatttttaataaaattaaatataatattaaaatttcattatttttaccatttctctcattcgcgccggaattcggtcccgaatcggcgcatattcaaaaaattccggaattgtcacattttcggtcaacaaatttgggttgggcctcagacggtcctaaaatttaaaataaattagtatttttttattttcagtttttttctacctcaacctcagcaaaattcagctgaggcgtttcggcacggaacaaaaagttggacattgccgtgataatgtgggcacatgcgatcagaaaagtgccgaacccaatccatttggcacggtttcctgacaattttttgattttgtaaaaaaattgtaaaaaaataaagggcaactgtttcgtttccctcccgcgaaaatttttgaaaattttctaaagtaagactttttataaagtgtttctaagaaaattataagaaaaaatttttgaaaaatttgcagcgattttttttttattttacgaagaattacactaagtttttcgtcaaaaaattttcccaaaaaatcgctggaaaatttttaaaagtgagctgcccccaaaaacaaatacataattttcaaaatttaaaaattaaataaataataaatttttgattaatttctataataaaataatgaattagtacatacatgagctaatttaaatcctttttcgaatttttaaacattttctcaaataatttaccccttaccttaaaaaacagtaaaatttaaattaataaaaaaaataataattccattttccaccacctcttgagccatagtaagaaacaaaaaccacagtgagcacataggaaatgtcatctgaaaaattggaaatttaattttaaaaaatttaaaaaaaaaattttgaaaaaattctgacgggctgagacgagaaaaccggacaattttgacggtattcgaaattgtcgctcaatgttttgaacagaagcgatcatatacctgaaaaaaatatttaaatttcaaaaaaaaaacaatttaaaaattttttacgttccgccaatggactccaaaaaataaataaatgtgaacagagccaagaaggcataaattcgttgaacttccaccataattcaattgctgaaagaaatttgcaatgtttattaatattatgggtaaaggaaaaaataattttttaatatgttagagcctggattttcttgaataaaatatgtatgaaaaaataaaaattaaattaaattttataaat

SEQ ID NO: 12361 - DNA, 2455 bp, Heterodera glycines
gggttcccagatctgaggctttagcctcattttgtggtttttggacaggtcaatgaaggctaaattttcaaaaatgaggctttttgtggttttttgagaaaattttgaggctttttgtggttaaacatgtgagcagctcgtttacacccacccgattttttttctgggttaatggcaactcgtacaaaaggcaactcgtacacaataaactcgtacactgttagtacaaaggcaacccgtacaaaaatgagctcaaattttacaaaataaagccaaggctttagcctaaacctaagcccgagcaagcctaagcctaatcctaaggcctagttgccttttgtacaagttggcatgaaattttcaaaacttagagatttttcaaaaaaaattttaaaaagaggggaataataggaagggcggaatatagtgtacctaaaaaagtacaccttagatggttcaaacaaaatttgtctttttagttctgagctgattaaaaatgcatagttttttaattgccaatttaaataaattggtgaaaaattaaattaaacaaaaaaatttttggtcaaataattccatattaatccatccgtcccgcgaaaaaaaaaatgttcaatgatcgaatattaagggataatgtgatggtgttgtgtatgatgatcattattcttcaatggaatgtgaggatggtcgtaaaaaatgggtgcgaaatttaaaaaaaataaaataaaaatatacccatgccgtaatggccatttcgcagtgtcctaacaattcgtacaatgaggaacttgtaaattttttttctaaaaagctagaattatctctttaaaataaaaataaaaaaatttttttttgattttttcgttttttttttgaaaaatgataatttccatgaaaaaaacgagaaaatttcaagaaaccaactacaataacatgttcgaagagttcatctcgtttggtcaaatacaatatttatggccaaattaagtaaattgatgatcgaattttcaccgaaattaaaacgagacaaaaatgttcgctcggttttcgatcactcaaacttttggtcaaattcaatcaaaacagatctacgatttatgacaatggcgtcattattttaaaacccagacaaaacttttcatgaaataattaatgcaattttagaaatttcacaattattttttcactaattttttattaaaactgaaaaaaataaaaatttatcgaaagattttcatttctataaaaatattttctgtcaacaaacttaaagcaatttctgcatcaacagcaaaagccacttgaaaggaagaagaagcttttccctagaataaactttcaataaaataaaatgttttgtctggcacaaaaaaaaagttgcgaatcatccaaaaaaaatttttcaaaattttatcattagaggcacaaaaatttatattatttttgaccaaaaaataaattaaattaaattaaaattttctttttttttactagccgacgaagatgaaagtttgaagcgcatttttgacatttgaaaaaggaatttttcgagccaatgaatgcatcaacaaaatgtgtcatggcttttgctttttgaaaaaagggaaagggcgcgcgaaagaaattccaaaatgaaagaaaaaaaggaaattgtgaaactgaatgaatgctatctttccattcttcatttttagcataatttctcgaatttttgactaggctgatgttaaaatggaatttaaaggatttaaaaggaggaaaactataatatttacacattttaataattacaaatgaataaaacggataaattttagacatactcaaattataaaatttttaattatggcctaatttgggaatgtttaacccagttgagtactaaaagttacccatttgagtactaaaagttacccatttgagtactaaaagttacccatttgagtactaaaagttacccatttgagtactaaaagttacccatttgagtactaaaagttacccatttgagtactaaaagttacccatttgagtactaaaagttacccatttgagtactaaaagttacccatttgagtactaaaagttacccatttgagtactaaaagttacccatttgagtactaaaagttacccatttgagtactaaaagttaaccattagagtactaaaagttaaccattagagtactaaaagtatgtatgtagctgcaactagagcccggagcaggaccggatcctgcgcaggattttgcaggatcccagtctgcaatcctgcattttttggaaaatgcaggatttgcaggattaatccgggccggatccggtcctgcaaaaatttttgaattccaatccctgcacagggttccgcaaatttgaatttccgggctctagctccaacctctttggcaggggggctgaggggcaggagcagttcccaagggggggggggg

SEQ ID NO: 12362 - DNA, 5381 bp, Heterodera glycines
ataataagtagggttataaattatacgctttaacatattttttctgcgcatatgctatgaagaaaggggctcaaaaatagcatttctgcattaaaattttttgatttgataaaggcttttagtgcatataaaagcatattttggtgggtttttgagaataagtgcatatttggccatttttgcgtttttagagcatatttcggttattgtttggaaattttcataagaaaaatgcgaaaaagcgaaaaatacactcctaaggatcgactttttggaattttttaaaaaacacccttaaaatcgaaaaaaaaaattaaatttttgtcagaacttttggaaaaaaatttatgtatataaaaatgtaatttgttttagcatataataaaaatttataaatttggaaattcaatatttttgcaattgtctaaaaaatgctccttagccattcgtgtgcgaggaatggcatgaaaaatgcttatgaacaaattccatgtgttttttattagaaataattttcggatgatataataacttactaacatgaattaaaaaagactaactaatagaagctatttttatatatgtaatagttaattaacagtcatttttaatttctttttaaagtttcattttttagtaagttaggaattgtcatttcttacattattaattaaaatgtatttcataaatatcttatattttatggtaatgatctcaaaattgtattcaataatgaagttttttcatcttacaatgtgtacaattattatcaaactcttttcaccgtcgagaatataagaattattaaaattaagaaatatattgaattataaatttttaattttgtttaatattttaaaactgagcaaaaattactgcacaatttttgttcgcatcatattagggctttataagaaaaataaatatttataaaggcacaaagtttcaaaaatcatctaattttgcataaggttggaatttaaagtttgtggaaaaaaatgtattatttttgtatactaattttgaaaaagagaacacgacaaaattttcagatgctaaatttaatatttctgttaggtctcaactgacttcaaaaataaatatttaattgacccgagttctgcgtttatttgagaatttggtcaagaaaaaacaattgtatgtggcaaaaatcgtataggtaaaaaacattaaacatttaaaaaaaataccaaatggacatatttataaaaaaaaagcttcgataatttatgccaaaaaatcaataatttaaattttatttttagtgcctggcttgatactgatccattagaaagtgacaatgataattagatttgtaattatatgaaatccatatttttttcctggactgttggaggcctgaaacgcatgaaaaacatgtttttagcttggtttgaagcctctaggaaggagttcttatccatatttttccatatttcgcgatttatttccatattttggcattaagtcctattaaacggcccccatcagctaaattagccgttttgaccccaaaggccgtaaaaatttccgaaaaagacattttttagcaaaattttgtcgaaaaaattgattaaatttaaattttcttaaaaattggttaatttatgtcaaaaataagcaaaaatggaaattttcgattttttggtttgttttctctagaaattgctttttttcttctaaaacgagttcttatacagtatttagccattttagatgtattttactagaatttgatgaatttgaataaacatttcaaaatttatccctcaattcggaaaatttgtgttctatttttgccattttatgcccatatttcgcgatttttggtccatattttatggccatatttcgagattttataatccattttttgcatccctagtaataacaattaacatttagtcatgcagagatcacaaaaaatcaatatttccctttttgtctataattttcgctattttcctcatcattttattgtttgccggaggcgagatttagtgataaaaattattaaaaataatctcattttttttcaacgaactgatcatatgtaattaacatatccattttccacacttaattaagatttaatttttccataatttgtttcagtaatttgcaaatgctcgaaatgcttctcgacctcgtctccatttcttttattctctttccttccattgggcttttcttatttttgatttaccaaaaaggaaattctgctgctgatgataaaaatgatgactcatttgaggacaaagtgaaccatttatcattttaatttattcatttgtctctgtttgtttaaaattggatttatacgcaaaatattccaattttctaatggtttccctattttcacttttcatttaatgatggcaaccaaaatttattaagagagaagaaattatgacaacgaaaaacacaaaaatttttaaatttctaagttcttgcgagtttactgggtttatatttccacatttttcggcatgttttaagagaatacgcgtccaatatatttgatatggcctatgattttgagcaccgttaaatactcaattgttttttacgcatccattcattttttcaatttttactttgggatctggctattacagagttcccaagtgtctttctcttgtgtcttccctttgaaggattctttcaaattcccgaattttattcagaaaaatatgctgtacgaattgtttgggattgtgcacagtttccgttcacatttgaacaagctctttttggagtgtgttttagttggcgaagtgccaaaaaattggagtgacaattccctttttgcattgtttggcgctgcattgaacggacagattgaaacccttaaaattctggtaattgcattcagttttagattaaaaaataacaaaataatttattttattaagtcggaaagcaacgacgtaaatctgagaatgggccaactgaaaaccgctggaggcacaatcggtgattaaatacaatagcaagatctggacttgctggccggatccattcctaaatttttctctgatttttttttccaaaaaatataggtccagatcagtctgaaaacagaatttagacatgaaaaatctgggttatttttcattgtccagctttgtctaattctgaagtcactttattagatataaattgtgtgtttagacggcgtctcattgctttggattgcatctgccgccggccattttgaaattgtcaaatttttggtaaaataaataatcaatttaaaatattaaaacttaattttttagcaccaaaagggcgacgatgttaatggaaatggatcagtgacatttggggatcacaaaataataagtgacaaatttaatttaattaataaaaattgaaatgtgataaaattccaagagagggaaagaggaaattcctataaaaaatattttattttttaattatttttttgtattacctaataatacaaataattaaattaagatggcatttcgcctctttgtgccgcgtcgtgcgcgggtcacctcaaagtgtgcgagtttttggtcgaaaacaacgcaaatattaaccatcgaatggacattggcttcacgccgttggattgtgcttacattggccgacattttgaaattggttggaatttaagcaaaacaaattaaatttaatggaaaataaatgtgaaaattgtcattttaatttgcattattttattttgttcagcaaaattcctacgcgaaaatggtgctgaggccacaattgagaagcaatttcagttttgtactgagggaactttggcagtgccaccgttaatccccggtagaaaaataagcaataaaaaattgataatttaaacattaaaggaacggtcaattaaatttggatgtgacggaaaataaagaaatgccgtcgaaaatgcaaattaaattcttccattgatgtgaaatgaatgccgaccaattaatttggattaattatgatggatgaaattcattgttttgttttagccaaaatggctataagctgtgcgtttacatacaattctttgttttcataatttttcaactgagaaatattgaatcgaaggaaaatattttgccagaataatttgggtgttcttgaaattctttgggacaattagcacattttatgttaattttttaaaaatagataatttactgctaaagactttgagactcattaaaacttaattgttgtctccaatctatgattcgaattaaactctcatagaaaaatttttctaatgttttattcagaatttaaccgaaaatgcataaataaaatagaataattgacaaaatcattcaaactcgaataaaatgacaaataaaaaagaataaatgcatagagtaaaaaacgcatgaatgatcagagcggcaaaagcacgaaaaaacagttcaagtagaggattaactttgcataatttggaagaagttcgtgaagctgattttgaaataaatggcaaccaaaaacaacaaaacgcatttgatggcaaaagcctgaaaaggagggattttaaaacaaataaaaaaaggaaacacggaatttatataaaaataaatgttagaaactaattgtaaatagttccgttgaataggaaaggtttataaaagatcacttaagaaaaggttgctaatcgattatcgggaatttactccaaaaaaactaattcaaacaaatattaacatttccgaaaaaagatcactcaaataatgtttttctataaatagaaaaattttcccatataaaatttgccgacatataaaaatatttcttaccataacaaaagtgtgatagcataagaaaacaagagaaatgaaggtgaagcagcaaagcgaaagctaaaattaaatgattttccatccaaagtcgagaggaaaattaattgaattaataaaggaaactttaaaagggtcaatcttttgatgctttttgttttttaatttatttttaaattaattgaattaatttaaaagggtcaatcttttgatgctttttgttttttaatttatttttaaattaattgaattaatttaaaagggtcaatcttttgatgctttttgttttttaatttatttttaaattaattgaattaatttaaaagggtcaatcttttgatgctttttgttttttaatttatttttaaattaattgaattaatttaaaagggtcaatcttttgatgctttttgttttttaatttatttttaaattaattgaattaatttaaaagggtctatcttttgatgctttttgttttttacatttatttctagatgaattgaattaatttaaaaggatcaactcatctgatggtttttgtctttcaatttatttttaact

SEQ ID NO: 12363 - DNA, 2894 bp, Heterodera glycines
agtaatgtccatcggtggaaaaatgatcaacaatttttacaatgcaaagtgtgtgtgttttgttcatttttgagtatcgatcggatttgaatagatatgactagttggttggtgcagaccctcctcctgctcgagcagaaactgttccacgtcggcccaactgtggcccagcgttgtgccggggggcgcctcgtccgagtcctccttgttgatgtctgctaagcatggggacactttggactggaaagccacccaatgttgtgggcaattactgagcagggtgtcctcgtccgggtccatgtcgccctcgaagccctcttcgaccggcagtttggccaacatgtcggtcaggtcgtggccgtcgaagccgaggtccttcgcgacggaggccaacgacacatccatggcttaaattcgtttgtaaattttacataaaaaggttttcggatttcccccctcctcagcaaaatttttctggttacgggcctaacaatcccttcgatatttagtctttttggggtgttgtcctgaacgcactttcatggagatggtcgtcccctcggtttgcgggcggcacactgctgggacagtacggcgcgtggtgcggcacaccaaaaggttcgcagcgaattgtgacggcggaggacagcgacgaatcgccgtgggcggcggtgcgctggtggtggaggaggaattgctgctgctgttgttggtgctgttgaaagcagtggcaattcttcttcagcgaatggtcgggacaagcaacgccatggtgcagcatggacaaccgcagatcgccctttaaggaggaaaattcaaaaattttcttttagttttcattttggggtggcgtgggaaccccccctccctcctgcggttacgggagcgacccaagctgcacaaacatgctaaaaaatcgccatatttttatgtgcattttcaacatggcaggtataaatctcccccaattaatgctcttaatgccatgaaattcctccgatgaatccctcccttacgctctgtgccatcgcgttgacaatgccgtggctgttgttgccgttgttgttgtgttgcagtctgtgcgggtgttgttgctgctcggtcggtgccaccaactgatgcctttgctgctgttgctgatgttgttgttgattttggtgctgttgttgtgcgtaaaaatggcgtcggcacagtccatcaaacagtaccaggtccgtggttggcatcgcctcgttgcacaaacgccacttgcaaaaggtgaacaactgctgcgccacgttgtacgtgatgtggtcggcacagtgccgggcccagggcaaacattggttaggacaacgaaacggcggtatgccaccgccaccaccgttggtgttgccgtccacgccggtgccatccgacgaagacggcaaatgatggctctgtgaatttggagacaaattagaagcggtaatttaaacggaaacaaatgcatttgtcaaaggaatatcttggtttttaagctttcagaaattataaaaatacgaaaaaaattgataaaaattgtttttaaaaatttttgccggacaaatatttcatttttgaaaacaattctcccacctgttggggctgtgcgatgtatgcgcaccgctgcatccgccgttgctgctccctgccgaggctgtgcccgcaacgtccgctcccactgttggtggttgtggtgctgctgctgtggttgtttgctcgcacacgtagcgctgcgcccacactgtttttgtactcgcgggcggtggtgttgatgggcacgcacagtttggcacgctggacgagccgacaactctcgagccgcagctgcttcttcagcaggtacagctccagccgacagcccccgttttgaatgggagcggcggcggcggcggagggaacgccgcaaccgttggacgacggcgccggcggtgtttggggcggcggtacgtagccgacggcgcttctgctacttgagcagccgattctttcttcacccaacgacggaaaggaatcgtccgaactttcgtcgtccgacggctcgagaccttttttgagggaaaaagaaaattgataatggcaattgaaacactgacgaaaaacggagcaatgtgaatttgttggaagaaaaacccacagagtttggattaacccgtaaccataggaaattaaatttttacggagtagatcgtttcccttactgttttccaaaaattgaaatgtgaacagtcagacagtgagtgaaatcaacacacacccaatgggaacaagtcggtccggtcaaagtcttgactctcgacaatgcggcacattgtgtcgaccatggggatggcacggaaggcgccgtcgatcagcactttttgccgcttctggcgcagtttgatcactttctgctgccgcttcttgttcaatggcattgtgccgctgccatcgctgccgagggcaaattcgccgccgcgttccctttggtattcgatcaggtcgaactggtcactgttgcacgcgttgagctggtcaaatttgcgctccaacctgaaaaagaaaggctcttcttacggaaaacaaataaataaaacattggtggagaggggcgccatggcggggagaaatgggtcgaactcttttcgctgttattgcatttctacctaccgggaacgtggggttgatccgggtcaagaaaaaggccgaatatgtagttttgaatcggttttccaaaaaatccggatcataaatgcagttaccccgctctatccctaccaccgggtgcacttaattccccccgccgttgccccccccaaaaaaataaaaacttttttcgaggggaaacgacggaggggcgacctgttccaccctaccacaacatgatatcgccactaatttaatttgggttttca

SEQ ID NO: 12364 - DNA, 987 bp, Heterodera glycines
  unsure (1)..(987): unsure at all n locations
tttgcagggagcaagtgatggtttgatgatgggtgttggctttggctgttgtcgttttgttgctggtcgttttgaaaggcgcgctttgggcctttttcatagtttgaggcaggcgcaaatgacgaagacacanaattatggtggttttggtggtggtggaaagacgcgttgttcgggtccattgggacgacggaattcgaaggtggcggatggagctgaaacaagaaaaagaaattcagcatttaaaaactttaaaacagagttaccaagtttctttacaaattttaaaaaatgcttcatcagacatttttgtaaaaaaattagtatttcataaaaattttatccaaaatttttttttttttgaccttcgaattggtatgaaaagtcaattttttaaaaagcattcaaaaaagcaatcttgttagaaatgtttggtaaaataagtaggtaaatattatacgattcttatgttttgaccatccaaattcattgcaaattgtcttgcaattaaacagaattccattttagaacccctatttaaagcaaaccaaaaaatgaatttgccctccctttttttgcaaccacattgaaacagcaaaataatgtgccaattcttcgttagaaaatataaaaaataatgaaattcatgacatccgtaccatgcccttgccgttgttgttgctgtcggccatcattttgctgtcgtttcgttgcccaatttgcgatggtccgccgcccgcgggttggtggccaacaacttgcgttcggcaactgccattgtcgttgttgttgttggactgtaagagtttggccgcgagttgggggtgcgttttgctgagactgcacgcagaaaactcctcagttttgagcctgataaatgatgggaattgtggaagaatcacggtgttcggcaattttttttgtcttcgtaatatttaagcaaaaacgtcggtgttattctaatatttgtacagtgtttttaaataa

SEQ ID NO: 12365 - DNA, 2793 bp, Heterodera glycines
ttcttggtgttggacgggtcgaaacaaaagtattctttttcttggccggccgccatggtacgaattcatggtaaaatttagcataaattattggctgagttatgggttatcatcgcatttaagtttttaaattaaaaaataatttaattttgcatttaaaaaaaaatatcaggtagatcgaaaaatttgaataaaaaaaagaaaaatttgcttgatccaacccaatattttaaagcggggtgaagcataatcagaagagcactcaatagttactcaaaaactcaaaatcactggactcaatttgatggggctgcttgactaaatgcgggcccccataattccgcacaaaattcattgacggggggacagcgaatcttgagggaataatgggcaaagaatgacaaacaaaaaatggccacaacagtggaacacagcaataaatgttgagtggtgtacaacaaatgtaaaaccaaaaaatattcatacgaacatgtgaatcagggatatgtatgtgccgacgctctcaaaaaatttcggcaatcgtaattccaacggaacaaaaaatgtctgcaatcggaaatcggcattccgacactttctcatacaaacaaaccccttttaaaaaacttttttgtaatcccattttaaatttaagaaaaaaataaatcatttaaagatgtctaaaataattttccattaaatatttgtatagctaagatggtggaaaaagaatagaaaaatttctcacgagaaaaggtgattttattgggccaggcagagaaacttttctctctcctcaataaataaaattattcctttttttatgaggcgtctacaaccataaaaaaggcagaaaacgtttaaaaatctattgcagccaattttatttatttaaaaaaatacatataaaatagaattaagaaaaatttattttcctatacatagtgtccaatttttccgggagcccttttttagtttttaccgcattttttggaaaaatctcaaaattttaagaaaattaaatattgaaactttgaagttttttttaaaatattatttcattagcaatcaaaaaagattttatttaaagtaacaattgaagaaaacaataaacaaaaatttgaattagaatcgccacaatctctcttctgtccttctccatctctaatttctctccacttttcctgtgctctctctctctctcttcctctctctgtcattgctccatttcttccccatcattttcctctgtttgtctcttctgctgtccatctctgtgccaatctccgcctttcctgcgctctctcttcgcttcgcgtctctgccgtctcttttccacccgtcctccgccggcaccgcctttccatgccgccgctttctttttgtttgcccctttccatggccgtgttcgtccaacattttcaatttgctgctgatttccaccatcatcatcaccatcttcacccatttgctttgtcgatgttctcaacagatgagcacttgggcttaaacagaatttttttttaatttttttaccatggcaaaatgcgtgccaaatttttttgcataggggagaatcaattagacaatttttcgaagtcggtcgttttccaatcactcgagaaaatttccatctaaacaagacaaactcgcaaactgtatttgcaatttaaaaattattttcatcatttttcaaaattttaaagatactatatttttctggctaaaaaatttttattactagatttttttgaaaaattctattattaaattttctcggaaggacgacagaagggggagggggggggctgtggaaatgagatgcacccgcttttttggaagcaaaaatgcattatgttccataaattgacactcaattaaaagcattttcaactttggcgtcgaataacaaaaaaaaaaattgggcatcatttacaatacttcaaatgctacccaaatgcggccgctttgccggcacttaaaaccaaaaacactgcgatgtctggccgagtccgggcggtcgacaattatgccaccctgaaaatgcgttttgaatatacaattttagaatgaattaaaaaaaaagaagttaaatttgaaatacctagtttggtgcaagggtgtaaatgtccgagtagtcgcaaatttttttccgattttcaaaaaattttggggatactcggacaatttccggaaacttttttgggaccttggaaaggccatctgacagtggacacacccacaaatcgaacaaacggcaaaactgcccacttaagcagttatgagaaattcagtattcagtgccacgtgcctggaaccccgcgcgcaacgcctgtccggtgatcagccgttgttgcgcatcactgtccgcgtacagttggaacacagcgcggccggacctcaaaattgattttcaaacaaaaaagtttttcttttttggtaaagttaaaattggatgtatgacagacaaccgcagtccaaaaattcgcaaattttaaaaattgtttacaaggtaacaaattgtttttggcgcaaaacgactataaattcctgttttccacggggctgaaaatttagaaaaataacaaaacatttaggtccgaaaaaaacaacaacaacaatttcggatgcccttcccgaaaattaaaaaaaaattcggttgagccaaccccccttttccatgtgtgttcggtactgaaaatgaatcggaattttcgctttaactcaaaaagtcatcaatgaacaatcttgaaaattgcttaaaaaaatttccctatttatcatttggaaaat

SEQ ID NO: 12366 - DNA, 2394 bp, Heterodera glycines
  unsure (1)..(2394): unsure at all n locations
aaatctcgcaacctccccccccccccccccctaaaaaaataaattttttgcagtttggccaattttgttgggttttttttgccttaaaaatactgagattttgttccgaacaaattttgcaaaaattgtttttttttggttttacttttacaacaaaaaaacgatgcggtgggtaattccctatttcaaagcagaggggaagggaagggaggctttgcccctgaatataggtaagtccgatttttaggaccaaaattaaatgcttgttggttggagggaaaaatgcaaatgacaaaccgaccaaattgctccatcgaaacaagccggccgaaatggaagaccggcgcccatgtcagccagcaacaattgtccattcgattcggtgtcctcatgtgcaacgcctaaagaaaattgaaaaatttcttttccagaaaatccctgggttttcgtgcctaatctggacctggttttttttcatatttgacatggacaaggcttttctgggcatggatcgatccagaaaaaatttgacggaaaataagccaaatttttggaaataaatattccgccagtcaccaaacacgattggaaaaaaattggactggtctaaacatgtcaaaaaagccggacaaactaactgagcattgccctgctgatgtccaggcccacccagtggtggccatgttcagccaacacagcgccgctgaggcccgaaccgcagccaatgtccaacaggagcgcaggcgaccgcgccgaactggccgccgccgcactgtcgtccaatgccggcaattcaagcagttcataggcacgctgggcaagctcacgctggatctgttggatgaaaggataaaaatttggtctaaaagtacgggatcgggatttacgtaaaatcccccaaatcctgcgggaatcctggtcacaccagactctagcatagacctatatttgcaagaaatcttggggtagccaactctgaccacttttcctagtaatgagaaaatttttcattttgcgttaaatcgaaaatttcaaaaaattgccgtacatttcacaaatttataaatttaaataggggtgaaaaccatgaaatgtaatttctaaattcatttgctgccatactttttgtatgcgtgaatttgccgtgtatttgcgtgcttctgtgttgtcataatattgttcaggtggacccgaatattcgggacgtgaagaggccatttaattaaattatttggtaatctataccatttcaattaaataaaataatagagagttcagatatgtgaggatttatatcccgattttatggtttttttgatagaaaatgaggattttttgagtttttttgtttgtttgagatttttggataaaaacgtagccaaaaaaaaatttttttttttcaaatatacttaagatcattttgccaatataatgcttattttcaaaattaataaacaagtccatttcacatacttaccatgggccaatcaagtcgaaaatattaaatggactaacaagggaacctcgcgaactgttagtcaaaaagtgggtataaatttggtatcattggatagagcagggtcgacttctgctgttgtgaatttttaatattagcggtgtgagatcaaaaataaaaaagttatgaggcctcaaaaatcgaaattttagtataagagactacttaccggctttngctaacttttcccttaccctctctcactctattcccataagatatgagggtctacttataaacgcattcaaaatgtttttctacaaccttatcaaataataagcaatcaaaaaggattttttacgcaatgggtgatcataacccgacgacttcttcagcttcgataattccagacgattcaccggtaaatgtacaaaatcctgaaaattcagatagcatttgattttaaggtcgatgaaaaagatatgccggcaacggaccgcgcgattgaaaaactttttgatggaattgacgcaatttacttcatggaaaacggattcaaagcgattgcgcacgaattggaagtgcgtgccaattggaattcttacaaataaacataaaatttttgcagtagatttagttaaatttagaacaattttagaaactttccgccatttgttccgaattggaaattgacgagttggaaagggaacggtttaagcttaaacggcaaatgcaaattgtgtcgaggaaaatgtcggcgttaatcgtcaaaaattcgctgtctttcaatcgacaagtggaaaattatgaaagtgtccgaacaaatgctgaacatttgttacgaataacgaggcgaatgccgaggtgcgaagaatgaatccattcggatttttctctgcaaaaatgcccccgaattttaagttcgattgaaattggga

SEQ ID NO: 12367 - DNA, 3605 bp, Heterodera glycines
  unsure (1)..(3605): unsure at all n locations
agaaaattgtcctaaaaagagatagccatttttctgagaattaattcacaatttccgcaactcttgcggtaatggaaaaaattttgaagaggctctgcggaacggattagcatcggggttacgagatagaaaattgtcctaaaaagagatagccatttttctgagaattaattcacaatttccgcagctcttgcggtaatggaaaaaattttgaagaggctctgcggaacgtattagcatcggggttacgagatagaaaattgtcctaaaaagagatggccatttttctgagaattaattcacaatttccgcagctcttgcggtaatggaaaaaattttgaagaggctctgcggaacggattagcatcggggttacgagatagaatattgtcctaaaaagagatagccatttttctgagaattaattcacaatttccgcagctcttgcggtaatggaaaaaattttgaagaggctctgcggaacggattagcatcggggttacgagatagaaaattgtcctaaaaagagatagccatttttctgagaattaattcacaatttccgtttccgcagctcttgcggtaatggaaaaaattttgaagaggctctgcggaacggattagcatcggggttacgagatagaaaattgtcctaaaaagagatagccatttttctgagaattaattcacaatttccgcaactcttgcggtaatggaaaaaattttgaagaggctctgcggaacggattagcatcggggttacgagatagaaaattgtcctaaaaagagatggccattaaaatataatatttaatgatttttgaccccaaaatctgattttttgggcccgatgtcctgattttgaaaaattttcgatcgcatccctgattttatggcataaaaacgaggctaaaagccacgtcgcctccgcctttgaagtttaaactgcttttgcccattttgactatattcgcaccaacaattttatcagaaaaaaggaaaacgaattttgaaattttttcatttaaattagggtaggtcgggaccgggaattttgggcaaaaccgggaccagactttttcgggttgaaaaaccgggactttttggctggtgaaacagggaaaaaacccgggaatttcccggtcccggtcaaaactggtcaaaaccgagacttcggtactaagctgtactcagttgtccgtgttcaggtcccggtcccgctcaactctaatttaaatcaaagaaaaaaacttaaataattcaataattagggctttttttaggcaaatgcctaaaattctgcgcatttgatacgctcagataaagacgaaaaacgcgtttttcgtttgatttggggagttgacttttataatgcatacctatttttgcatattttgggctttttatgcttaaatgttcacacaattcataacgcacttaaattattcccagaaaaaaattaaaaagaaaatttcggagggtctcaaaatttacaaatgcaaaaattaattttgcatttatgtaacagttaaccatttttaatggaaaacattaaaataaaaatacttttcaattaatattttgaatttattgtatttaatgtacacaatgccattccgttccttttcatcacattctgttttttccactgtttgttcatttctttttgatcacaatggtgaacccgtttccaactttgtcgtccacatctcgccattccaccacattccaattgaaatgccggcacaactccagcaagtccgacgtgatccacaccgacttgtgccgttccggcttcagttcctccgccggattggtcggcttccgttttccttcgtgccgttcaagcagttcggtgagcggcgtccgtggcaaattgttttccatcgttcgctctttgtgcggcacatccatgtaaacgaagccccctagggaaacatttggaattttaattaagcaatttagctattaatttgcattcgacacttattctcccgttttacctggcttcaccacccttagccattctttgatggtttttatcggatcccaaaagtgctccaacacatgggcactgaccacaaagtccaccgaattgtttgtgaatggcaaattgtcgccgggtgccaaaatgtgcacttttgccacgccacatgaaaatagttaattaatggactgtttgctgaacaacagaacgaccaattggttttgtttggtttttttatagtttgctaaaagtgccattgcctttggccaatcccatcaaatgccaatgccattgtcctcttccaaatgccgaccttcaatttccgtttgatgttgctgataaaatgcgtttgggtcatctgagtagtccacattcagtgcacgtaaaccaaagggattctgaacagaagcgccaatttcaatgccccaaaggccgtccaacaatttgtgggcgagtgcactttctctgtgccggggctttactgtaaagggcaaagggtacggtagggtgaaaaataaaaacaaataaataatacatgaaatttaaatttatttaatttttgcctgcttttggcccattgtttccatttaaatatttatgaaatacaaaaaatataacaaataaatggaagagaaataatgcgatgaaaaagtttatttttgtcgattgaagcataaaaaataaaaactgaaattttaatttaattttattttttcaaaattctaatgtcattcctattaaaatgaaataatctttcttttagtgaaagcattctgattcaaattaatgcattgttttgcgtttatcttaatcgccatcattaatacccaacgaataatgtgaaagaaaaaaatgcactaataacaacaagaaacatcttatatccgcaaatcaatgcatattaattgaaaaaatattaattaattcattgaattaaattattcttttgatttaatttaatttccagaaaaaggttttttcattgaaaaaaatgatgacaataaaaaaatgtcctagtgatcaatgccataaaaattgcaaaagtaataatttgggatgatatttatagttgctaaaaagtgccaaaactcgccctcggcttgcggcggcgttgtggtggttgttgtcgttcggtgatgctctatgcatttccgggctccctctttaatatgctttataacctaaagaaaaaggcacttttaaactggtaagtaaagatggaaaaattttacaaaagtgaaaaaaaataaaaattttgtgccaaaaaatcaaaaaatttattaaattgatttttgctttcctatttcgtaaattttttacgaaattaaattcgttttcaattttgaaaatttttacaacattgttcattgttttaatgtaaaattatttgtggtatgaaacaggggaggggcgcaaacaaaaagatcctgcggtcgcggatcgcgcatttaaaaactcaaaaatttccaattttttaaaaataccttttttaaactttttaaaaatttcttattataaaattttcggcgctctttttctaaaaaacttttggggaactgatggagttggggtggatccagagatgccgantaagcgccaccgggaaaaatttgaaaat

SEQ ID NO: 12368 - DNA, 738 bp, Heterodera glycines
attcaaatgggacttcgagaaagggaatttgttagacgatgctcgaaaatcttttgagtcgagagtcaagaagtgtttcccaattttttgttaccgatcccggtccccatttccataaattcccgaccctcaagtcttaatgcaaataaagtaattactttaaatccctacattgttctcgaccctttttttcccaccgaccgatcccgtttaacgttttaaatttgtaacttcaattctcgacagaaattaccggtcacagcaggtccccccggtttttgagtcccaagaatctcacaaattatccgttcacagcacatgattgatcgctcggcaggactcttcttctcacaattctcccatgttaattaaattatccaaaaccttttaaacaaatattccccacatttcccctaattaccgcctaattacccaaaattaggtagttagttgcttttgcggttgcccttttccctcggtccaatccgtcccattgttatggcggcacgcggactttaagcattcattcttccattctccgtcgtcctccgcatgctttttcttttcccgcccttgctgctgaagggcaagttcgttttcggttttttgtttttgcccgccctttttcccttcactttgtgtaccaaaatgtcggctaaatccttcgcccctttgtcccccgccgccccttccgccgccggcgttaatctctcccgccagccgacccctccgcccgcc

SEQ ID NO: 12369 - DNA, 2712 bp, Heterodera glycines
tgatttttgtctattgcccgccccgtcagagagcaaaaatccgtcccttccccggtttgggctacggtacacacacagtatcccattcccattgaattttgattgtttttgtaagggcttagggaggcaaatagaaattttgtttatgcaaatttggattattagcaatatgggaaaacagaagtcgaagtttcatggtacataatttctaatttcattattataatcaatcatcacattgattgaggttttatgggtctaattaatatgttgcttcaaaaaatttgggaagcgtaattccgtgacttaattgtcggaaatcggcttgaccatccccaagttgtcgggcattggcttaaccatcccccaaattgtcaataaccgggaccaactctcgcacatgtctaatttgcataaacaaacaaacaaacatctgctcacaccgtccgaaaaaacgagatgtgtaccaataaatagagagtgccagagaaaaacattatctttttttctctaattttttgtctccttttggcgtactatctaatattttcattattaggaaaaacaacattcacttcgtgacgtttaacttttttcctgcacgttaaatacacaccaaattttgcatagcgacagagaaaaaaattctgcatcgattcatctgttattttttgattctatctgttagttcaaaagatataataaaaacaaaatttcaaagcatcatatcttttttctaacccatcaaattgcttaatgtttgcttagaaaaagcttctcctcatcaagggctttcgaatgataccaagattatccaatttagttggcaaaaaccttcaaaaataattcccaaatatcgtgattttttaatattttggacaaaaataaatgaaaatattcatgttgcacaacggactcgaaccaccaccctttgtccctttactatcttacaaaaaccactgagccacacatgcaaatcttttctggtacaggagctcatttcccggacgctgtgtgctgctgttcgtacgtgtgtaactgtgtgtgtttttgagcaaaaattgcgaaaaaacctccccccgcattcattcatcatcatccaattcctccccctcttccccatcctcctccataaatcaatgctccttcctcttcctcaccccccaccatcattcccctcctcctcctccttctgctgctgttgctgttttgctgttgttgtaccaccaccattcgtccgtccgtcttcgtcgtcgctgtcgtcgttcacattcattcattccattaccattcattcgttcgtttcttcgttcattctttcacattcccccgtcgccctccccccccccccatcccaaggaatggacgccactttttgtggcgggtgggggacaggagagtcctcctccccccccaacgacggtagaggcaaatttatgtatgtatgcgtatttatgtgggcacaaatcaccgccgccacctccgccccatcccatcccatcgattgtattgtgttctcccccccccccgtttcttcttctgttttgtgccttttaaaatgcgatacataaaatttgttgtttaaaagtttttcgttgatttatgtgtttgtggggggaggctgaaaagtgtccccatttaaagattaaactgagagagagagcacccgttgagactttgatggtttttgttcaattttcctgccctttactggatttttttttgtcggcagtcattaaacgcttgaatatttatttaaaacatttcgccaaacaccttaaaaacaaatttgttttcaaattttccaatttcatccaaaagtcgggaccggtgctcaatccttttaaaatcattttgtgaagcatacaaaaatgccgataccagcgcgggaaaattttcaaaatggaatttgttaattggatttgccctagaacttaaatcctccgtccaagtatcatccctgagtaaaagttagctagaccctgaagtgcaatagaagcgattttaaaatccccccgatatggattcccaaaatgatttcgcgtttccggcttttgtaatctatgcctcttaaaatgtcattaaagtgacaaatttcagagtgattaaaagttggaaaaaatttcttgttgactcaccaccacacaaatttcaaatgaacggaggcggaaacagtgaacacaccagcaacgacacttttatgatcaatgggaatgggggcggtgtgatgatgaacggcaacggcacaaccgcaacggcacgcttgtcctccgcggtgccgcccaaaccgccgacacgtcagtcgaaaatttactacggccagccccagcaagcagtagcggcaacaccaccgcagcagcaaacggcggcacaggtttttggctttgcctttttttgcgttcgaatgcccccccccccctcggccgacgacctttttttttgatttttgaagggctgaatttttcagtctaagggtgtgaaaaaagtcaataaaatatttacggaagcacacgaaattgattctgactcttctgaaaatgaggaaatcccgggagaagaagccgtgcctcaagagaaggatgataccccgcacaaaattgtcccggaaagggattttggccatgtattaaccaagcagcagtgccgaatcgtgctctcagattcctacttttctttaaaaaatttagactcgaaggggtcttgggggggggg

SEQ ID NO: 12370 - DNA, 1688 bp, Heterodera glycines
aagatggatgatgagatatgatgaagaagagtgggcgaatagcctcctctcctgacagaagaatcacgtggtgacatttgtgggggattagcaatttaaggcataagtgcattttcactgatgagaggagaagcagcgacaagagaggagggagggagggaagagctaggctttgaattatgagtcttttcttcattcactcttgaaatattgatgagaaaaacgaaaaaattaattggctaatgcatgcatgtgttccatcttatcttaattatatttttgtttcgggagtttcggtcccgtcctcgagtcttacgggattttgggtctgattctgggccggttctcgagtcgataaatttctcggattttggggttctcggtctcgcccagactcaattctggccacgacttccagtagggacaagcaaacttcgaactaggaaattttttttgtttttttggtttcaagcattgagcttcgtgtaccaaaaattatttttttttatttgaaaaacatattcttagagcttaaaaaagaaatggaataattaagtggataaattattaatttggtatgttaaatgagaaaacagaaacttatacataaataaatgcccatgtacacatataatatgtccattaggaataattaattttggaaattctctccagccaaacattaattatcccagcgagcgagacaaattagtctaattatttatttattgggcattaatttttagctgcgaagggaatgacgactatttttagcccagagcaattattaatgtgactttttgctgttccaaatatagcctgtgagccgagagaactttactttgtacatgtatcatatgcgtatttattggcattttgctgccgctgaatgaatgaataaattggctaattggggatgtgaaaatgtatttttagagcaatttaacggccgatttttatataatttgccattaaggccgacaaaaattaaccaccaaaagaaacatttaaaaaatgcaattttattttttgggaggaaattcgccaatttttgatacactttttgtgatgtctgtgtctcttcagtgtttgtgtgtgtgtgtctgggccccaccgctggtgttgggctgacattaatctgatttgatcagtgcaatgacactaatcagaggaaaaatttttttttcttttggtaaacagtacaaattccttttttcaaataaaatttaagtaaaaaataatatttttaaatataattcacattttcgagaaattgaagttgatcacttcaatcaaatgtcgggataacaggacccttattcaaactgatcataagtcaggaaaaagcaatatttttaatcgctatttgatccattttgatctgaattttcagaatttcgtttctcgtcggcatatctttcctcattagtgcttagaaattgtcatttcaacggatttgatggatcccatcatcatgttaatcacccgagtctgacgcttggaaaaagcgtttcgctaagacaagcaaaacaagttggttgtgaaaggcctaaattaccccatgccttttagggaatcataaagcctataaacagacaaataattattttaaaaaaattaattctagacggaacttttttaggctcaaaaaacatctaaaaaatatttatttataaaaaaaactttta

SEQ ID NO: 12371 - DNA, 3075 bp, Heterodera glycines
  unsure (1)..(3075): unsure at all n locations
ttggcgcattgaaatgccacaaataaatgccaacaatttcccccccccccccccgccccgggtggtcccctcacgtcctgctgggtgtgccctcccctcaaatttcggagggcattgccctgctggtggaaattaaatggctattttttcctgccattcggcactttcacatatttttttgggcatggaggattcaaatttcgcactgttttgccttatcctattttctgcaccctttccttttttctcctccaatttcggcatttaactatttttgtttaatcgcttaaatatcttagagatattattattattatttttgacgtcatcatgctgcgaaagatatggcaatgccgcatgagaatgaatttgccgagtctcgaaacaggggtttttaagaatggcaccgagacccaaacccaaattgctcactcaaagtgagacaattattatttaattccaaaaaaatgtgtgggtattctggattgagtttggcaattttcgaagctgccaattggcactgagactaaaaattcttcgagaccctctgatttaaacactcaaaatgtctatgtaaatgctaatatatttaattttgaattgtaaaattgtctaaattaattttcagcatggtttcggactttttctgccccaacacgggcggagtggagacgcacatttatcagctgtccaagtgccttctgcgcaacggacataaggtaagagcggacatgtgctcccaaatggatttatccgggattttttagaaattgagtttgaaattttaagtaaaatatttttactatttaaaattcatctctcacttcattatgtgggtgtcaaaatatttattgcatcggaataataaaataaagccttcaaatagccggaaattcattaatttctaaccggtatattttttgaaaaaatatcggcggattgttttccatgaaatgctgctgaagaccaaagcaaaatggtagtttttctgtatgtgtttttttttgttgagaaaagtaatattaatctctgatcacttatctgtgattttgatctatgatttttatcatccgacggattaaatttacgatgaaaaaaccactaaaaaaacgagaactaaacttcttagtctttttttcatctcaaagttcgagcgacaacacccgaaaattaaaaaaaaacaggcggggacgggtagcaaagctttctagaagaatataaaatcaaatagttgttatatgcaatttcattttctccaacgtttattcaagaattttctttacaaatacataatcgacaaataataataaaatcttttaaattggtttttttttaaattgaatttttctatgcatatgcaatttaataacgaagaaattattgtatctctgaatacgtgtaaaactaaattaaattttcattgcttttggttgtatattaaatttaaaaaattattttcaaatacaaataaagtatgtactatgtttttgcagttttgtatattttctcaaggttatcgtactcacgcacgcgtatggtcagcggaagggcatacggtacctgtgcggtggaacactgaaggtgtactatttgccaggcttggtgttgggcaacaactatttgccgtctgtgctcggctcgttgccgtggttccgacgcattttcatacgcgaacaaattcaaatcgtccattgccattcggtaggaatcgcattttttattactataattattatgtttattaaaaaataaaattaattaggacaataataatagcatataataattacatttaattcttgttttaatcaataattaataaggatgggaattttatgtaagaaaaatcgcgaaatatgtaaataaaaaatgttaaaaaaaatgctaaaatatgtaagaaaaaatgtacaaaaatcccaaaatatgtactaaaatatgtaaataaatttttctaaatggttaaaaaaattcctcttaaagggtgaaataagcacaaattgccattaaaataatctaaataggcttagagatcacttttagtattttaaaaattatttttgatatctcacttttggaaagaaaaaccgattttttcggtaccttttctaaaaaaaattttaatttttcacaagaaatttatataaagtgtcaaaaatccacaaattgcaaaatatgtacgaaaaaatccaaaatatgtataaaaatatgtacatatgtaatatgtagaaaaaccttggcctaatgttttgtcagcattggtggatttatttgtgatcttcgagggttgaaatgggattggttggcgcattgaaatgccacaaataaatgccaacaattcccccccccccccgggtggtccctctcgtcctgctgggtgtgccctctcctcaaatttcggagggcatcgccccgctggcattaaatgactgctgctttctgccatcccgcgctttcacattttttttggcatggaggattcaaatttcgaactgctttgccttctcctattttttcaccctttccctttctctactcaaattttggcatttttttaatgacagactttctccaccatggcacacgaggcactgctccacgcctggtcaattcgtgcagggattcgcaccgttttcaccgaccattcaatgttcggctttgcgggtgccagcgcggtgctgatgaacaagctgctgctgcgctactcgttggccaacgttgaccggctgatctgcgtttcacacacgaggtgagaaccatttataggaaacagggaggggtcgacccccccccccccctagggggccaaaatggggtcatttaaagcgagggggaggccatgaagcaaatttcccactaaatttttccaaaaaccacaaagttagcaattttttgatgaaaattgttaaaaaaaatatggtcataaaaaattcattgatcgattttccaagtcccggccccggtccggtcccggccatttcaaaattccggtctctattgtnaatattaaattgttttttaaataacgacatagcaacccttccctncaccntattgtacttctctctctctctctct

SEQ ID NO: 12372 - DNA, 1391 bp, Heterodera glycines
taataaaaccatacaaaaaaatggagccaactaatgaacaaattagtcatcattttctaaatgcaattcgtagatttattgcaagacgtataacgccaaaaaacatttggagtgataatgcctctcaattaaaacacacatctaaaataataaatgatattttaaaaataaaagaaatatttctagatgaaactataaaaaattattttttaactgaaaatattaattggaacttttcaattgaattagccccatggcagaatggaatagtcgaacgtttgaatttaaatattaaaacagccctaagaaaaacaattggcaaaaaactacttgattatgacacttttaatactatgattcacgaaatagaaagtttagttaattcacgacctttaacttttatttatgatgatataaattcgcaccaaacattcccttttatagaattcgaaatataaactaggcaaaaaatttataccttttgcagggcgggtaactcgataaaaggctcattgaaataaactcattaatcaatttaaaaataaaattaaaactatctctattcctgtaaaatagaccggaaaaaaaattaaagtcgaatttttagttcattaaaactaaaagtgatttggtcaatatttgacttttatttatttatttgattcacattatatatatttttggcggtgatctcgttttaattgttttgctctttcttgaggacattttttatattaatgttttgtcctcaatgtaagtggatttttcccttttgtggactttttctttattgacaataaacaataaacaaaaaataacaataaaagtgtacgcgctttgtgaattcgcgcgccatttttattattttttaacgacccaaaaacggaaaatttcgaaaaaacgatgcggaatgaacccagagctatcgaatgatatgtaacgaaaaggatgagatgaatgcgaatgatgattagtgaatgatggggagaaaaaggagaaagggaaatgaagttggaatggacgatccaatgggttgagatgaagcatcaaccgaagatacatttgaattatgtagagttcgaatttgctcgactggtctgtttatttgcctcgagtaatttaggacgggcgaagattatttgttccctttgacgattatgatgaccggcgaagagtcgttcttgatttacgagagcatcttttttctattttgttttgcgattttatttttcgtcgataatgattaacgaagtactgaattgagttgaattgccgatgccggattgagtggccgattataagattgtgaaaagaagaagaggggagggggacggaagctagcataccgccgatttcgtatcccaattaatgaatggaattttgtgattgaa

SEQ ID NO: 12373 - DNA, 2604 bp, Heterodera glycines
  unsure (1)..(2604): unsure at all n locations
aaatgagttagagatgaaaaaaagtatttacaaaaaaatagttcaacaacaattgatatcgcattctttcacatagttatattagggatgatacccctaagaaataaaaaattagattttaaaattctntatttcaatactgatttggcttaatntagcgctttatagataaaattttacgcttttatacccctaaatttgagactttttagactctattttccatttttagtgcctgattttggggttttccagaacctatatggcgcttagaatccgattctcaaattttgggttaataatcacaattgtaccagaatcttttttcctagtgccaagcgttatcttaattgtaccagaatcttttttcctagtgccaagcgttattttagggaaggtaccccggccgagatttgggattttctaaaaaaataaaattcaagtaacatttactacaaaattcaagtcccgattttaagtctcgagcagcaagactcaatttaccatcattatcattattttggacagcatcggaaaatgtatttccatatttccatcccatttaatttataataaccgcacaatgaattgaagaaaactttgcttttgcccatttctttctttttcacttccttttttgccacaataatcacgttttcggcaactttttatcgcttttgcttgaccgtgcggttaattgagtcccagctgagtttggcactccatttccggcactttttcagcctgaaaagggcaagcacgccgctaattctattttccttcccatttctgaatttttacatcggttctgaccctttttgagcagttttgagtttgtgacctaaagcaatattttccatattttctgatttctatgctaaaagaaaaaaattccttcaaaatttcaaatatggattcataaaactcggaaatttgactttttatagcttttctggcaaaaattctacaatctgtgataaaaaaaaatataaaaaacaaatttaataaattgctgtcataataattcaaatgaatttggaattttttaaatttataactgcagcaattaatacttgttttatttttgcccttttttcggcgccactttcttagttaattattttttctcttattttctctctctcactctctcttttctgttcacctaattcattttaaatccttcttactcttatatttcattgtctctgtctctcttctctctctcacgctctttctttctcttccctttcacttggctcattggcctctctgagtctctctcactatatcgctgcatcctcagccaatcgacacaaaacggcgcggtcccatcgcatcatttgccttgccctcttctcgcctcactcggtgctaggtcgtttcctaaaaaccgccaccatgggcgtttcctaaaaaccgccaagtgggcgtttcctaaaaaccgccaccatgggcgttttctaaaacccgccaagtgggcttttcctaaaaaccgcaaccatgggcgtttcctaaaactgcaaagcaaaaatttcgaaaatatatctttcctttttaataaaatttttatgtcagttgtttgccaacgttataattaatataaatcttaataatattttacgccatttatttgccaacactatcatcattgtcaagcgcaataaaattaaaatattaatatatttattgctacttataaattctaactaataaaatttataaatgagctcaacacaatatttaatattttttcttttgttgtgctgcttaaaaaatatcagtggaattggtttcgatgaatttgcaaaaaatgctggtgcgataaatttagctgatcagtatcttaaaaaagaaataaagacaaaaggagaattattggaaaagcttgcccaaattggagttgaaataagtctaaggacgctggagagacatctttcaaaaataaaaagcaatgtttttcaaaatttgacaataaatttctttttattattggccatggagacgaatatagaaaataccaaaaaacgaacgaaaatgcaaatactgtctatgcctaatgcgaaacgtggttttatacatttagtaaggcgttagtttggtgaaaattattgaataactatagatgaagaccatatagactactcagaaccgtttgaatggcactgtgtcaaatcactccgagataagaaaggatgtaattgaatatttggaagaaactgtttaccaacattctttttctaatcatcacgataatgaatggtggtgtaagtctgctattttagtttttaacatgtagccaacattttagtgctttttgatagtattgaaaacataagaaaacacatagagaatgctattgctcctgcaataggcacccatgaaattgaaaaatggatgaataatttggatctagcagcagtcaccaaaatgtttcgaataaatataattgtgtgtgaacgtatacaagaacgaattttccgttggcaagtgtactcaccagatttagaaacatcggttagaaatatttccaatatgcaaattcatataatttttagctttcgaacctccaacaaaaggaatcgactgcatcaatatttttat

SEQ ID NO: 12374 - DNA, 5216 bp, Heterodera glycines
  unsure (1)..(5216): unsure at all n locations
tcgaaaaagtggtggggtttttagggccactttttgtccaccccgtgttcttatttttagaatcttaatgactgttcccctcttttcattcacctaaacagtcttctgtttttttaatgtgaaggcgtagaacaaattcgtatattatgatttgttaactcctcgcctcccttcaaaattgattgaaaatggacaaatcgtctctaattttcatattccattttttaggcttacatcctcaaaaagctcattgtcagtcgaagaaattgccaaaagcgttgaacttctgaaactctttccgttgtgttccgtcgcccttacgccggtgactttggcgagtgcgaagttaccgtcggtggtcggttgacttcgccattcgctccattgacctcacccttctgagtgtcgccacggcacagtgttttgggttgatccgaatgaaaggtatgtgcttcgtatcatttttaacaaagtttgcccctttttgttaaatttactcatgtgaggcgacacaaattgtccaatttatattgcctttttcagaattgaccctttgagattgtcaaaggagaaatccaagttcactccctttcccttcaaaaatgactgaaaatggacaaattgtcgaatttgattatttcatttccaggttgaccctcccaaaaagctcattgtcagccgataaaattgccaaaagcgttgaacttctgaaatcgctttccgccggtgccccttgtgcatgcgaagttaccgtcggcggtcgatgacctcgcccttctgagtatcgccacggcacagtgtgtttggctgtccgaataccctcgcgatttgtgccacggcgttttcaaaaatttgttgagaaacgaggcggccaaaatccaaatatgatgattgagtgtgagattacactgtaaactttgggtttttgaaaatgttccatcacatttttcaaagcattacgggttttcatcattgtaactaagttgttggtgtgatttttccgggttatcatgaaaactgacacccaaaaaaggaaagaagatctcatatgtctttttttttacattgaataattttttttttctacattcacattaaaatttatgcattgtgatttgttttgtacatttttaattttttggatatttaaaatttatttgtttttaagattctccgcatttttgacaatggacaacaaacgaggacaagaggtagataaaattttattttggtaaaaaaattttctgattttttgaaatattcaaatttgaattaaactaaatgagtttacctcgaaaacccccggtactaggtttcaggactttttaaactggaaaaatgtgaaaaaattagccaaaaaatttcaaaatactcttaactagcgcataaaaatcactgaaaaattttttaactttttttaaatttttaaaaactccaatttgaatttttttttgaattttcggggactgggaaacgatccgctccggggtcagtggcaggtgaccattggtcatcaatgcatcctatggctgctcaattgtaaagtgtattattttttacagattgttgcacaagaagaggaggaccaaactgttggtgaagtttctcctataacggtcggttgttttccattaaaattaataattgttggtcactaatttttatgggcccgctttcccgtcgcaaaagcaaaaaaataaaaggtcctcaaactcgaagttgagaccacttactaattgacctcccatgacattctttcgtaaacggtctgacagacagactgcatatgaatgcgttaatcgttatgagaaaaacaaatttgtccccatttttggtctttccattggaattgatgaccactggtcattggttaatccgatgcacttagtacgaatctggcctttagcaaactcaatttcgaacccgaacccggattcaaacattttttgaaaatttaaaattctcattttttataaatattgcttgttgaatgcagcctatgtctttttccgtttttatatctgaatcccttggttttttcttcatctttattgtacaattcggtcaattccttggtaatagtatcggtggtagcaaatttccaaattgttttctcgagtgttggaatcagggttcggggtttgatattgagcctaaagaaggtcagattcttaataagcgcctcggattacccctgaaaataattttctaaaaacttatttaaatttttttcgggaccaataatctctatcacttgcgtaatcgtttatgagaaaaaaattgtccccgtttttctttccattgggaattgatttttgcatttgttccatttgctcttttccaacccgcagaaggngaggagacccattcaccatctctgctgctatagccaccatttacccaaaccaaagctaaaattattcccattttcgtataattgttaccctgaagccatggactgtcccaaaaaagttaaacttccccctgaactccttacggagttggccaattgccttcattacaattcgctggtatggcatccgaatttctttgtcctttgaccattttctcgccaaaaatcaaaagaaaattcttcgcaataaaataaaggtaatgagttttcctctgcattaaatattggaaatgagaataagtgaaggtccattagagctcattagacattgtgtacttaatttttaatttaaacattttctctcgggtctttttcctcatcttaattgctgtttcagagaacagagggagaaattgatgctctgaaggaggctctcgcaagtttggagcaacgacacaccttggacgggttggaaatcgaacgattgaagaagaatatcagaagtttgtgccgccgcaaagcgaaagtacgagtcaacagcccgtcagttcggtactgtaacttcaaaaattgtaacatttaatattttttttgaaaaatttacaaagttgcaaaaaaattttttaaattttcttggcggggaaaccgtgcggggaactgagcccgggggggagggaatagctgctaccgatttaacattggccctaggtcagtttcggtgatgcctactttgattttctttttttttaatcaaaattttcatttttttgtattttatttgaaaaagccaaattccgatgcacttatgtaaaatccatctcaatttgtttactaaatcatcaattaaattcatatgacaaatttttatttagccgcccattgatccgccaattttggagaaagaagaagagggagaggagccagaagcaaagagactgaaagcaaacgacgagtgaaggaacaaaagggaaagaaaagaaaagggcacggcacactttgacaagaatgccatttgccgatctctgtacaacgaaacataaaggaattgtttaaataaagcataaattaagtgattttaaaacaaaatttgttggtgaaattcactcgcattttcttgagtctgaagtataacaccagggaaggcattccgaggtccaaaaaatttctgaattccgtgccatccctggtatgcaccaccaaccatttggcccagtggtaggaaaagggacaaatgggcgaaagtccccttttattttgggtacaataattggagaaataaatgaattcgtttgccataacttttttcttttatccgttgccgcgcataatttggaccgggaaaagaacggacttttgctttagggaagaaacggcgagtacaaggaataattattccataattggctcctcattagtggaaacccgtcagtgatacgatatttccaaaagtttaagtttactgtaattggtataccgtaggtagttgtttcctcttcatcccagtcacacaaaaattcagatcaccaaaactgactgcccctccttattttgtaccgtataccatttttctccattagtaccatacataatttgatcattttttacactgcctttgccgcgagcaaatcttgaaaaattttcagagcgttgaatttctgaaactctggcaatcatgtcaataattggtccggaaatttttttcttaatttttttctgaaaattcaaattcttttcgatatgcagtaattgtgccggtaatttcggcgggtgagaatttaacttcgggtaccgtttttccaatttttctgcgttcgacaccttttcctcttacgttgaccccttcaccattcactgacccccttccccctgcgggtccactgcgttttagcgccagcatgtttttccactatagctttctataacttttttcaatattatccaaatccaacatttttgatatcattcgaaagcttaacacgtttagaagctttttctaagctactgcttcgcgattagacaattatcaaaaaagttatacactgaaaattgcttaaagtcgaaatttttcaagttttttcttaataaaattttttccaggcttgaaaatacttttgattttggtaaggctaatagagcatgttaaggagctttcgaatgataccaagattgttagatttggatgccaaagaaaaaagctatcgtggaaaaacgagctggcgcccaaacggtgtgggtccccccccctgcacaggtatggtaaataaatagtgcatctgtttttttaattataatttcttcaaaatatgtagtaaatttttaaatttaaaatttttttattgtgtactgattgaattggtcacagattcctctttaaattctcgaatattcccatgtccgcccttatccgactaatgatcagtgctcgcccctcaggggcgggatgagttcactttgtgcgccaaatctctcgcgctcatccactccgtccgtctcttacacaatttaatcaatttacgcctctgggaaaataagggaagcagtgaacagttagttaattgatcgctatggcttggtccgttgccgcattggacttggacttgctgacctattggatgctaagtgggaagagttcaacgatgaaaacttgaaaatttaagagattttcgagattttttgtatccctccccccggcacagatgtttcttccgcctttatgctgtcggcagcaaataatgttctgttttttgtggtgagaaataaatttaaaaaatacaaataggttttaaatgattcaatttcactggttaatttaatcttttttaaatttattattctattttttgcctagtaattttanaatttt

SEQ ID NO: 12375 - DNA, 3807 bp, Heterodera glycines
agtctctctttactcaagaatggcacaaattgtgccattactcagcgaaccaccggaaggagggtatgggcgacaaatcgggcgtcaaaaatgctgacgtatacctaattttttataagaaaatttaaagaaaaaagtagtatttcatcataaaccttgaaaaatcgttggaaaatttttttcgaaaattttgttttcttgaattttaaaatttatgtttgaatttttctttttgttagggagagggacgggaaacggtgggggaatggatgtagtacacccatttggtcaatgatcagtatttaaaccccccaaaaatttaattcaggaacgtaacattaaagccgggattggtgatcgggtggcctaccgctgggagggaaacgagccaggcgacgagcggacaatcacttaccaacaactgcttgatcaggtggtgttttcaatggcaaaaaatgataattgagcctattgtagataatgggaaataattttctcagaattatgccatgttacctggcttaaaaagggttgatggcttttcgtacaatgggcagttagtttgtacaatggagtttcgtacatttttaatttccaattaaaacctagaatttctttctcaaaaagaattaaaattattatttttttctaggaaacacgaaaaatttctgctaattttttcgttatttcaaatttaaaaaaaattagaattttttaaatttttttagaaaaaataaatcattctaattttttttatagaaaagattaaaaggttttaaaagtttaataggtccgctttcattttttttatagttgccactttttgagaatttttgtcttaaatttcaaaaattttaatgaatttcttttaaaatccaaatttttttgactccggatgcttctttcataggtctttattttactgcacaggtggtcacgttagctgccgtattgcgcgcccgaggcgttcgcgctggtgacgtagtgtccatctatttgccaatggttgtcgaattgccggtggcaatgttggcatgcgtccaggtggatggtggcaaagtgattgggattttgctccgagaataattggcattgaatattgatcgaatagagaaaaccaccctttgtcttttttttgcagctaaaaacgcttgcggaccaagcggccgaaatgtgtgcggagaagggccacttgcttaaaatttcaaaaaaaaattactgaaaattttcatcaaagagtcgttcattgtcaaatggataactgtaccgacgactcgaccgttcaaatgaaaaaccccagcaaaaaatgtcaatttgattcagtttttcctatttaaatttttaaaaaaaaacgaatattttgctcaacaaattttcagttttgtaaatttcactttacctttaatgagtagtaattaattaaattgtttgaattttactcctttataactagggcttatttttttggtttttatctattttttctgagctcccagtggtctgaaaagcacgaaaaacgtataacttgaggttgtttttatgctacttttcgcgttattagggccaattctatgtttttccaaaatttttagaacataaaaattttaaaaatttgaaaaacctattttggagcgccacgggaccgggacctggtagcggacaactgagtaccaaggtcccggttttgaccgggaccgggactagtcccggttttttcccggtttttcaacccgaaaaggtcccggtcccgggtttgcccaaaattcccggtcccgtggcactttaattataactttttttcttttctctatttttttgccaatttttgtattattttttgctctttttttcactgttttcctcctccaaaatgtcccaagaggaattgctgctgtcgttccaagatgaaactgctctggactggttcgttcggcttgcccatccgtcgttgtcctttcgttctggccatgccgaattggacgcactaaatgccattgtcccgggcgaactggtcgaaattgttgggcgggaatcatccggcaaattgcaggtggaaaatgaatcaaatcgctgaaatgccatagatggtggacctctttttgaaaaattttttttttttaatttttcgcgaataaaatatttaggaaacccgagtttgccaatattttggtccatatttatcaattttcgagcattttagtccatataattgtctgccctagtaaaaaactaactcattctttttccgataaaaataatcgtcaaaaaagcaacaaaaaataagaaaacacattcctaagaattgaaaaattttaaaaaatgatcctctaaaatcttttttttcttgtgattaagtttttaaatgttttggctaaagcgttactaaaaatttaataaattttcccatttttgtgcctatttaatccccattttgcgcttgtttctgcctttttcacgatttttatgcctaaaaaatgaagccctacttatggccaaaaatcgtaattctctgttatatttttcacatttaataatttttttttatttgtaaaaaaatagagaaagcgctaacgaatgataccaaaaaatgtttaatttggtcgaccatttacaaaagttatgacaatttaaacagttggccatgactttggtggcggaatttttgttgtgcgaaagcaaagcggcacagcaccgggccgtggttttggatttcaacggcagcttccgcacggagcggctaatgcaaattttggtgaacaaaaggccacaattggaggaaaatgtatggaaaatgaatgggatgggaatttgtaaaataccgttttccttcaattcagtcccccccccctctcaattagaagcgccccctgaaataaaggcctcactttttaggtgggggtggaaaataaagcccctgggggcggagtagctcagttgggccccggcacgtttgggccccagcgggtttttggctataacttttttctttgcaaaccaaattcaacaatcttggtatcatttagttatggccagaagaatttaaaaacccagattttccaacctttttttgccataaatttgttcaaaattgacgaaattttttcggattttgcaggctaatagatcatgtgaagagctttcgaatgataccaagattgttagatttgattgacaaagaaaaaaagttataatccaaaaacatgctggggcccaactgacgtgtaccgcccgggggctttattttaggaaaaacggtagataagcaaaataaatttgaaggaaagtgccatcattggacatttggacagagtttactacgcgcgtgtttctctcgccgaagaatttgaacaatgtttagcagaactgaaggtgcggtaatgccgaccgaagacacccctttttctgaaaaaaataattaaaaaatttttttataactaattttttttatttgggttttcatgctcagatagaaattctccaaccctaaaaacctcaaaaaaatttaaattttttaaaaaaaacggatgaagaactgtgataacaaaaatttcttagcaaatggtcgctgtccttcgcttcgtcccctttatcattgtgaacaaagttggcgcaatgcttcacaacctttttgacgacaataacaccgatgatggtcagtcagttcaacggaaattcaaactttgggaagaattttagggatttgttcacgaattttgtccaaaaacgacaaattttgcgattttgagccgtttttagcagattttcatcaaaaaattgtggattttttggaaaatttgggtgaagcta

SEQ ID NO: 12376 - DNA, 1458 bp, Heterodera glycines
taatacgagaaaacatgagaatgcagcaaacatttatagaaagttacaaaaacaaaattaaacaattaattaattcttttttggtgattgacttaaaccagagattttgtataattttagactttgtgtttttgaatgaaaccaacaattttaggtttgctctaacatgagcaaagttattgaataaaaacgaggaatggttaagtgatttgactcattaaatgcattagaaaccaaatccgcttccccctcaaaggacagcgccagttgaagcaaatcctcgccacactgaaagagctttgcgcgagccatggggcaacagtggtgacgattaaccatttgatggattggcgcggatatccgaccccggcactgggaaacgcatggatcaaaggcatttcgcatcggatatttttgcaccgacaaaacaatgataatgccgaaacgaacggacgaaccgaattcagtgcattaattttgagcgaaaaggtcgaaaaatgagtcggcagtttataaatttcaacaaaattagctggacttttaaggttccaagtggaaaatttcgcttctcattgacgaatcgtggatttgattcgaatctttgaataccaaccaacaaaactttatcccccgaaatgaatcacattatggccaatgccaatttgaatgccgaaagcattactaattttcttgctggtattttcgaaactatgaaacgcgatcttattttattttgaaattttctattttattaattttgattaaaaaatttaattaattttcctattcgaagcacatccggcttgtttaaatgctaaaaacaagcatttgcgcgaaaaggtcttctggcccgcaatatgcactgcatacatatgtatttgggaatgcccaattttattgttcggatttaacatttaactatcgcgctagcatcggaacggataaataatataaagattaaatgagtgtggttctattgcattttatgagtccaaaaactaacaaaaaactaatttgcttaattagtcatcatttcttacgattgccaaaacgcatagctttaagattttgtgttttcaagtgataccaaaaatgtacggttttagttcggatattaaaaaaagttatggtcatagaaactcaggattgatagatgattgggacccataaacttttcattggactcataaattttgattgtactcattaacacggtgtgtgcctaatcaatcaatagtcaatgacatcatcaagcgcctcctgcagcttttcacgcaaatccttgtgatcactgatcggactgttgaatgtgaatggcacttcgatcagccaaagtgccgtgtaaccaacgagaccaaagccggtgatgaacccgctcaggcagccttcgttcggcttaaatttgattgggcatccgcaacagatgttggcacatgatggaccaggccggccagggag

SEQ ID NO: 12377 - DNA, 3296 bp, Heterodera glycines
gcgtaccgcgtgcgcaagaagcgccgcagcttctcctcgcttaatgtgccaatcaatgccttcatccgctcggtgtcctttttgtagatcgggtcaaaaagtggctctacctgaaaattgcatccaaaaataaagcatttttaactgttttgcgccaaaaatgactaaattttttccgtgttgggatcaaattttcaaaaaatgatggttcaatggagcatggcggtgcaaataggcgccgccgagaaattttatggcatatagaaaattgtgcaaaattttaaaaaatttgcccaaaaatggggccgatcggcgtatgcttatcgcaatttttattaaatatttactattttttctgtaaaaaaaaatatgccgttaactcacttcttcgcgttccaattcattgtccgatttcagtgcatcagcaacaaattccttaattattttacaatctcacagtgttttattgtttttgggtttttatttttttgtttttttcattaaaattgtaaaaccaaggctcccaactttttttttcaaaataagacaaacgaggctaaaattaagagtttgacctcaaaaatatgattttttgaaaaaatggctacgttttagaaataattaaaacaggactacaaaccgaaatttctcaaaaattagcaatataatcagctcaacataaaaaatcattaaaaataaaccactaaaaattagcgaaataaatcattaagcacagaaatttaaaaagtttaggggaagcctgaaataaaaaaattttagaaataaggacattttaagtttctaggacatggcccctccaaataagaacaaatcttagaaataaggagcggactcgggccttcacgcatttatcatcagggtcagatttatattttattatttttttgaattttaatcgcatcaacctcccatgtcacggttttcacatgaactttataattgctgttgttgtccttagtgctgcagatgacttcaactccaataagtatcagcagcagcaggattaaaggatgacggaattgaatcatctccgaaaatgaaattattttatttttttttaacgagacataatattttaaatttaaatttcagatttggtcgtgtcatattagcatgaatacgaaaatggaacaaaagatgaaaataaatttttacatacataaacaatttttgtcaaatcctttagcagtgatcggtaggctgggaatttaagtcaccaaaaatcttcaaaaagtcgactaaaaaagtcataaaaattgcaaaaggtgacaaaaaaaaagtcaagaaaaattgaaaaaactcctgaaaaaataggcgaaagttaaaaaaattccatttttaataatttatagaataacattttgatcgtatttttaggcacttaattttataaataggtacctaaaataagcataaaaagagattcttccacaattaagaaaaaactcattcaggtttcattgccttttcaccgatcaaaatttcatttttcagaattttttttttcggcattttcttcgctaaaattcaaattttgcctcaaaaagtcaaaaaaatcatgaaaaagttgcaaaaactcaaaaaagtcataaaaatcccaaaaagtgtaaaaaagtcacaaaatatgcatttgacttaaattcccagccctaatgataggcgccgaatgggaaaaattaggcagaatattaatggaattatccacaatttatgtatatgtatagcgagcgaactgtgttaactgctttacattttcccgtgctggctggcacaaaatgaggggggggggggggcggactgactggcttggagggacagggacgagggctatggggccaaagaccacccaaacgaacgaaaaaatagaagaaaaagcggggggggggggggggggggagcagagaaaacgtactggaatagaaaaaagaccaagcatatccaatcgattgctaatgttggttaatgactttttaattgaaaaattttccaaagaaatttttgtgacaatttttcgtaaaatttatataaaatcatcttttatcgccgacaataaaataggtataaaatttggactgcaatttttaatatggaacaattgatgcgattcgcgttggggtcctttagtgtaaattttggccagcacgggaggaaaaacgcggttttttctatttaattttttaaaagaaaatttctcggagaacggcggatttataaaaatagaaaaaaatcgtagcatcaatttcactgccaattaatgatgggctgattgatagcaaagaatatcttctgctggatgacatcattcaaatttacgtagtgcctaatataagcccattttgcaataaaattacttggttcaaatttgaaattcgtttgaatacaaatgggaatagcgtttggaatgcctggcgatatccaatattaaaaataaatattttaaaaatatttttaaataattattcaagtaccttgtgaagtataaaatgggtgcgcgcattcgatgatgcaccaatattctatgaaattccgttgatcacctgaccaaaccaggcagtgactaccgtaatccggtgaaatgttcgccttccctaactatcttctgcctttctgtttatggtacctgccaattaaataatgaattgcgcttttacatttatgctaacaattaaataataaatgtttcatgcatttttcatacataataactaggaaccggatttgtatggatttccatattttttgcacacttatttcggcctaaaaaccacgtaaatagtgtttttagcttggtttgatgatgcttctaggatgccttttcacttccatatttttccatatttccataattgacagccatatttcggcattttcacaaaaaattcgaaaaatacatccctaaagatggaaaacttttggaaaatactctctaaaatagaaaaatttttgggaaaatttccaaaaattgcgacaaaaatttttcatcagcaaaattcttgtaaaaattttactaaagtcaccttctaacttcaatttttagtaaagaataaataggatacctcatttatcaaacactataaatcatgtaataaatagattatttttctttttttgacaaaaaaaattatggatatatgaattttttcaaaaattcaacccaatttttcagaagcttattgccccctcccccccctccacctcttttacaccggcccccctcgatgcgaaggggtcccccattttggggcactttgcggacgaaggggggggggtcgacc

SEQ ID NO: 12378 - DNA, 1574 bp, Heterodera glycines
  unsure (1)..(1574): unsure at all n locations
atcggactcatatatcttcttttgcggaagcgattccatgcattcggttgtcttcctcggaatccctcgggcgggattccgccgattttttgtcacatcattctccgcagaccaaattgtgttccgcgcaaaaacgtcgacaaccctcggcctctctctccatctttctccagcatttccctgatttctttccctttctctccaattttcacatcccatttcccgtcgttccccgccaaccagatttttccatccttcctctctttcatccttccttttcactcttatttcatcctccttttctcgattcgcgagggctttggtcatgtcccagggttcttccacttccgccctgggatcaatgacctgccctatcactcgtccgtggacgtagggctggttgatcgtctcaagaatcgatttttttgcgtcggcgccaattaacggtcctttttgattggcatttttgccaacttcctcctggtctttcttggctgctccttgcgcttcttccctttttgtcttttcttccttttcctcctcagtcatttttcttctcaaaattccttttactacactctgccctttctctttttctgatgttttgcgcaaatcattttttgccttcaacgcatcccttcgctccttttttcgtaatttttctcttatttcttcaatttttctttcagcttcttctctttctatgtcatcttcccctaatgacaattccgaatcacctccttctttaccttccttggctttttcttcggcatctttcttcgctttttcttccttttcttcggcgtctttcttcgctttttcttccttttcttcggcatctttcttcgctttttcttccttttcttcggcgtctttcttcgctttttcttccttttcttcggcatctttcttcgctttttcttccttttcttctgttttttgctcttcttttgcattttcactttcgagtaagagaattcgctgcttcaactctcgaatttccctttcccgttggctttctgttgccgtttcaggaaactgtaccattttttgttgttcagaaacacggcgttgctcaattgaattaagaactcggacattgctcctctcaaattcatgaagtttcggattgtaggggcgttgctgaatgccgaccacagtttgttgttttttcgactgttgctcgggttgttcttctgcactttcattgtcggattcatctgatgatatggacaccaatactgtaggtggcgtaggagacaattggtttcgggatttacgagggtttttggggataaaggattcgtgacgggacattttttgcaggattaatttttctggctgtaaatttttggagtttttagacgaataatatggtgaaaataatgtattatgcatagaaaattgtgaattgtagcattntaatgaattgttatgaaaaatangcgcatttcttgngatttcctccgtgctttcaaacaaatacaattaattcgacgctttcgtccccgtattccctaaagtctcggtgagtcactccaaaattcggtaagaacatttcttcccatccaaat

SEQ ID NO: 12379 - DNA, 1204 bp, Heterodera glycines
tgttctttttttttttcaaaaatagcttcgcttggtagtctggggtcaaaccccaggatttcatagaacggtgatgtccaatttgcgaattattgaagaattatacgcaaaacaaagtattggaagggcagaagcccaatctttcccccctgtcgttgtaacaagcatatccaccaatgttcggttgtaccgttcaacttgtccattagcggactgatggtacggtaccgtagtttggtgtttaaagccccaattctcagcgagtgactcaaaagtcgcactcaaaaattgtgtgccgcaatctgttatcacaatttttggtagcccaaatagacatagaaatttttctacgaatgctgaagtaacagttgtcgctgtttgttctctcagtgggatagcggccataaatttggaaaatgagtcaataatcattagaacgtattggaatcctcccttagacgttcttaggggtcccattaagtcgagatgaagtctttcaaatggtcgagctgccggttctattggacaaattggttccgcgcttttattaatgccaataattttcctcctttggcatgcgtcgcagtttttgacctgatttccaatatctttgtccatcccttcccaaaataaacttcgtctaattttttctttcgttcgtttctcgcccaaatggcctccttggaaagggtcagaatgatattcactcattacccggcgtcgcatacactctgggacataaattttccactctcccctatctgtaacgcacaaaagtcccccaaaaagcttccatcttccgaatgtcccctcagaattccctttttcgtccgcattttttattaattcgcaaattctctgcgattctttgtcctgtttttgtgctgcgatcatttcttctcgtgttatcttctggtcgaatttcaatgaattaattccttgatccgttttgtcgcccaaatatcgagataaatagtcacagaattggtttcgttttcccggtctgtgaataatatctacatcgaatgccataattgccagctgatatctgcttaatcgtccttctaagtcctttcttcggaatagtgatgttaatgctgaattgtctgtaaccaccgttgaccttccagctccctccaaatatgggcggaaattctttaatgaagcgcaaatggcaagtgcttctaattccactactgaatat

SEQ ID NO: 12380 - DNA, 1794 bp, Heterodera glycines
cgatgcgatggatgtctttccttaaaaagtcgcacttctcctggtctaatgaaagcttcttcgttgtcactaataattcccttcaatctttccattgaattaggactgaatatggcctcattttaaaggaaatccgttccaaaataggcttaattttgtcatcctttttcgggaataccaaggtttcgtcggtccaatccgcctctggtggaatttggtctctttccgatttaaattttccccattcttcgtcattcattagcatgtttggatcgtcgggattctgatccctttttaacgaatttatttctgctgagtcggaaataggctcaataaatgccaatcgcgagccggcgtggactttcacaacacaattgccgaaattaagtaatcgaagcggaataactcaggttgacccgggacaaattaagcactttccgacacgaataggaaaatagccgtgttctttttcgacagtgatgaatgtgtcctcgggatcaaaatttcgatttatctgcccccacacgaatgagtcagataatgggggaagtgtctgtgtttgtaagagtcgaacttcggttggcttattttcgaagtttattgcagcgatcattggaaggtgaatatggccgactcgaacagttccctttttaaaattaagcccaatttcctcttctcctccttgttcactgatatgatccatcaaatccgttccgattatcgctgcacatgggcatccttcgtcttcgcttactaatatcggaaatttgccttcaaattcacccattttgatgtctacatttgttgacccaataaaacggattgctgtcgaattagctgctcgagcttgaggaaaatccccccggcggaccttcagaaggtatttatcagcagttgatgacttaatgtatgtgacgtctgccccagtatcaaataatgctctcacaactcggccattcagaaaatattcacataacatctctttttcttcggtcctgatcgatttatttgacagatttttggcatataatttaaaacgtatgcttttgtttcgagtaacgcttcttcagggggtgccgttggttttgtttgctcccgtaattccacttccattaccattggataacggacttggtccgcaatttctctgcctgatgaaaagcagctcaccaaagtggtgataagcgagcggattagttggaggggaagcattagtgctgaggcgtataatttagcctttattaggagaacggagcagccaatgagaattataatggcaataataataaaagcggtccatttaatatatttaacgatcccaatcggatcttccatccattccttgcccttttcgatggtttcactggctttttgccttaaattttctccttcctcttgcgccgcttcaaccaatatttctccaaccgaaaaaattccagagattgaatttccattgtcatcagtgttgttgacttccattgcggtgatttcaccgaaatcaagttcgggtctggtcatccgttttgacaagtctttaagacttttttccaggcgggcttgttctgactcaaaaacagaaccacgggtgatgaaaaggaaagggttttgccgattgacgaatggctcagaagcaaagcggtgatcagcgctcgtttgttggagtgcttcggaagttgcattaaaattcacggcaaacggattacttccgtccttatcacaattaatttcggttccctccggagtcaggtctctcgttcagggttttacaaataaaattttcttggctgagacaat

SEQ ID NO: 12381 - DNA, 4249 bp, Heterodera glycines
atccgcgtgataaattggtgcagatgcgtccgtgcaataacagccgggtttcataaatgcccatgccaatgcgttgacaacattcatgcattgaatatacttagcctttttgcaccaacgaaatttgcatttcttattcggcacatcggtatacctattgataattagggttttaagaaggtaataatttaaatataccattcggcaaagggctggtcaaaggggcacgaatgtccgcaattcaacattgcatagccatcagcatcgttcaaagggattgtgcaaaaaacacatttgttcgacttctgtattcttctggtacttctcgattgtttcgatgatggagtgtctataatgtgggaataaagataagtgaatatgttacacttttaccgaagccctcatccagttccttcagtcgtacagcagcacttgtaagctcgctgtcgccagttggatcaccagcagcttccagttcctgcggcgcttgcagtggttcttccgactgaaccgattgcgctggcgacacgctttcacgagctgacgaagagcgttcggatggtcctattgaggtagacagaaaatttatcttgaaagtggacaaataataaactcacttccgcgctgtctcaacgtgagttgaccattcagaaaattggtccaccatcgaccgtaagtttgcggcgaaacggcgtttttgccaaattgacgcttcagtgtttcgaacgcttcttgtttttgcgctgggcttctttggaagcagtccaggaggaaggcgtgttgttcttcgttcctcgttggagttcgtaacggctcgctttcaccagttgggtcgcctgcagcttgcaactcctgcggcgtttggtgttgtttttccaactgaaccgcctgggctgaaggcccgctttctcgctcggagaggctgcgttcggatgctcctattgaggttatcaggcaattttccataaaaaatgtatataacaaactcacttccgcgttggctcaacgtgagttgacctttcagaaaatgggtccaccatcgaccgtaggcttgtggcggaacagttttcttgccaaattagcgcttcagcgcttggaaagcttccttaatctttgttttgcgacaggacagaatggctttgcaacttttttccgcatcttctactattttcatcgccaaacgattaatttgttgatcggacgcacgtttatttagtgggcgttttgccaactaaaagcaagaattttagcagttttgcgccggagttcacaatttttgccatttttggggtcaaattttcaacaaaaaaaagtccaatggtgtcaagcggtgccgacaggcgctgccgtgaaaaatttggaaatttttatgatatatgataagaaaatctccaaaaatttgcaattcgggtccgtggtttagaattggccaaatggatgccggattcatgatcaatttattttgaattaaaaattttttcaaaaaggggggggtgggaaactacagaattaccaaagcaaaccattattaaaaaggtaggtatcacaaaataaaccgaaaacaatgataatatttttttaatcgcgataattttactgttttggcaaggcccattgcgatacgctgatctgattcgtctcccaaagccgaatcaaaaaagatacgctcgccaaccccaccggcgacaaatgtgataatacaggcatacatgtcatttgttttgtaatctctttttcttttaaaaatggtgtacccgtctgcaccatcaaatggaattattgaaaccttaatacaataacaattaaagcaggacattacgccctaaatacctagacaaagtgcgcgaatcaattttaagtgtcgctagtcaagaaaacccattatttttttaattttccaagcggcaaatgacagtacaccagtgctacaagacttaattttcttaaacattttctccaattgcgaattgacatcttttttgaaaaaacgccgtaaaaagggccggagatttcagttactttaattattaatttgaaaaattattgaaaaaaatccacgcattattaccatatcaaatttatcgcagtgcattgggttcagccacgccgagagggtgtgacatatctcgtggatacaaattctcaccagattatattcattttcattttttgcagcaatgaacagatcgtcaaatttttttgattttgccgcaacttttgtccccgtttttttgcctgtaaacacgccggaacagttctttttgctttccaagcaaaaaagattaggagaaagctgacgacaaacgctccaatgtacgcggacgtagtggaaaattgcgagacgcttaggatgatcggctgctgatgccaattcattccgttgagccttccgtcaatgctttcgatgctttgtccgatggtggcactgtccgtgtcgggcattgtcatcctcagtccggtgctaaagcattggttaatcattcgaaatgccaatttcagcaaatttcctctttcaatttcaatgtgacgttccgcgtattgtttatctgtcgaagaaaggattttttaatggattgtcaaaatcgttctccccacgggttaccccaaaaacgacaatgacaaaaatggtgaaaacgacgatgaatggtaacgatgaaaatttctgggaggggggcctcattgaatttctgaataaaaaggatttttttggatttttctccgtcgttggcacttttttaatatgtaattagatgattagatagtcttttgctttagaatattaatggagatagagtttaaactttctacgtactaggaatcgggttttaaaaggcgaaaaacttcaaaataagggcgaaaaagttccaaatttaggtaacatttttaaattgctgttttttatgtgaaaacaatttcaaattaaggcaaacaattttattcattgcttacagttgcaaatagttatatatattcgaaaattttgaatacatataaaaaacaattaagtggaaaaatttttataatttttgaataaatcgccaaaaatgtgatcgcgtcaaaaaaatttttaaattgtatttttgtcggaccggctcagttcggccccggcacggttcgaccccagcggttttttcagctataacttttttctttgtcaacaattccgatctctactatgtacttccattttgcaatcgcgaaatgattggcggcaaagtgcccgactcgttttagttacgcttcatacaataattttggctcattcccaatttacacgtccaatatataatcattctcaatcttatgaactataacttttttcttaattggccaaagcataggttcttggtatcaaaaaaaaagcttaaaagcagggctgccaaatgaccagatttacgatcttgagtcaatttttattgaaaatttaagaaaaattttcatagattttacgaaatcttatttaggaaaaaattaaatttaaaaattcgcttaaaacgatatatcaaaattattacaattttatttcaaatccaagaataagcctaaaataaggagggaatgccaaaacaaaggacaaatcttagaaaaaaggacacttggcagccctgtttaaaagtctcgggaattatgtatattaaattttgacttaaatgcaacacacaaaatttatgcttggaattatgtaccgtattttctctaattatatgcctttcaactgatttatttcgatggaaaatttttgaaaatttattttgaatatgtctccaaaaatgtaatcgcgcaaaaaaaaatcatttttattgcattttttaaatttctgaattatatatgaaaaattcgaaaaattccagttaaaactccccaaaatattgaaatcggaatatgaaccttattttacgttttagaaagttggaatttttttttaattttgaaaatttttattttttgggaccgggaaatttgtgctaatttttgtaaattcatactcagttcagggttggacaatattagtgtaacaaagcttaaaaaataaaggaaaatcgggataattttatattttatttggttttcttacttaaaaatgaaataccagaaaaggagaagtgcacggagcaaacccaactcatactaggccatcgtactgccccaaagaaacattctgaggggggaggggagggttaggttcagatccgggtgagtaaaagatattttgagcaacgagcaacttatgattccgaaaattatcaaa

SEQ ID NO: 12382 - DNA, 1506 bp, Heterodera glycines
ctccccgccgaagatggttcagctacgattgtgccttcatcggacgaggcaccgacaaagtttcgacatcgggtggcgggtgcagtgctcggcgcaacgatcgtaactcaaccgtctggcgatcgacttcagactgcaacagtgtgatggcaatgaccaagccatcactggtggaattggccaattcgttcactcccatggccatttgtcccacactctcttggacgtcgtccagtgccgtcctcaagcgtttaacaccgccgttgtatttcttgagtgcttcatggatggggactgccagatcgcgcttcttcttctagaggaaatggacggcctcttcccgctcaatcgcccacttgttcacgtgaccgtgaagaagttcagccatttctgagtcgacaggtggcggtggcacaacattgatcggcgaatgggatggctgcgtagtcggggaatcggatgaagctgccgcctttggtccctttttttcctgttcttcccgtgggggggggctcgtcagggttttggcacttctttgggcgtcgggccttcccttccggcttttcattcgtagctgaagcgatcagcttttccagttccattttccttttttccaaatcggcgagctcctgcgagagagagttgggcttggcgggcatggcacagaatgtgtttggaattggggagtcggagggaaacgaatgatggcccattcttgcgacccatggcttaaatagcggccaattgtgaactagtccagagagcaaaaatggcagaatggcagaaaattttgagcggccgtggagaacaaagagcaaatgaaagagcagggcagggaccagcaatagatgattggccatcgacaagggcaacagagaatagtgcaacaagaagtgcaccagcatagattcataggatgagggggccagagatcgtgagttctcgaccaacaccgatgcggtattcctccgcggcacctcgactcgttgaatcaccatggggcataacgttgatcaccaattctcgggaccggggcggatggtcaattctgtcccagaacgcgaagtgagacgggcgggggcgtggatgtgggcgtgttgacaagccccgtggtgtggaaatttggtcaggggccacgacgctgatcatttcgattgggaaaaaatcatggtgtccattaccgccgggctccatcaagcatggggcagaggggtgccgaagagtgatgtcatggcgagagcggtacagctcggagatagttgggccacgggcacttccattgtaggcaccgagacggttcgcaccactttggctcagctcagatccctgaagccgcacattcctctcacgtgggtacagatgccttgtcttgagttcgtagccgcgactgtgcagtccctctttgtagaaatggtgaattgagtggcgcagaaacagcttttatagagcagccatttggcaatttttgatctttggcgagatgaattcatagaaatatttgaaaaa

SEQ ID NO: 12383 - DNA, 2531 bp, Heterodera glycines
  unsure (1)..(2531): unsure at all n locations
gttgatttttgaataattttacatatacaaaattttttattaatattattaatttatttaaatataagagagatatgagggtgatgggcgcccaaggttcnagatatgacnccagggtgacccgatttcaccctgaaactccaaagggttcatttcgttgtgacaacgaagcggaccccaggagcttcaggggcgagagtagacagaataaaagatatggtttattataaaattattttcattaaaacgtatataatttattttataattgattaattctcaaaatatatttttaattcataactgattaataagaaattcaatagataaaaaacatggcatgaaatgaaagaaaatatgcttttctattattttggtgtacataaacggcatgaactttgctgatcaaatagcgaccgtgctcatccggtgcaattctgctgtccggatttccttcatcaatttggactgccaacttaaaaggcggattgataatttttattagagcccggtaaaaaaatttccggaggcgggagcaggagttaaaacttttctgggacgggagtcccgatcggggatcccataaaaatcccgctgccgttacaatcccgttcaccaaaaaaaacgggtgccggaccggaaatctcgtaaaaatcccgcgggggtcccaatcaccaggctctgattcttattattatacagaatttcacgattcaatttttatatttcgcttttctaccgggttcggcttggtgcgtttgattgcgcgttttctttgttgttttgccgtgttttttgcccgcttggatgatgttgaagtggcggtgaaagttgaacttcaattcccatcatcaatgtcagactcggcaccaacaagttcaacagttgcaccaatgtcgagaaatgccgaatttgcgtcagggtcccagtcaatttgctcttcggtctcatcgatttggaaattttcgacaattgtgttactttcgttgtcctgaacaaatttccagctcaagatcatttgttgaaaagctatttgttaacagattttcaataaaatttctaagtcctagcaaatttttaagaaaaataaagaatttatggacgagcatgaaatttttggaattaaaaaaaacaaattttagccgttctttctaccgtctattcctacgattcgaccaattttcctcacaaatcgagattgatcgatcataatttgattatctaaaaaaaccaatcgtattgcctatgagatttttttgcgtaaaatttcgtttaatttctttttcgatcgacatttttgctcaaattttctctggcctgaccccctcggccttaacaaaattaataatacgttgaaagattttttttgaaatcatttaaaattggacctaatctccaaaaaccggtagcgccttcgatctccctatacaaaatatttttaattacttagttttattaatactttgagatttgacctgtcgtgtctacatgaatttgttaagatttaccaaattaatatattttttgttaattaattataattattctgtttttgatttaatatttaccattctgaaatcgtttggccaaatttcattgatcccgccggaggtgcccttgactccttcattacgggcaaaatcattcttggtgatgccttggatgttgtcatggtgtgcctgaaaagatttatgtgtttagtaaaaattaattttcagaaaattctaaaatggcttattttttgaatgaaatttcaataagcttatatattaaatccactttggaaaaaaattaacaaatatcaaagaatttagaaaaattatgacagccaaaaaaacaataccattgaaatttcttcgtaatccagaccgggaatgcgcttcagacctccgcaacgtgccagtctgcggatgacaggcttggtgatgcattggatgttatggagaccagtctggaaaataggaacagacaacagttattttgggaaaaatttaaaaaaacgaaaacgtcattttacatttaattacataatttatttatcataagtattaattgtctcgaaaaaagcaccaaaaaatcgcaaaaaaggcatttaaattttatgaagagacttaaaacgtaagcaaaaaattcaaatttgggtatttaaatgtttattaatatatttatagctttttcgaataagaaatttttttttcaagcaaaaagatcaaaatttggcgatcaatttttgaaaaaaattccaagtcttaatggtgtatttctgaaatttttcgggtcttttcttagggatgtattttcccgattttattttctattttttgtaaattattctattttgtactcactttacgatagcgttttgcgcctccctttccaagtccctttcctccttttccacatccggacatgttgcagacaattggagacttttaaaaaattttttatgaccgtgatgctaaaaataaaaataaaacataatcctacaaaatatacaaaaggagaaaatcttgtggtttcataggatattc

SEQ ID NO: 12384 - DNA, 2335 bp, Heterodera glycines
  unsure (1)..(2335): unsure at all n locations
aagcagctgtgttatgtgtatcacccaaatcatgttatgtgaaagtatcaaacgattttttaattcattaaaattacgttctttaaaaacatcatcataaatttcatctattaaatttgaatcgttggctatgatacaattattaggtaatganatagaatcgccaaaagttccattaccaatttcaagtatctgttcagcgaaaatttggtctttagcccgattatttattattaatttcatctgctcaaatttactccaaaatattgacttttttattgtcaggtcaataatttcgcttcttactgcaaatttttttacaggtaacgtttgtctaaaatcacctgcaagaattattgttttgccaccaaataattgtttacagttagttaattcacgcaattttttctcgatagcatcaagtgcaaatcgtggtgtcatcggcgcttcgtctataacaaaaaaatcactttttattatttcttcggcagctttagtgccttgaacaactccagaaataatatgagcattaagattaagcggaaatttaaatcgattatgtattgttctaccattttttaataatgtagcagcaattcctgaaaatgccatgtttgtcatatgttttttataactacgtactaaatgatataatgcattcaatgtaaatgatttgcctgtgccacccgggccatcaatgtaaattaatttaggattaagtttgcctgatgctatttgttttattttttcgtaaataattttttggtcagcgttcatagacttatacaaattttctgcgattttcttttcttcttcatagtttatattttcgttttcatctgttaaagaggtttcttggggtaaatttttaaaatctttcaaagatttcccctcttgtaataaatttttattgatacgggtcaaagccaatacataagcaatgtttggttggtttttaattaagaaatcttctgataaattatttttaaattgttcccacaaaatttctggttgttttgggtcaccatacaataagatacttgtgaacaaactccttaacgctgctggaaacctgaactgacttgcttcatttaagcaatgcttccattcatcatcgtctttagttaatccacgtgctaaacacgcctttgcataagtattatatttaattccattaacagttttaaggtcttcaaaacttgtaccatgaacatgaagtaaaagataacggagataatatttttcgccctccgttggactaatcggaaacattcgtccgattgttttacttatttctgggttttttcgcaatatccactttccttgcttagggttccaaatacaatatttaggcatttctgtgtacaaaaatttaggtgaacaatgattttcgttaaaaaaagcaaaataagccatcaatttactttttttatctcttttttctgtaattgtttcaacatcatcattttcatcaaaatatattatctgttcattttccaaatgcactgggagcctttgaacagaatgtgattttgcttgcaaagggaatttaaacattttccagcaagcctctacgggacttaaataacgtgcgccaaatagtttccggtctcatcataaactaattcttttatatttccattttcgtttgatatacagcgaagagttgctgcatcataacctttaaatatatacttataaatatactttactgcttttatgtcagctaccttttcaacatttatatgtgatttaaacctttttaataaatatcgattatatggaactatatcttggttagtcattattttgctctttcctgttttccaatcttttttaacgaatgttttgccattatttggccttttatacaaaggataaccattttcgttggtttctgttttttctctaaattgttttggaaattttttaatacacttttttgttttttggcaccaacacatagcatttggaaactctgaaccgcaagggccatgagtcatcaatgaagtgactaattcatacaaatccctatcattattttcattaggtatctccgctgatataaatttatcaatgtcactcgtgttcttccatttatttaatgggtccaatgttaacaaaacatgaacatgaggaaggcctcttttttggaactcaattgtataacaaaaatcaacaactcttccaaatattttaccatcaattaatttcttttaaaaattgtgtaacttttaaatgaaaaaacccttgctacaatgtcgggtctatcaaaagaatgttgacctgataatatccctttttgaatgtcctcctcctttggattacatgtaaa

SEQ ID NO: 12385 - DNA, 3053 bp, Heterodera glycines
  unsure (1)..(3053): unsure at all n locations
tacaaaaatttaggtgacnaatgattntcgtaaaaaaagcaaaataagccatcaatttactttttttatctcttttttctgtaattgtttcaacatcatcattttcatcaaaatatattatctgttcattttccaaatgcactgggagcctttgaacagaatgtgattttgcttgcaacgggaatttaaacattttccagcaagcctctacgggacttaaaaaacgtgcgtccaaataggttccggtctcatcataaactaattcttttatatttccattttcgtttgatatacagcgaagagttgctgcatcataacctttaaatataaatatactttactgcttttatgtcagccaccttttcaacatttatatgtgatttaaacctttttaataaatatcgattatatggaactatatcttggttagtcattattttgatctttcctgttttccaatcttttttaacgaatgttttgccattatttggccttttatacaaaggataaccattttcgttggtttctgttttttctctaaattgttttggaaattttttaatacacttttttgttttttggcaccaacacatagcatttggaaactctgaaccgcaagggccatgagtcatcaatgaagtgactaattcatacaaatccctatcattattttcattaggtatttccgctgatataaatttatcaatgtcactcgtgttcttccatttatttaatgggtccaatgttaacaaaatatgaacatgaggaaggcctcttttttggaactcaattgtataacaaaatccaacaactcttccaaatattttaccatcaattatttcttttaaaaattgtgtaacttttaaatgaaaaacccttgctacaatgtcgggtctatcaaaagattgttgacctgataatatccctttttgtatgtcttcatcctttggattacatgtaaaagtaataaataaatcaggacggccaacttcattaacaatagccatcgcatccataaaattttcatgcaaatttctagggccgccattaaagctagagggcaaaattatcttttttttaacctgagcacctgtttcagctgcttttgcatacaaaaatttatcaattgcattatacgactctttacagatttctttttgatgtaatcttatgtaatttaatctactccattcaattctggcagcctggtcgacacaccattgctgaaaaagtctattaccataatgatgaggcaaaaattttccttcatttcggaaaaataatttatattttgtaaaatcgcacaacgatatttttttattgtttgtatctttcatattataatgccaccctcggtaattattaggataaaataggggataacacataggttccaccaatggacttaaagggaaaatggtttcaatcttagatctgtaccttcacgaatatcaaataacatcataatttcggggatatttgtgcccatgttttttgccttttctaccgcattttcatagacatttttcatcatttcgtatgaatgcgagtaaacataattttcacgaagataattttcaacatatgcaattatttcaattatattatcatttgaatcagaggatttttcacccaacatgttaatcgaaaatcaattgcttggtctgtgtcaataaaatacaattgcccgtttgtcggtaactcaccgttattcggctgggcaactgcattataagaatgataaatatttccttgtattttaaaaatcggaacatttttatcaggaaatttaaacctcatacaacccaacgaagcacatgaaaaagaagaatttaaagttcttatattttttataaaacttttgtgtaaatcctttatttttgtgtaattattttcgtcgatttcaggttgaaataatacccttaaatctataggatattcttgcagcaaatcctccaaattacttaattttccataattgcaacattcaaaaaattcgtttaaacctttggttttgttttgttcttctggaaaatgaatggccggacaatgattacactttatattcaattctccaagaccataaacacctatatgtaggacatcggattcggctgcttttaaatataagtcaccttctttaattctatctctacgtgctttaacaaccttagcatccatcgctcttagttcatttctctgttcctcactcatttggatgcgcggtatttttctatttttatcatactctcggtttctttcatttttttctttgttcatattaatagataagaactcatcagggagattgtctaaatcaataacttcttttatatatgcctttctttttatcgcatgtttttggataaaattttcatcactttcttgtaaaaattcaatccgcttttgaacggagcttggaaccgttcactttactgctttttttacgggagctttgaaccctgtattcaggtatgatgatgtggttggcgaagaatcatcaacttttaaattctgtttatgtcgaaccattttagcacaaagaaaatttcacgcttaaaaaacacaatgtttaaaaaattaattaaataagcgaaaaaacaaacaaaaaaagatatataccgaaataaaagattgccaaaaaggaattaaaaaactaaaagttccaaaaaggaattaaaaaactaaaaggttacatctaattttttaacaccaaaataataaataccattttatacaaataaagctttttagacgttggtgagagcatttttgcatttaaatgcagaatcaaaaagcatattttcccaattttaaaaggttttaattgatggccaatgccttttaataaaggcaagtttaaagataaaaataatgaatgaaaaatttatgtaatataaacaaaaaataatgaatgaaaaatttatgcaatataaacaaatttcagtggtgaagaaatcaatgccttttgttactttcgtttcaaaaaaaactcattttttcattcgaaaaaagcataatttttcggaaagacattctcaaataantataat

SEQ ID NO: 12386 - DNA, 1703 bp, Heterodera glycines
aatgcttgtccattcctgtagtgtttccccctttgcgtgagatttgaactccacaaattcgacattttgcatttttgtcacccttattgaattggtaataacgcaaaaatgaagcggagggttcagtcagttcaagctttgaaaggttgttttcattttcatcaataaacacttcatcgctttgctcattttcagccggaaaattatcagaaatttccggatccattactgtaaaaaagttcaaaattaaggactacaactaaaatatgtgtgtgaaacgaataaaatatttcatctttattttaaattggcataatgtcaatatttttccataaaaaactctcattcataagctcattttcttattatgaaaagccaaatcattaggggtgtaaaaaagtctcggtctcgagtctcgaaaatcgagaccgagacttgaaaacccgagactcgagaccgagaccaaaaaaacccgagacttttctcgagtcgagactcgagaccgagagtctcgaacagcactagttatgatggcactcaaaaacccatcaaaattggcattactcaaaaaaactatcaaaatataaaatttgcctatagaaattttaattttgattttcaatagaaaatgagagtattgtgtattatcctgccacgtcctcgcctctccccaagccgaagttattcgaaatttggccagcattgaattgacaatgcctcgccacgtgcaaagggcaatttttattaaaaatgggtaaataaaaactaatttttacacaaaaaaaagtatttctcgggggaaggaggtggaatagtaattacacgttgatgaaaaggttgtatgaaggtcaaccagcaagtgcagagcaaagagttgcgtaaaattagcaaattcttagggggaaattagcgaaaaatttcttccgttgggacgccgtggcgagtgggcgcatctgcaaaagtgcagaaaacaccgtccgacgaactcatttgtcagccaccgcctcacacattccatccgtggcgcccaccaccaaaaaaccacccatttttgggttaatccgcgcctcgcgcgcccattgttgggcaattaattttcagctaattgatgattaggtaaatgaaaattcaaataatagaaccgcgtcaggatcagtcaggtacccgtatgcataaagatcggatctcgcacggttgtcaggcaactctacaaaaggcagcaactgcaaaaggcaactcgtacaatattaaacctaagcctaggcctaagtctagagaaaagaagctgatccttttaaagagattttgagcacaatttatgcatacatgcctccaaattagcccaaattttattacgtatttcttggcagtttggccaatattttgatgattttgtgtttgttgaaaaaaaactccaatttttcgagttcgggttatttaataaactcaattttatgttgagataaaattctgaaaaaattcatactaagctatcttttgatactgatcaaaaaagtcttttggaccaacttgatcagatcactccttcatggtgatttgaaaagccaaaaatggcttgaaaacgggaaatttttcgaaaaaatttcctagggggttgaaaatttttttctgggaaatttaagtaagcttatcagatagaggacaaattctctaccgaaatgccttttgaatggtaagtctac

SEQ ID NO: 12387 - DNA, 1901 bp, Heterodera glycines
aattgttttatttatgtttttagggaatcaattgaattcaaagaattatttgaacatataagaaaatgtgataatttcagttgccaatgactatgtgttattgtctctctcatccccccaaaataaaagtccaaagggtggcaattttaggcacattattatttttttaattaatgcctccttttttatagttttattgggcctcaaaaattgaaactctgatggcggcatatggttttatttatgtacacgctgaaatagccagaaaatgttttttggagaaggaaacccgaagacttttttttcttttttttgcttttcgggtcaaaaatttaaaaaattttattgaaaaatccctcctcccccggctacgggcctgaagggggcatgaacatcaattattaaattgaaattttggcattttaatataaatttataattttatttgaaaaaatgaatattttacccatttttcctgttgggtttcgatccaaaaaaaaaactctttcaaccttggcatacttatgccctcctctaaatattataatgcaaaatttttaaatttaattttttcttttgcaaccaaaaattgattctttccgcggctccatccaaaaatcattttttttctgttggaccaacaacaaaatgaatgaatgtgtgtgattgaggatgagtggatacggaagaatgaatgaatgtctcactttttttcggcctcatttcaccgctgccactgcttttgggaggtcctaaattgattaattagcgcccgggggccaaagaatttcttttcctgccaaaatgtttgactccctggggggtggggggagccacctgccgctgctttgctgctaccaccgctccttaatccgactcctaattagcccaattaacaaaaaatggcacttttaggggctttaagcatgccaaaactaggcccgtagccagtgggcggaagcggggagagaatcccccagaaatgaaaaattttaaaaaatttcaagaaaaggtgggcaaatttttttttaaagtaaattcacttaggtttgtggtccgagttcatctctaattaagccgattggttcattttgtccattgttttaattttgtgccaatcaaaaataacaatttttgacattaccgccactctattgcaaaaaccgcagctgcctggcgcacgtgcgcgtatgtgccgcagcggaaaaaatgatgtacaggcaaaacctacagcatcagcagcagcagcatgcatgctgttgcagcatgcactgctgctgttgcacgcactgcgcgcaccacacgcaacaattgcggcaaaaagtgtgccaccaccacaagcagcagctgaaccaccaacagcagcagaaggcgcatgaggaggaactgttcaccgtacttacattgaactatgaggtaaatccccgaaaaagcttggatcgtatctccgtttaaaaaaaaaaaacactttttcacaatttttcctaattttagcataaaattggatgtgatttttgccaaaataggtaatttttgcttcctatattaattatttattattttacaattttttcttttaatttaatcttcggacgaatttttttttctttgaaaaaaatatcaatttttataggtgtgttttttttgaaaattttttgtgtcgatttttagtaggcgttttttttcggttttcaggcttttttgtaggaatttggtggatggcggaggtgtaaaagatcagcctgcggtgggattcgaacccacgtcccttcctttccgtggaatgctctaaccactgagctacacagggcaccctttacacccttctattgcactttttcatcagtgcaatgagaaactctctgcctcccaggcactttttgagagagcccgcactacat

SEQ ID NO: 12388 - DNA, 2038 bp, Heterodera glycines
gccgttttcgcgtgggcccgagtttttgaactataactttttttattgtcaaccaaatccaacaatcttgctatcattcgaaagccctcttcacatgctctatctattagccacaaaaagcaaaacgattttgtgaacagtaaaaaagaaatttaaaatttttttcgagtttttcgcaattttcatgttataaactttgtcttggtattttaactgtctaatcgccaagcaatagtttactaacaatttctaaacatattaagctttccaatgatacccagatcgttggaagtttttttgatttaatattaaaaaatcttttttgtaattaaaaaacccgcaatccattcggttatcccacatttgcgcctcggacatttgcgtgtccaaaatacggttcaaacttaagtttttttaaaccacagatagattaatcagctttaaataagcgattgaaagtgattgcatgcaatatttgatggtcagcaaatttttgaaaaaataataaatttttcaaaataacagaattattgttcctaataaattgggcttccaaaatatggatataaaatcgcgaaatatggccataaaatattgaccaaaaatcgcgaagtatgaatataaaatggcaaaaatttggacataaatttcccaaaatttcggtaaaactttcaaaactcgcaaaatttttgttaaaaaatgattttcggggattttttcaatctttagggggtcaaaaaggccaattaagttgatggggccgttttaatagagatttttggaaaaatgcaaaaatatgtatataaaatatgaacataatgataaaatatggacaaatatggaaaaaacttatgtttgaacccgattttttgcataggcgcaagtgtttggacatgatccattcggagatccaaaaaaaaatttttttgttgaatgcatggataaattaaataaagtatattttttctttattctaattctatttttttcaattagaatgcatcggttgacgaaaaaaatggtagagataatgttaagaagataaaattaaacaaaaaggaagacgattataagctacagaaaagatatcatatagacgataagaaagaagcagaggaaaaggttgacaaagtgaccaaagcaaaaagaagtgttaaaaagtaagtttgctttttgtacttttaattgagggggtgaatagcagggatgggctttcgctttcgcgtttcgctttcgcatgtttcgctttttggtactttcgctttcgcattttggcgcaaaacgcaaatattacaccccctaagaatgagggataaaaagcccctaaaattttcaaaaatttgatatataaattggctaattgtcagtgaaaagctgtttaaaaatggtcaaaatttccaatttttcccccagcagcgccaatcggcaccgccgtgccccaaaaagccctattttttcttataaaaatggtccaaaaatcgcaaaatttgataattttttagtgaaaatctgttgataaattgtattcaaattttcaaaaattttcccggcagcgtaaaaaagttgtagaaaaaatttcgctttcgcgtttcgcaatttcgcgttttttggaatttcgcgtttcgcataaagacaaaaaaacgaaactagagaaattttgagaattttaagccacaaacctagaaaggaagaaggcattttgttgctcattgttgagaaattggattttccaagcattcaattttaaaaaaaattttttttttaatttttaaaggaccattgattcattggctgatattgagaaaaaagatgaaatgtatttatttggaaattttttcaatttgccagtgcgccagaaatcagcgccgtttagagcagaaattttggcaagagagaatgaaaaggtcatagaaatgggcaaagattatatgacaatttgggtaaaacgtaactcacaaagtaagtgaaaaaaagaaaaacattgaaaaaacagacccatagaaacggatatggtaaatgcgtcaacgaaaaattttat

SEQ ID NO: 12389 - DNA, 1123 bp, Heterodera glycines
aaaaacccgatcaaattaggtaaataaactaaattgatctgctcttattaagaacatccactgcttaaatatgcaatgtggcacccacaaaaagagaatgacaaaaagaaagcggggaagaaaaaaagtacgaatgtcgaacccaaagtcgaacccgacccaaaaaagctgaaagaagtcaccgaatttctactgcttgatgcggcactcgatcgggaggcgcgcaacttgtgcctgaacttgatttttagagtgccaatgcgcaattgggcagcgattgcgaaagacatggacgacaaggaaattgaaaactacttcataaagccattggaggaaaagcatttaaaaaataataatatttaaatgaacggtggtgctatgacgttactcaaaacccataaaatttgggcgttagacaaaaaatcattaaatgaaaatatatatttttttgatataactttgctcaaaagcaaccaaatttttaattattgataccattcgatagccctaagtgttttctattaaaccttcaaaatttcataaaatttcgttacatttcaagaaagctatgaccaaaaatgttcaagaaaacttgcttttttgagtttctctgctcataactatatttaaaattaatgaaattttttgaaattttgcaatataataaaaaaacactttgagcaatctaaaggtatcaagaattaaaattttattcattttgtgcgaagttatgaataattttctgtcaaaaattttccatttgatggttttttgagtaacgacccggcaccaaatgaactaatttcattttaataaattgccaaaaaagcaatcacctgcgattgctccagggattcatacttttagggccagaatcaagcctcttgacgggttttaaaattaaaaatttccccaaattcggtcttttgagctcgaagggaccgggaccaaaaattagcacgcttaaaatggaagttaagcagaacaattcaaaatttcttgtagattatgtaaaagaaattcactctaatcgagagacacgggaggctttattagaggggaggggggggggggaaagggttcgatggagtgggacataaatacatttaaaatttatttttct

SEQ ID NO: 12390 - DNA, 1409 bp, Heterodera glycines
  unsure (1)..(1409): unsure at all n locations
ttcattgtattatntagtgttattatataaaatttttaaagtgtgcggtttcgcgaaaaataatgaaattcattcttaaatttaattatttcaaaaatatttttatttaaaataattaaatattatttagattatttttattagttctttgttctctttaccttttcttcattttatccatttgctctttttatttttcgtcactgtaaaaatcgcgagaattttgtgggggcggcaaagggtcaaacaaaaccttatgcgcatattaaatggcatgcaaatgcataataattaagggttggggttattaaggagggcgaatatccgttggcaaatgccatttttgggttgggtaattttaaataaaaaggacggacgatgcctttgcctttttttcattgaaattaaaaaattaaacaccgtccatctcttcaagagaatttgtcgtttcggcgccagcccgagtttttgattataacttttttttcattgtcgaccaaatccaacaattttggtatcattcgaaagctctttacaaggtttattagcatttcaaaaagtaggaaatcttatagcaaattagaaaagtttcccccaatctgtgccggatcgaacggacattaaggccattccttgcccaattccttcactttcgctgtgcgttcggttgcttttcgtcgtccgtttcattgcttctccccccccccccttattgtttttgactgttttccgttcatttcctccgaatttactttttatttaccatttgtttcatctcacttttgctctgcgcacatttcgcagagaattcgaaaggaaatgccaatgccaatgacgtcgtcgcttctcatttccccctcctcccgtcgccctaatcaaaatattgcgtggatgtgtcacaacattcattccttctaatcccaaaaaactcattttattgcacacaagcattgccattatcatagatagcattattattgccctgaggggccaattgtttgtttccgggttccatttttaaaatagaatttcaattgaggtattttctgtcacccattctctatttcgaatttcaattcaaatgccgactttctccgatccgtcttcggcttcttcttcgtcccgcctccctttgctcttctctctgctggcctttctccaacttctgatgagtgccaactcggccctgctgctcccgctcgattcgagttggtattcaaaccacagaatgaaaatttgtgcggagaaatgaatgagtgggtcggtcggtcatttcgtattcttaagcacttttcgctcctcacaacggccctttcgtggcattttatctgcaccctccgtttacgaatgcccgcctcaccagcagtccaatgatccgtgaattncatttcggccggggcgatctatcc

SEQ ID NO: 12391 - DNA, 2165 bp, Heterodera glycines
tcattcaaaaaaccaatgtcttattcctaaagtaatcgcagccaaaaggagagaaagaattctcatttcttgttttttgaaaagctgtattttgcattttattgtattgaaattggaggcctgggattttgcgggatcacagtccgcaatcccgcattttttggaaatatagggattttgcgggattcccattgcattttgaaattaaaagaacaaaatgccaaaaattttctagataaattcataaattaattaaagttaaagaaagccattttcaatcgcaaacgccatccaaaatttgtgaaatttatttccctgcggtgcctatctcccgacggattggtttccaccttagtacgcggaacgaaaatttgaaatttccattctctaatttggaatcaacaaatgacacatttgaacatcatattttccttgttaaaaatctgaaacgaaattttaaaaagaaaaaaattttgagattgattgttttgacaatttctaacttccaatgaaacgaaagaggagtaatacatcacgaaatctgcaagtgcaaagtaatggcgtcccgacgaaaattccttcggaacaaactgctatcgcagctgccgccaagcaatttaaaactgatcagtcaaatcttaggctttctgatttggggggatgcgaagcgcaatttttggtttgaaaagattttcaatcatacgaagttgcgaatcagtggtttctcaccaaaggaagcgattcaactgatgacacacctcaaacatcccaaattatgcgaacaaattggtttcacaccgcccaagggattgttgctgcacggaccgccggggtgcggaaaatcggcatttgcgatggcattagcaggtttggtcggtttttgctaagacagtttgtgagaacagaaaattaatttaggcgtattttaatcttttcgttagccgtttggttaactcttaattgccttaatttttgaattatgccaatgtgttaagtccaattctctttttaactcaaacatttaggcgaacttcagttgccaattctttccgtttcttccaccgaattggtcgccggtgtttcgggtgaaagtgagcggaaaattcggacgcttttcgcagaggcaaaaatggcggcgccggcgcttttactcatcgatgacatcgatgtgatagcagcgaaaagggaaaacgcgcagagagagatggaaagacgaattgtgactcaactcatcgcatcaattgacggttagcaaaaggaaagagacggacaaaggcaaagtgaaggcgtactttgggacggtgtcagtcagtggccgaaccgaatcagtcttcagaaagaaatattatttgtgggaaaatccattggactgaaacttatttgcagcaccaatcgcatttctctcaacaataaaactttaataaaatgaagaacatgcttgatgatacgtttatttctttggcagggctaaagtctgaaaatgacaatgagtcgtgtacagtgttcgttatcggcacgaccaaccgattggaagtgttggacgcgtcgctgcgcagggccggccgattcgacagagaaattgcgctgggaatgcccgaccaaagagcgcggatggaaattctgaaaatagtgacgaggtttggacgaaggaatgcaccaaatatagggaattcaggcacatgaaactggacgtggacgtggatttggctgtgcttgcccgactttcgcccggttatgttggcgccgatttgctggcattggtgcaggaatcaaattcaaaggctatcagtcggtattttccttgtttctttttgacacattttcattttttcagtgcgtgctctttgttccgtcgttgatgcgaatgtaaacactgagaatattgtggaaaatttcccacctaaaaacatcgacgacattcgtggagaactgacaagaagtaaaaatgagaaataattaggctctagttcaattttatacgtccaatcaatgattattcttaatttttagggcataacttttttcacttaacttacaattagttaatgccaacattcatggcatcaaacgaaaacttatgctctagctaacttataaatttaagaaaaagcaaataatgccactacgaaaaatgcaacaagaaaacataaaattcatctttcaag

SEQ ID NO: 12392 - DNA, 1701 bp, Heterodera glycines
cagtgaattgtgcggcacaaatgccaaaaaaaacgagtctaagcccccaaatcagcggcaaatcctggataaatgttaacacatcatttcatggatacttacgggctaaaaacccgtaagcctcgtgatccgtctctgatgccgaaacagcagttggacagtgacatgcccttttcatcttttcgcccatttcgtcaattcccccacccattttcatatggtcaattcctccgtggcccttctctaagggccaatccgccgattttcgcgcggatggacaattaggcttttcctctttttcaaatttatctattcccccggcccacgtgaagttgatgttgtcgatgaggtgttcctgtcgcgccctttcgagtgccaaagaaacggcgggcgcggattggccaaagccgaaaagcattcgcaaccgttggctgccattgacaaagagaaggccgattttcagctgaatgggcggcaacgccccaaccaccgccggggggacggacgaattgctaatgggcgaactggtcggaagagagattgcgccggagggagtggtggcgatgggcgtgccaatgccaatgtcgggcaacggattgccggtgccgatgagcgattggtgccgggacggaccgaacaccgaaaggagcagcaaaaggacggggaaaaatgccggcggaggggagggcatttaacagagcaaaacgacggcacaaaagggaggaagaaaagacaaatgaaaaaacaaaacggtacattaaatgcgaaagagccaaagggacggcattttgagagggaggacagactttgaaaatggcatttcaaagtgatttgacgaaaaagggaaccaaaagcaattggaaacccaacaaattgagacggtgacgaggtttttttttcgttttccatttttaatccctttaaaaagaaagcattttgaagggcaaatttgagttttattttcaaaggattcaaagccaattcgtcagcttaacggcaaagccaccaaaagcaaaatggcatttgaattgaatgccaacgttagaaaatgaaaagaaattgacgcaaacaaacaccaaagctcattgtcaacgtttttgaacccagagaaaaaaccacaaaaaaggatccgctttcaattaattactactgtataaggattttttaattgtaattcattgaaaaaacagtaattaagtttttgtcattagagagaggtgtatttatcatgaggcaataaaattaacacaacaaaatttaaacatcggtgtgatcagtttggcggatcataacaaagttttggccacccaattttggccacttgcttcaacacaatttccactttgcgttcgctgataatgacctgttgcacaaatgccaaaattaagtgtttcccctcaaaaactgttgcattaccacactttcggacggcgcaatttccccgaacagttcgtaccgtttggtggacccgttgatggtcacttccaatgtcagaccgtccgatttggcggatgtttcgctcggaagtgctccctggaaaaaagtcgaaaatcgtaattgaaatcaaattataaaattggtcataatcgctgtaaataccttgcagtaaattgtgatgtgcacttggccacctcgttgaaaccaatcctcgcgcgcatttgtgacaatttctttctgtttgagggaagggggggggggggg

SEQ ID NO: 12393 - DNA, 1389 bp, Heterodera glycines
ggggggggggccagggtgaattttcaaacgtaactcatcatgtgctgtcgaataataccaaaatttgtccgggtttgacccttttaaaaggtttggagtagcccataccgcgtttgaaccggttcaaaaccccatttttttgccatttccacatctcacaaatcaggaatattcctgagcattacaggccacgagagaataaatggtatcaatgttatttatttattttttatgggtggtagactatagtacagccgtatttttctaaaacttggggaacattaggagtgcggcggtgccgacagacgccggcagtaaaatttgtgtgtacgtagccaacagattttgtcccaaaaaattgactaaattttgtgatttagcgaattttttgggaaattgggtaagggagaccttgaaatgagtaccaacaaggaaacccggaaattttctcaattatttttctcttcccttaaaaagtaatacctttttccagcagtgtttgccccgagtgcaacccaattggtccaaaaatgtggtaaaatcggtggttttgcgcccacaacacgaccagtatttgagcccttcgtgaaaaacggcattgcccgggtggaaaacgcactcttcggcatcgctctcgggaccggtgaacacataaaatgggaaaacaattagaattttttaaattactaatttgattctacttttttgcacgtattgtttgtacagtgagctcccgccgtcgcactttgctcaatttctcccccgggcgtttttgtttggaggaccttcagagcagactaaaaacggaaaccaaaaaaaggaatgaaaacagagaaaatatgggatacctcagcaatttgcaaattgagcggaatcatcgctttttctgttgtgaaacgtttacagcagataataaaatatggaaaatgcgcgccttcgcagcactaaaactaaatttttgtcctaatttttcttttcttttgaatttatataaatgttttcgttatggtaaaaaatttttgtatttgtaaaatttgggacttaaaatacattccggaatggaacacaatcagaaacacaattttttacatttgtaaaattgggtctaaaaatacattccggaatggaacagaatcggaaacacaattttttacatttgtaaaattgggtctaaaaatacattccggaatggaacacaatcagaaacacaattttttacatttgtaaaattgggtctaaaaatacattccggaatggaacagaatcggaaacacaattttttacatttgtaaaattgggtctaaaaatacattccggaatggaacagaatcggaaacacaattttttacatttgtaaaatttgggtctaaaaatacattccggaatgga

SEQ ID NO: 12394 - DNA, 4090 bp, Heterodera glycines
  unsure (1)..(4090): unsure at all n locations
ttattatagtcgcgagaattaaangcagcaatagtgcgaacggaaatttactcaaaaatatattacgggtaaaaacaaagaagaagcgcaaagtnntagttgcactnttccacncagaagcatgtcaatgccacggaggtgattccgttgtacattgtgaatgtgaaaaaagtccacttaccgaaatatttgctaggcaagagaaccttttacccattaaaacacagggaagttacgtatacttcgattcccaaattaaagctaaaatacaacaaacaacttctcttcaaatgcaagtcacacttaaaggacataaggttaaagctatttatgataaaaatatttgtaatattgttacaatatcattggaaggatgttattcctgtactagtggtgctaattggactctatcatgcaaaacaaattttggtaccgcattagccaatgtggaatgtccaagtcaaaaggtccgagtgaattgtgataaagaaggaaaagaacaacaaatccaactcgcatataataagaaaaatattacagaaaattgtgaagttatatgtcccgatggtaagactgaaattattagctaatctggaatacatacaccaacaagatacaaaaatcattcccactaacaatactaatgaaaaccccactattggaatttcatttgaccaagtaactgatatattaaattttatctattcccttattaaagccaattttttcaatatatttattattatcatattcatactcattatgattttcctaattccatgtctactacctattctatatagaattatgtgtcgttgccttcctctttcgcgcgggagtgtcgcgacaacgcgaaatcctaagataaaacccaaaataaaaaagaggaaaaataaaaaacaatagaaaataaaatggggaaaaataaaacataaataataaaaaatatttttacatttattttggaaaaataatattataaaaaactatcgaaaatataattacataaaaataaaaaaaaaaccttttgaaatgaataacggaaaattgtttgaaaaggaaaagtgcatttcctcaggaatgaaaggaacgaaaattaattaatattaaattgcgaattctgttaaggattgttcgtaaacaaattattaataattaatatattaaagaaattggaattgtaaagggaaaacggaaaagcaaacaattaatgggaaaatggcaaatccaaacggataacacacaaaaacatattttaattaaaatgagaaattgtagcgtactttggtgcaaaaaaatcgtatttaaaggggtggacttttccggaaatttcagattcgagacaaacggttccctccgaagtttcccggcacccgcccaccgcctttcactgcacccggccttcgctgctctctgtctgtgcgagtgccctccctgtccgcgcctactcgagtgccctccctttcctttgccattgtgtggccccttttggaccagccgttgcccgaatgcccttccttttcccatcgccgttctgaccccttttgattttgccacatttttccatttgtgatttatttactgtcaccgtttttgtgcccccttttccccgttcacattatcatgtttgtcccccatttttcgtttccctcaccgtcccgattgggacggtttaattacccaagtttgaggtcgacacaataaacatactcttattaaaattgtgcccaacttggtctatttgcctggacgaaaaccggcacgactcatcgctctccgatcggtcccgaccccctacattcccccgaacggctactctgcgcgcctcgcccatttcatccccttcccgtccccttcaccccgcagagttcgacgcaaatttcttgtcgccacgacattttttgcctatcaaatattcgcaataaatgcccatctatttaaaaaatattctattctattaaaatgttctgtattttgctatatattaagaatagccgtacatctaaaggagtcagtaattgaacaaatttctcaaatttcaagaaaggttcaggcagtcgccgtaaaaattgtctatataaaaacaatggcgatacgcatttctgcactaggtcctttttcaaaattgatgtgcttttattgaaaaacatgtttaacgggccacaaattaatagacaaattcaggcacattcttaaaaaattctgcttttaattagttcatttaatagattatgcttttgctttgtttttttaaattctacgcccgcgattatctgataggacaatgatatcaataaattttcttctgaagaagcgaagagttagcccaaatgttttccttcctttctatttaatgatctatcatttcagatataacagtcaaaatttaatcggccggctaaaaatgaattcggtaggattttatgaaaatagtttgaaaaaattgaaaatttctttcaaagatttaatggaagctagtagaaggatacctttttgagtaatattcgagatgttgccaattgtttaatggcaccccatacctcaaaaaagcattattctttggctaaaaaatatcattagaaaatagcgggcgtagatactgaaaaaactgttcttataattttaaacaattagaaacgccaaaggttacaattatagtaaatgccaaataggttgtaagaataggctcatttgctacaatttagaacagaatgtaatcggcaagaaagggtttttaaactaatttcaatgaaagaacttcataacaaataaattaatgacttttctaaatgaattgcctgcaataaaaatgctaattttctaaattcgcatgtgccaaccttgagcaccttccattaaacaccatcttttttgaggcagacaatcaatgaaactcacaaccttcggttgtaattagtggggctgttagtggaatagaaatgttaaattttttgcctatcaaatattcgcaataaatgcccatctatttaaaaaatattctattctattaaaatgttctgtattttgctatatattaagaatagccgtacatctaaaggcgtcagtaattgaacaaatttctcaaatttcaagaaaggttcaggcagtcgccgtagaaattgtctatataaaaacaatggcgatacgcatttctgcactaggtcctttttcaaaattgatgtgcttttattgaaaaaacatgtttaacgggccacaaattaatagacaaattccggcacattcttaaaaaattctgcttttaattagttcatttaatagattatgcttttgctttgtttttttaaattctacgcccgcgattatctgataggacaatgatatcaataaattttcttctgaagaagcgaagagttagcccaaacgttttccttcctttctatttaatgatctatcatttcagatataacagtcaaaatttaatctgccggctaaaaatgaattcggtaggattttatgaaaatagtttgaaaaaattgaaaatttcgttcaaagatttaatggaagctagtagaaggatacctttttgagtaatattccagatgttgccaattgtttaatggcaccccatacctcaaaaaagcattattctttggctaaaaaatatcattagaaaatagcggtgtagatactgaaaaaactgttcttataattttaattttacaattagaaacgccaaaggttacaattatagtaaatgccaaataggttgtaagaataggctcatttgctataatttataacagaatgtaatcggcaagaaagggtttttaaactaatttcaatgaaagaacttcataacaaataaattaatgacttctctaaatgaattgcctgcaataaaaatgctaattttctaaattcgcatgtgccaaccttgagtaccttccattaaacaccatcttttttgaggcagacaatcaatgaaactcacaaccttcggttgtaattagtggggctgttagtggaatagaaatgttaaattttttgcctatncaatattcgcaatanatgcccatctatttanaaaatattctattctattanaatattctgtattttgctatatatt

SEQ ID NO: 12395 - DNA, 1879 bp, Heterodera glycines
  unsure (1)..(1879): unsure at all n locations
tgcaggtcttaaaatatataaattacaatttattatattaaagttttcttatttctatttcccaattcttaactttagtaccaattaaaaatgaaatttagcaaatttatgaaactttctccaaagcaacagaagttaacggactaataaagctggatttaagacttttagttttttgattcaattacatagttttacatgaattcagaaatgctcccacacaaaatttaaaaaaggtttttgaatttcatcattagccacccgccgaaatatttatggcaaaatgcatgttaaggaaaacaaaaatttcgaaattgtgccgcaactctcagtgcgacacactcgaacaataagttgacacaaaatttatgtctattgtgtgcgcgcaacaactaaatgcgggtaaatgaatttatttattttttggggaccgcccgccgtgggttgggaagggatgggcggagaatcatggtgataaattttcttttgggatgactcttccttcatcaaatgctaaatgcaacagacattgctgcggaagtaaattatgcgatggaaaataaatggggagagaaggggaacaaccaaataaaatatgacaaaaattgcccatataatgaggagtgatggaggggggggggaagtttttcaacggaaccctcctcttttagcagcgaaaatcgctgccccatgattcgtccgggtgcaaattcatccgccggtggggggaggggtcaaggcttagactcccaaaaatgaatgctaaaccaattgaagcaattaaaacaaaattggccatcttcatttcccaatgattggcctacaacgattggcattgtcataaggtcaccgaagtacaaaaattaaaaatagtgacgaaaagatggttgttcaaattaacaaatcttaaatttgaagaaaattgatgtcttttttttttgctaacttgaacggcttaatacgcacgaaaaagaagttttacttagttaaagcttctacctttaattttttcgtgccttttttcatgccttttacattgttttttaaaaaatttcttataaaacgaaaaaatcacccctaaaaatcgtactgaactttaaaaaaaaatttcacatatttactaagttgaaagggcccttgacatgggtgtgcaaaatcaaaaaaaaaaccgacgaatggtggaagcgagggtaagcatgaggtgtataaaatgcctttttatttctaaaatataaaatttaattaaaattttgttccttattgtctgttttttacggttgggtactgtaatgaaggaactaatgtagtgaaataactgctgctgattggccgtcatataaattttctaccatttgctgaataatttcgaaatgttcatttaactgtaaatcggtactgtcatttcgtcaattccggacatcttgtatatatgagtgtgtgtttgacaaaatttgaaacctatcgattctttttttcgaatttttgcaggcaaatagaaaactcgtgcaagttttatttatttaaatgggttatatccagggtagccagatctgaggctttagcctcattttgtggttttttgataggtcaatgaggctaaattttcaaaatgaggctttgaggttttttgtggtttttttgtgaaattttgaggatttttttagnngtttgggaaatttcgctatttttaaattttgattaattgggcatatgttttancattatttaatnnattgggtcgtaatagagcattaaaacgaaaatagaaccatttttttcaaaaaaacacatattttcantaaattttttgcttaaattgcaaaattagcccattttgtggacaattctgtaacaaatcgcataaaaattattaaatttt

SEQ ID NO: 12396 - DNA, 2552 bp, Heterodera glycines
cgacgaatggtggaagcgagggtaagcattgaggtgtacaatatgcctttttatttctaaaatataaaatttaataaaaattttgttccttattgtctgttttttacggttgggtactgtaatgaaggaactaatgtagtgaaataactgctgctgattggccgtcatataaattttctaaaatttttggttttccatttgctgaataatttcgaaatgttcatttaactgtaaatcggtactgtcatttcgtcaattccggacatcttgtatatatgagtgtgtgtttgacaaaatttgaaacctatcgattctttttttcgaatttttgcaggcaaaaagaaaactcgtgcaagttttatttatttaaatgggttatatccagggtagccagatctgaggctttagcctcattttgtggttttttgatcggtcaatgaggctaaattttcaaaatgaggctttgaggttttttgtggtttttatgtgaaattttgaggatttttttaggttttgggaaaattcgcctatttttaaattttgattaattggcataatgttttacaattatttaatatttgggttcgtaatagagcattaaaacgaaaatagaaccatttttttccaaaaaaccacatattttcataaaattttttgcttaaaattgcaaaatttagccatttttgtggacaaattctgttaacaaatcgcattaaaaattattaaaattttcccggcggcgcctatcggcactgtcggacccctgttccccaaaaaatttttggaaaaagagccgcaaaagtaaaaatgaggctttttgacccaaaatgaggttttttgcatgctaaatgaggattttgaaaattttaatctggctaccctggttatatcaattttaccttcaaacgtctgacaccacagtttcatccatccatcagatttagcaaaggttaggcaataaaatccatgcaaattacgttagttttgtgttataccggggattccaacttcatcggcacctttttatagccctctccctccctcactaattactgttttcctagtctagacacagacacagtccattaactcactcctctcgtgaatcgttgcgcgtgactggcgggcacttaatggtcgccccgccgaaaattgtttatcgaccgctggcgacggcgggctttgcgatcgatggaggtttttagtttcaaaactttggtggactactggttgtgtggcaaatccaagagtccaggctcgggatcaggcccaaagaaatgctaaaaaattcaacggccttttttttgctctttgccacccaaaaaatgtgtttattgacacgatttggctatgaaactaccttggcactttcataaccaaatccatttttatcatttaacaaagtttgttctgtttaggaaatagatagtccaacttttttttattataaaacccaaaaactgaatatttagtggcccatattttcataccatggcatgcggcttgataaaaaaaatgattttccatgttgcatgccgtgatgatgccacccaattaattggtcgttaacttttttttctaaggtatcgtaaaaaattaggctttctatagcttataaaccgttttttttttataaattagttttttgctgttactcaaaataagacattcagtccgtgcgcgactttcctcatcgaaataaacgttttctgaaatcctcattttgatgtcttttctgataaaaataaaaataattgtttccactgatttaaatcagcaatagaaagttgtggcgcaagacttattgtttacactgtatttggaaaattgacttattaagttacactatgtttggaaaatcttttttgtagcactttaaaaaaaaattaaatttaaataattgcaatacacaaaaattttaagtttaaaaaacgaaggcaaaactgcaatataagtaaaattgctaagctattttcatctgtcttattgcccttctgctctcctcagtttacacactctttcttctctctaatctcctagctgcaacacacatcaaaatgtgaactattttcccctgtctcgttgcactctgctctccacggtttacacactttcttatgtttctctaacctcccagctacaacagttgtcaaagttgcgaggcgattttgctctgtctcatcgccctctgcctatttcgtggtttttgtgcctaaagtgcctattttaggctttttgaaatgacccaaaaaaaatttcagaaaatacacccttaagaattgaaaaaattttcaaaaaaatgatcccaaaatttaatatatattttttcttaataaaaatttttggtttaaaattttgtccttatttaataatttcatttgcaattgaaatatttaagtttttactttgaaagcgcaccccatttttttaaaaattgcaacaaacagatttcaatgttaataggcttatttttggagaagaaaaactctaaattaactataatccagaaaattttagttaatttcattcagcgtgaatcattcattggctat

SEQ ID NO: 12397 - DNA, 2518 bp, Heterodera glycines
catatgatcaaacataatttcgcatttttcaaccattttttgaagaattttccagaaaattttccttcttttggccacacactccgccgacgcatcatttggtgacacagacaaacaactccatcaatatgcaaaactatgagtaaaaatgcaatgtttgtggtgccaaaattcgtataaatagtcaaaggatggcaccaaaaaaccattggaattatttaataaacaaaaaaacaattaattaccgccaattgcccattggaagaaatgttcagctcttccaatttgtctgctctctttttggcctcctccgttttggccgtgcttataattggcattaaaatggacggaccgacggaggcaaaaggcgccgcccctccaaacgccgcggggccaatgggacttttggttatgatttttaattgtaaaattaaacaattcaaaattcattcagcttttattgaatggcaaacaatcggcggctaatgaaaagggaaaagcgccctctggcgaaagtaagccaaatccggggcagaagccgagcggagaacggcgaaagagggacgttttggggcacgccggcggatacgtcggaggatgggaccatcccattgactcgacactgtaagagcataaatttaataaaaatggcatattcaaaaatgaaaaatacattttaaattaaataattattattaatttgagttattatttttaaaaagtttacaaattaaaatatttcttttgaatttaattgtcctttattttagtgattgggcaaagagtcagtggaatgatgccaattggctcgccgatgttgtcaacagaaacggatgggaaaacaccggcactccaaccggcggacgatgaatcagtgaattgtgccgaccaaagaacgaaagacggcatttttgcttgggaatttaattgactttttggaatcaaacacactttcctgtttaaattttagatagttttgcggttaagcattaacggcaaaagcaataaataaatgggtttaactgttaataaataatagagttgcatattgtttttgtatatttgagccaattaagaaaataaaaaacggataagtgggaattggtgtttattgtaacaaaaaagaattgatagaataagttagaagtttgtatatccgtacaaaaaatgattaaaggaaaacaacaataaatgcagttttttggggatttgaagaaaataattaagccttctgaatggaaaacgaaaaaatggaacaaataacagaaaatgaccaagaaatgaaaaaaagactgaaaaattcaaaaaggtaaattaggcatttcagaatgattgtgccgattaaaaaatttgaatgatggcatttttatttttaattctcatttcgggccaaatacaaaatgacaaaagtattgttgcgcgggttttgaaaaggaagggccgtttcagtccaaaaattattcgaatatttaaattaattgatttaattagtagggctggcaaaaatatgtacaaaaagtggtaaaatatgtacataaatatgtaaaaaaaatcctgaaatatgtaagaaaaataccaaaatatgtaaaaaaaaattttaatggtaatttttggaaaaaaaattcttagtaaagggtgaaataggcacaaaatgccataaaaatgacctaaataggcttagaatcacatttttgtatatttaaatattaatttttggtatctcctttgttgaaaaaaaccaatttttaggggtacatattcaaaaaattttatttttttcacaagaaatttttataaattttcaaaatttctcaaaaaaatttagaaaaaatgctaaaaagtccaaaatatgtacccattgaaaatatttgcaaaaattacaaagaaaaaggaaagcactgacaatgagaaaagtttgggcattttccttttgtgtgatgctccaaaagaaggtgcacaataaatgttcatcaaaagtaatcaagaactaattgcaattaatcgaaaattggaattgcaaatgttcggcaatcattcgaattgtctcgcaaataaacataatggaagattattggggagaattcagcgaagaagaacttttagcagcaaatcgaactccggctggggatattccaatttcatttcattttcagtgagtaattaatatgaattaactgattaatttgaaatgagcagaaaattggtaaaagcaagtcaaaatttcaaatgcatatttgatgactgccgtaaaatattaagtttatttttaagagaacattttttgaatttattatttttcaataacttaaaatgttattttgttttattcatttttcattttctgtgttttttcagttccatccgaagttttatcagaagatgaagtgcacgctgtttatcagttcaaatctcttccaaattttcttgggatttccgacggacttttcccaatcccatttccgaccaatgaaagatatatggaaaaggacagagttttgctgtacattgaaaaagtgtc

SEQ ID NO: 12398 - DNA, 2177 bp, Heterodera glycines
ctacgccccgaccccttggggaacaaattctctgggagcgcgggggagggcaggtccctcccggggagcgtagagcggggaccaggcctaaaaaaagagacggggatttgggacggggagcgcaaaactatcagagatcatggaccgttggggagggcaagtcggagatcggtgaggttcggggcttaaccttagcttacgggcattctctgtgactatcaaatcataataaaatattagaatttctctttgaagcagcacaccgcgccgcacaacacattgatttggccacggtccgtcgccgacaaaagcagcaacaaaaacaagttggaggaggacaacatgacgatgatgacgacgacgagcatgaacatgaacagcagcaacccgttgctgaacaacaacaatggttgcgacaacgtcagcaacaactgttgttggccaacaccgagtcgtccagtcaggaggcggcggatgaagctgatcagagctgttgctcatcatccatcgcctcgtccagctccgttacatgccgtgaggaagtgtcgggtaaattttattttcgaaatttatgggggaaaaaatttgggaaatttttctccaagaagcggcttgaaaagcaaaaaaaaaaacgttgatttatatggaccggacgcacttaattaaaaagccttagcgacatcacttattagggtattaattaccattaattaattcttacccgcactcgtttagattttaattgccattaattaattccctgccgagtgttaattagcattaattaattcctacccgcactcatttagcttctaactgccattaattaattccttcccgattgaatattaattagcattaattaattcctacccgcactcatctagctttaattaccattaattattcctagtccgcactcattaccattaattaatttcagccgacaacaatttggtgacagccgtttcatcttccactgttgctgctgctgatcatttttgtcactctcaacaacaaatgccaaattcgtctgttgccgaattagcggcttctgctgacccattggcatcgtcggcattggcacataaaccggcttctgccgttgttgctgttgatgaacatgactacactaccatggacaaggtcagctgttcgtccgactcattctcccacttgccggtgccgcaacattgtgagtttttttttattggcattagtagttaattaacttttttggcattatttaaaaatattttgggaattctacttttttctgtttagacaatttaaattttgtcattaattaattaatagtttcttggatttaaagttaattaatcttttttgtaaacagtggcaattaatataatcaatcataaccactaattaacattcttttactaatttttaggaatttatttttaagggaatttatatttagttttcttttaaatttaattatccattttctgctttctccaggggatcgtcaacattcgtcaattggaattggcggctgctgccaagaggaaatttgttcctgtgccagcgacagtggggacagttgctactcatcaatggtcggtcattaaatttgaataaacttgctgactcattaattaattaattactaattaaccaattagttaattagggccatatatgtaattactaaaaacagttcgttgccgctaattgcccagttaataattaattagtatcgattacaaggaaggctaaaatgaattgtggtgttaaaccaaaaaactgcgctaaatatttttttttgataaatttttatggcattttgcccaaaaacttttttgttggcactttgccaaatttcctgctatttgtgtatcatttatccgctgtgccatttcaggcaaatggtcagctgaacccgcgtgccttttccttctcgtctaccaccgatggcggcggctcggctggcagcagtggcattggctgcgccggcaccggtggcgcagacagtttctgctaccgcttgcgcggcacggaccgccgcaacgctcgccggacgcatcagtggcggcggcttcagtggacgtgccgaaggccgtcattggacaagggccagcggcgtggtgccgggcatggcggccgcaatagggaggagcatcaccggaactgcgctgcgaataatgtgcgca

SEQ ID NO: 12399 - DNA, 1698 bp, Heterodera glycines
  unsure (1)..(1698): unsure at all n locations
gcaaaatctcaaaaaagtcatgcattgtcctctctcccctaaaaagaaatgaggcgctggcccgaaaacccgtcataaatctcaaaaaatccggcaccgattccaaattactgtatggatttcccaaaagctcaacaaatccggcacagacccgcaaaactagtttctaaagtttctaatgatcctaaattttcaccatgatcaaagactgacttcaagatttccttgataagttgaatatttcagcaacatcatcatttctcaccgcgcaaccatcagcaacaacagcaccaacaacaccatcagcaaatgacaaacagcatgaacggctccaacatgatgatgatgggacatggctccacaaattgttggccccctgaatcgtcctcctcctcacgcttctccatggaaacgtcgttgatcacaccgttggaggaggacgaaaagcaggtggcagcattattaaatgtttttaattacagagattaattcgttgggattgggaggacgggaaggaatttccccgaggcattttttccggttccgctaatgagggataatcagtgatttttcaatatcttcaaagttggccaattttaagagtcaattttcgagtcaaaattttattggctcaattgggagcaactcttttcgctcctatcttttcgcccttgaaaaactttgaaaaaaatttcagcagaaacttttcagaaaaaaatcttagaaatttttaaaaaaaagaatttgaaattttttgcgatttttttctttattttaatgaattaccaaatacttttttaaaaaatttccaaaaaaattgctgaaactgaattttttttcttataaaaaaattctaaattttccaaaaaaaaaactgccagtttcccctaaattttttaaattacattcctattattttatagatcggcttcgtggacgaggaggaacgggacaagctgtgcacggagatgagccaacaacgggtgggcggcggcacggagttgcgcaagcgggcattctcgctgggctccaagtcgtggataacgtaaggaattaattaattaataaatattcattatttctcctagacattcaatttttgtcgggtagtagtgaggtttagccatgatcgtccaacccgaggccttaaaaactaaaaaaacgaaaatccttaaaaaatagtataattgcaaagaaaaaaaaagtctttaaaatttatcaagtttaagttttttttatattttccaaatgtttttaagcaactttggcgacagatagaaaaacaattttgtaaaaaatttcgttttttttcctgaaaattctcaatacttgttaaggcttaattttctttgtcgggacgaaagacctgctcattgtcagtaagagggggtgctcaaaaattttagttttttctgcttgantnntttcaaattattttacccacctacatatcgtttttcttcaaaaatttactaatttggcgaattttagggggttanattctacaaaatttaaacaaaattttcaacctaatggacctgatcgaattgccattttccagaaaaccgttccgtaaactgtcctcaacgcatcacagcgctggcagcgncgccagcagttcggcacaccaccaccatcagcaacacaacaaccaattggntgcaccaccacacctctgctgatcatcatcctcatcat

SEQ ID NO: 12400 - DNA, 1167 bp, Heterodera glycines
  unsure (1)..(1167): unsure at all n locations
cgacatgtccgtgactgaacttctcctaaggcacatgaaatatcccttgatcacaaaaaaaaaaaaaaattcagaaacggaattcctaggcaccaaaaattttcgatataatgttcaaaattccgatttttcggactcggaaattccttcccctccctggcccagggttctaatacttgaaattcagttttttttttttttttaaatttaaattagctaaattactaacttctcagatgatcattttcggagtgatgaccttgttgagctggaattcatgccacaaaaaaagcagcagcaacaatttggtggagttaatggcacaccggcagcgatgccggtgccattcttgacaaatttcacccatcattcggcacaatgtgtgccgacaacggtcaatgaggacgcactgcggagcagtccaaggtggaggaggccagcaaaaattctgatcaattggaattagagtttttgatcaaaatcgttatgtttgccaacgaaatttttttcaaattctcgatgggcttaattgatgattttcttatagaaccacttttctgagatttttttgttttggatatttctaggtttaaaaaaaatttaatattttcgngggtgggcggggagggaggaaacggcgggtgggtggggcagatgagcttggtcccttttgcattcatcatcgaatctaacaccccttaaacagggtagccagatctgaggctttagcctcattttatgggtttttgataggtcaatgaggctaaattttcaaaatgaggctttgaggctttttatagttttttgagaaattttgaggctttttgaggcttttggggaaaatcgtcagaatctgttaaattttatgattaattttgataaataggcataatgtttgacaataatttaataatttgggtttttaaaaagttcaccgctaaatgatcaatgattattccaaattgaaaaaaaaaccaaaacattttgcaaaatgacagagcgcggacgtcaagctgtgatgagcacaacaacaacagtcagcaacaccaccactgccagcagcagttggccacgttgcaccaactgcatcaggcgaagagcacgccgctgaccacgagccggacaagcgccagcattggagccgcgtttgaccgcagcgttggcact

SEQ ID NO: 12401 - DNA, 713 bp, Heterodera glycines
aactcagtcatttgtaacgacaaataattctttcttttgcataatgggcaaactcagccatcatcttctttctcatcacttgcatcgtttaacaaattgaaaggattcgtgtcaaaaaaaaacaatttcaattatccaatgaaatatccataaaaaataaagtgagtgaagaaataatttaacaattctgctgagggaacgacgaatttatgtacccaaaaacactccaaaaaaccccagaaatttggtaaatttatttcagctccgcctccctctccgccccgcctgttcagtaccaatctttgcatttcccattgcacgccctttctccgtccgtttgctctcctccctcctcattcctcacaatttgcactttcatcccccaaatttcttgtccaaacgtgcgttgttctcgcccctgtcgagatttgagtgttttgttgctcttttgttagcccaagtgcccttctcacctctcctccccccccccccaattgtgatgcataaccatcggagacgaacacaaaatgatgaccaaaagagtgaccaaagggtgaccattgacccttcccctctccccatctttcccccttcccttctcccacactctcactcccttcccattcgcctgctgtaatgaaattatataactattagttaatttttataacataatctattgatgatatttaaacattaatttgattatatga

SEQ ID NO: 12402 - DNA, 1922 bp, Heterodera glycines
actaaaaatgcgccataatttattataaatctttgcggaccatggacgtcggattaaaaaaagcaaaatgtttgggaattaccgcccgctgagagagaaaatctgttgaaagaatttttagaaattgcggggaatttggggggggggggggagagaaggatgtgttgccggcagaagaaaatgcaaaaaggagggaatttcaaaaaggaatccaatattttgcactcattttgccccatccttcgcttttaaattttccaatttttacttttccccgcattttccccgtttctttcctttggccaaatcattcatttaaatgcctcccttttggccatttccttcgcttttaatcacacaaatcctccgtttccgccctcggacgacggattaaaatgtccaagtcatttcgtcaaaacatttcgtcgtctaataatttattatggagggcaaaatccgactgaatgaatgtcagcggatttggggctcaaaatcggctccgatttcaaatttacagctttttcttcttattcatatgtatatgatactggaaacaaagaaaaggatttaaaatttcaaagttttttcggtttcccatgataaattaattttaagtaataatttgctttattcatcttataattagcatatacaatgatttgagagtatctttttttctgaataaagttttccacaacagcaatactttttttttggaattattggacaaatcggaactgttaatttttttcgctttttaacaataaaatggtggtcaatgcaaaataagaaaatggaaagggattggagtgggggataatccgttgctaaattctcaaaaaaaaatcctcaaaacgatgcacaaaaaggggtaaatgccgcgcggcactttctgtaattatggcaaaatgccgacagacaaaaaaaaatgaaaaaaattgagaaaggtttagtgaaagtgtgaagaaaaaagagtgagcatttattttttgtttgctttggcactttttgtccataaaatggcaaattgcggcctttgccattcattcgttcgttctcgaaaggaaacagaaaaagaacaaaagaacgaaaaaagaacaaaaattattattatttatcaacagagtgaaggaatggcaaacattggaaaaaagggagaaaaaataagggagggggggggggggtaaaaattgaaaattcagtgagaaaaaaagatggaaattttgtagaagatgggtcagtcgacctttttgcgatttttcgtttttttccaagaattacaagcaaaagaaaattcatagaataaaaattaatgaaataatttttattttttatttaaaaatggacaatatttgagctcagcaaatgagcaaagagcagcagatgtgctcacacttacatttaacatggtcaatagcaaatacaatgtgagtgatacaataagcacttgaccaatgagtgaaatgcaataaataataattgaacgaagtgacaaaagcgaaaagcgacggagaaaaatggtcaaaaattaaggggaaaagcattgaaataaaagggaaaacacttaaaatgctaatttggaaaagaagctattcaaagtcaaaggttgtctcaacgtcctggacatttacggcgtgacatttgaagtgcagacaatttcggcactgttaccaatttgcgggccgaacttacagcgcccaattaaaaagacaatttgcggcggggcctattataaattatttccatgacaatgacggggtattttgtaaggaaaaagatgggaaaatggttgggcgattaaggcacaaaaagcgggggttaataagagccataaaagaaagggcgaagccgcatcacatccttattatgtaatgggaaaatgaaaaatgaatatttatgagtaaggtgggattttaggagaa

SEQ ID NO: 12403 - DNA, 1886 bp, Heterodera glycines
  unsure (1)..(1886): unsure at all n locations
ccgaaaacccgtccttttgnctatgtaagaaaataaataaaacaatgtaaccactttatgcactgatagatgaattaattagtgttgcgacaaaaaaatgagtttttttaaatttttggatgcatttttgaaaatttttcaaaaactcgatcctaaggggtgaatttttacagcaattggggtgagaatgaatatgaaaattaaaaaaaagtgaaattgcaaaaaaaaaataaaaaaaacacccgccccccttaattacaaaatttggcagaacaatgccgaaacgcgtcgcctgattcggcatcagatgagcacactgtgcaaggaagacactttctgtgcatcggtgaaattttagaaatggaaactttcaaatgattttaaatttcaaattgattttaaattaatgccaatgctttctcatttctcagtgcattttgccgtgtcgcgaatcgctgtacgaattcgacgtgtgttcccacactttgtgcagggtaaaacaaacatacccgacaattcactttgcttttccacttttgaggacactcccgacccaacgcattgtcgagagtcttgcgttttcatggaacaaattgcggccaaaaaggcgggccattgcccaccacaaaaaccgtcggtccccgtttcagtaaggcaatttggcaaattttttattaatttttggcacatttcgaaggaatgttcggcattttgtgacgtggacagcgattgtgccgaagtgctttctgcgaattgctcctcaaattgctccgaattcaggtggaaaaatgctgcgtggtcggctgcagtcgcttttgtctgtccccgtccctcaacgactcgcgccttctcccgcgccccgagggcataaccgtacacgagaggaagaggaaacggtaatgacattaccgtaataccagggagaagggcccttgttggacaacaccgtattgtgaaactacagaaggacaaacactcattttttcaatttaagctcggccattttgcgatgggttatgaagcgattgtcgccacaacacaccgccacaaattcgaactgtatttgccaaaatgaaaattgctcaatttgcttttttaagtgtttgtcatccaatggcgttggtccgtccacaaacaatcggacacaatggcaccttggcaaaccgtgggcatttttgaaattactaataaaaaataagaagaaattcttcaattctaaaaggcagcacttcacccattatttttttaaattttaattatttcttcttttttcagattatggtgcgcaacaaaatgtacgccattcttaagcatttgctttcgcccggccgcttttacattttccgagtggcggcagtgaatttgcacgggacatgtgagaaaagggcgaatgaatggggtgaaatatcggcgaatgtccgttcagacggattttcggagccaagtcgcccgcccttcaaattgagcaaagaagcgaaggcaccgccggtggggggaaagattaaaaattcacataaaaatggagaggaattgaaaatattcttaaaaagaactaaaatcattttatattaaactttttcctttggtttagaagctttaaaacacataaaatacattaagaaatgggcaaaatgttaggccgtgggtgggaatcgaaccaaacgtgcccacccaaaccgtggggagctttgccattgagctaccaagacacatccgcccggcttttattaatcccaattttccgcattttaacctctcattagccatcttcttctttacagtgtcaatgcttttccgtttaggcaccactcaatttgacttttgtttacgaccctttttcaccaacgccaaaaattgttggaatgcgccaatttcggaaattcctc

SEQ ID NO: 12404 - DNA, 2176 bp, Heterodera glycines
  unsure (1)..(2176): unsure at all n locations
ttttataatantgaatnaggagtcaataaagcaaaatttcgctttgagatgggagagcgaaaggaggagggcatgaattaattttcacgtcccaaaatggcgcctttcacgcaaacgcacggtccacccgagggctgagcccagtcttattgttggcaccaattgggacggcacgacaccgcacagactggttcggctctacgggtagaccggacgcagcggcacggcacaaaatggaatggcacgggacggcacagcgcaaagaaatgacgacaatgcgaatcaaattttctttattttttcaaaatggcgcggagatgatttgcaacattttttttataaatcggggagaattttagttattttttgttggagattagtgattgttgagcgaaagggattttttttcaatttttacttaatttaataattgctttctcgcccactcaccgaaatgctttgatgcgtgaaaagcctttgttcggttgccattcccatttcacatcctcgggccaaaagtcgttgcgccgtgcggagagaaaatgctaaaaaaaaacaaaatcattttttttctgtaaatgttgtaaagttgcgctacgagtcatacacggggtgtcttacttaacccaagggccatacgacggacgagtgggacagtgacaattttggggaagggggtggcaggcggtccgctgtgccgaggggggaggggtgtgtcgagacacctcttgtgcatgtatgtcacgtgtccatcgaaaaagcggcttttttgaagggcgaaacaataaaaatcgtgaggcagcccgttacaatgattttgcgacattacgaaaacccaaaaaatagtttatgcttgaatatggagggattttagttctaaatttgacggggaaataaaaaagtggcaaaaattaagggacggctaaaacccccagaaaatgctttcaaaaatctttcactaaaaatgacaaaaaagaagcataaattgttgtacaaaattggtaataaatatgtctgaaaaacaaaacctgtgtcaacccgtagaagtgctttgcactggtcacattgtgcaccggaataccaatgcccatccggtggtccatgtaatagtgctccatttcgtccatccaaaactggaccgactcgtccccgatggtgtgccgagtgttggcaaatgcgtggaccatcgagcgaatcttttgccgttcgtccgggtcgcccaagttgggtggattgttcacaacaatctgcaaaaaataataacttcaaaaatatttttaaaaaaattttgaaaattataaaacaaaatgaaacaaaataaattggcgaattaaagcaaaaatttccaatttaaaatgggaaaaaagaattccagctggacggatttgaaccatcgacctaaggatgtcaattgaacaactacagtcctccgctctaccaactgagctacagctggacacaatgaagccaataacaaaatactttataagtagaaatttttaaggcttaggttggaacaactagttacaccttttaatggataaaaactaaaacgaaagaataaaatttgtataaaacacacttataaaaaaaatcaaatcaaaatcaaaatgctgttaatatattcgaaaatagttcgattttatctaatttttggttaattaaatccattcctacaaaattacgtacactgttcgaagaaaaaaatggaaaaattttgattttttttttgtttaatttgccattttaaaagcataaaaaaacagacaacgaaaaacaaacaaaaaaggtgtgattattgtagagactgatatattttaaaacaatcttaaaggaatatcttaaaaagagcccacccagacgggaaatggtgctctcccaaaaataaattcttgacacatgaaaaaagggggggggggggtttcttggttttttttgtttttgtaaaccaaatttttgaggggaggccgcaaagtcgaattcgacaatcttctttttgttatgttacttttaaaaatgcttttatatcaaacatgaacctgaacggtggcgccgtagtgccaaaaatagttctctagcgcccggtagtgggggatggcatacgagtctttgaccagcaggttgaccggctccaacccctcgcgcaactgactgcacccgtacacggcgaacacca

SEQ ID NO: 12405 - DNA, 2069 bp, Heterodera glycines
ttcttagaaagctaaacgaaaaaaaaaaataacgattcgctcccccaaaggaaataattagagttttaatagtaattagtcacctctttcccttctgtttaaaaatttttttataattttttcttggcggagtttcgcagacggagttttgtcctgctccgaacgtggagaggggaagtgtacccaccgaaattgccgcgtccgccatcgcttcgcccatccgtcgacagacgggcgaggcccgatttgtccgtcgaacagccgcaatcatcaggaacatgttgtccacaccgacagctaaattatttttgaattttaaaattaaaattattttgcacccaataaacaatcaaacaacaaaaaggttgcaatttcaatggaattaacagaaacatttatccctgaaggctcatttcaggtccgttgaaactcaaatcccttatttataatttaaatgtatacaatgccatttaaaatggcaaatgtgggcattttagccaaaaaaatttttcttcatttgagggaaaacagttgaaacgaaattgtgggttatatttttttaaattcagttttaatttttggacgacggtgcctttttggtccattttctcggacagtaaatataggtcgtcactttggcagaccatattttgaaaaaaaatttcagcgtttttttggtaaaatttgcgaaaaattcaaaaaagctgctccatcggtacttttcggttttgtgcctacacctcaaaattttaaaaaatgtcaacaaagggcgcgctgaaggcattttagtatgcgccctattttggggccataaatgcaacaatctgaagcaaaatttcttcaaaagggtccacattgcgtcttttgcaatcctcgcgccaaaggaactcgcacaaataggagttaagcatcgctttcacattatgtaatttatacgcaaaattgggaggggaggacctttaccgttccgttaatttatgctatgagaatagtaattgtaaaaaatgccttcagcgcgctcttgccccacacaccaatttttacgggctcggcacaaaaacactcaccaacaaccaggaagggcatcacgccgacaatgtcgttgtagggcaccgagcacatgttcagcagtccgatggccgtcacaatgcccatgccgcgttggccacacccaaaatggccagcaccggcttggacagtgtccagtcaatgtaacagttgcgggcacgacaggtggacatgttgcacaacacctgcaaattataggataaaggcaatgaaaaatttgaaaaactgtgaaaagttgggctttgaaccaattttcgtagcaaagatttcgccaatttcaaaatattttgcacatcgtgccaattatcgacatggtcaaaccaaaacatttgcgttgtgtttatcaaaattgagacaaaaaaaaatattaaaaattgtttcttgaaccaaatacataaaaaatatatattggacaaattaaaaattattgggtgctcaaattgagttattcctttaagcatgtggaattgtcaccaaaaataattgccatagtttaaatttagtccgctgaaatttgaaaaaaaacatcgcttaccgagaacatgatgaggatgaaaaaggcgaacacaaaacggggcaccagcgtgtccgcgttgcgtttcaactcttcggccaatgtctgacaaaaaaaaagggtaggcgggtatgaaaaaaaatacatacagtaatcaatttagcgcaaaaaccaaagccaaccgtaattttttttattggactattgccaaaagtaattggttgcttacaattaactgtctacaatttgcacccaattgtataaaaatttcggattttacaatgcttttaggggaaaatttttttgtttcactcaggcgttggctatcctttaaaaatatatcaaaaactggctttttggctctgttttttgatttgattttttaaaatttcgattttttttgcaccctattgttattccataaaaataaaaaaacctgtgagtaaagataggtgaagctgatgtatgggcttttgtaggtgcgaat

SEQ ID NO: 12406 - DNA, 1073 bp, Heterodera glycines
  unsure (1)..(1073): unsure at all n locations
aaaaaaaaaaaaaaaagaaaaaaaagcgggtgggggaaaaaaaaaaaaaagggggggggggggtaaaaaaaaataaaaataaaaaaaaaaaaaaaaaataaaataaataaaaataaaaaacaaacacaaataaataaggataaacataaaaaataaaaaataaattgaaaataaaaaagagggaaaaaaaaaaaaaaaaagagaaaaaaaaaaaaaagaaaaaaaaaaaaaaagaagaaaaaaaagagggcggggggggggaagaaaanaaaaaaaaaaaaagaaagaaaaaaaataaaaagaaaaaaataaaaaaaaaaaagggggggcggggggaaaaaaaaaaaaaaaaaaaaaaaaaaaaaaaaaaaaaaaaaaaaaaaggggggggggggaaaaaaaaaaaaaaaaaaggggggggggaaaaaaaaaaaaaaaaaaaaaaaaaaaaaaaaaaaaaaaagggggggggggggggaaaaaaaagaaaaaaaaaaaaaaaaaaaaaaaaaaaaaaaaaaaaaaaaaaaaaaaaaaaaaaaaaaaaaaaaaaaagaaaaaaaaaaaaaaaaaaaaaaaaaaaaagggggaaaaaaaaaaaaaaaaaaaaaaaaaaaaaaaaggggggagaaaaaaaacaaataaacaacctaaaaaaaaaaaaaaaaaaaaaaaagaaaaaaaagaaaaaaaaaaaaaaaaaaaaaaaaatggggggggaaaaaaaaaaaaaaaaaaaaaaaaaaaaaaaaaaaaaaaaaaaaaaaaaaaaaaaaaaaaaaaaaaaaaataaaaaaaaaatgaaagaaaaagtaaagaaaaaaaagaaaaaaaaaaagaaaaaaaaaaaaaaaaaaaaaaaaaaaaaaaaaaaaaaaaaaaaaaaaaaaaaaaaaaaaaaaaaaaaaaaaaaaaaaaaaaaaaaaaaaaaaaaaaaaaaaaaaaaaaaaaaaaaaaaaaaaaaaaaaaaaaaaaaaaaaaaaatacaagaaaaataaaaaaaaaaaaaaaaaaaaaaggggggggaaaaaaaaaaaaaaaaaaaaaaaaaaaaagaaaaaaaaaaaaaaaaa

SEQ ID NO: 12407 - DNA, 5485 bp, Heterodera glycines
atttgctcgtgaaatgcgaaccatcttcacattgaatgtcggccaatgtttggccgatgtcggtgtggcacgagtaaaagaactgagctcccgtcgcacatttataacaaccagagatgttctttggtgttatggcgcacaaactctggtgcatttccatggacattcttagactgtccatttgaatgttcaattggaccggactgtatccggttatggcgaatattcgcctcccgatattccgcaactcgtaatggcggaacgagagcggaagtctccgctgagggtcttccattagaccctcgagattggcgacgcgacaatggcacgagactgtcccgtctgtgtgatcgggaagacagcccgtgcatgcgtcaattcccagagtacagttgaaagcttgggcggctttcaagtctgtacaatggaaagagtccgtgattttctcacggacaagggcgacatttcgcccttcaatcaggaagtcagcgttcaataggggggccggtgcttggctgacccctattgttgaaatgctgatgttgtgccatttgagcacacgacctggaagaagcacagtttcgactgtggcacttcttccagtggtagagtcgaggcgaagttgaatatggatgccaaactcccaagagttgcatccaatgacttcgtaaatggctgatgagcgtggtttggcaaaccacttgtagaagagacaagaactggcggcgaggagacattggtttccccaaaaagccgtgctgtcgatgcagaaactgttcccggggaacatttctgtctccctcagctctcggatggctgtggagggtcggacttttgtacaaaagtctccgaaacatgagccagcagacggacatcgtttgctggctatggaagcgatctcgtgatcgtttccatgccttggtgaaggcttggcattcgagggagagtcctttcaagatcacttgaagggttcccaaaatgagaccatcatcggtctttattgacaggacattcggttgtcctgccgggagaagcgcaagagtcacgcttcccttgacttgacacattttagttgtgccgttgttgagacagctctctgatttggccattatggccactgtctcaattcccccgtgtacaaacgggagagatgccatgacaagcattgccatttggctaactcggccactggcccagtttcttgttgctggcctgggccggcgtattcgtcggtgaggatagaggaggttttcctcctcctcactcaatacccatgtctcttttcgcggcttgaataagcgcgcgaacaagactgagaaaatccaaaaaaggattctcagtcctgccatggcgtatcccaccatggaacacatggtgaagatgaagcacaagagacttagggacaggcctcctgccagcattgccgcaatgacaggctggcatgttggattcacaagttgtgtgaaacaaaaatagcagtcgatgagatcacattcatcgactgccgggcaggtcgtgtttgatgtgaaggtgtgctgtgagtcagtccaaaatctggcctcacagtgatgattgttgagtaggacttcgattggtagttcgaagttcaaggctttgatgccttgccgaactatgcagctttctgcacagcatatttcgaacttttggatttcgggtggcactgttacgacgattcctttcgtgtaacaagtgaggccacactcatcacatttcccaattgggaaaccacttgcatagggaagagcaagtgtgagaatgatcatggccactactggaagcatttccagtagtttggcctttcttctggtgaccatttgatgtcccggctctcgagcgagcttgggatggttttcatttggctgttcagttgcagcaacagcttcagttcctgggtccgtcatttcaggacccgcttccaaagggaagatgcggttcactggacgagtaaggactgtctttcgtggcatgtcctttggtttcctgttgttggtccctcggacagggatttcaactttaacacttcggatggctccaggccgtccgtgtgtttcaacgattcgtcccattggccattgattgcgaggaacgaggtcctgagagattaggaccaccatccctttcttcggttcaccgaagttttggagtcgtgggcctttgtggtcccactgggctctttctctgagtaatgttaaatactcagagtgccatttggcccagaaaacgtcgttggcttcccgaagtgcttgtattcgggaagctagacgttcgtgtgtggaggaaatctgttcctctgaatcaattgggtctgttgcggtttcccaattgatctgaatctctggttgtaagagattgatgggacgcagtggaactggtccatccactgcgtctgagaccgcagtaatcggtctgtaattgagggtggcctccacttcggccacgaatgtgttgagttggtcgaaggaaagaatccttcggcccaaagttcgcttgaagcagtccttgactagcttcacgaggcgctcgtaaaagcctcctgcccaaggacttatttgggcaatgaatcgccactggattcgattatgggtcaggaagttttgtacttcctgatccggccccggagcactgagaagctccagggttttctgagcgagcttgaatgtcgtagcgttgtcgctccaaatgatgtcgggttttccccgtcgacttatgaatcgacggagaacattgatgaatgattccgatgtgaggtccaatgttgcctcaaggtagacagcgcgcgtggcgaggcatgttatgatgaggatccatgcctttattttttctccggccaacgagattgtcgttggcccgagatagtcaattccaatggactgaaatggcgcgtgtcggcgcactcgctcacccggcaagggtggcatggttggtaatgcaaattgttgtgcattcattcggcgacagagaagacagtcccgaagagctcgtttaacatttaaacgtgcacttggcatccagaattcgctcaggaattctgtcagagtagtgtccactccaaggtgatgccttttttggtgccgatccaagatgatcagctttgccaaagctgaatgcttggcaagaagaatgggatgagagaagctgtacggcttctcactcatctccagtctggttctcagacggagaattccgtcgtctccagtcactgttttaaagtgctggaattcttcagcgtcatccatctggtctaggcggatgagaactcgctccgcgagtgcgaagtcttccgccttgaagtccccagacttggaaatctggcgaatttcctttctgtgcttcacgagtgaagcaatcggttcttcgcctcttttgaacattaaggcgaggaatcttaatacgaacattgttgttcgcataaggcgtttccatgagctgaagcgtgaggggtcaattaagacctgctcatttggctggtttgagtgagtatgtgcgagaaacgcaccactcgggccaacattctctgttgagtctggctgttgatccgactctgttacttgaaaacagagttcgctgggccaatggtgactcgcttgtgcgagccaaggtggccctttccaccaaagatgatggttgcggagctccgaaggagttgctccgcgtgttgcgaggtccgctgggttgtccccagtacggacgaaatgaaaggtacatccgagacattcttggatttctttcagccttcgctcaacaaattgtggttgagtttcatgggttttgacccatgacagagcgatttgtgaatcgctccaaagatgaaggctggcaattggacggcgcaactgcctttgagcaaatttgagtgctctggtccccaccaggatggccaaaagctccatcctgggtatcgtgagtgcctttgaggcactctttggcttcaaacgatttttggagaaaatcagccacgcttgaaccttgtcgttcatggcgcagcgtacgtatatcgcggtcgcgaatgtgtggaccgatgcgtccacaaaagcgtggagctcaattgactgtgtgtcattgagcattgctcggcgaggaactctgatttcctcgtctttccattgtctttggatagaattccagcggattgagtcctcttctgagagggcatcatcccaagagtggccctccttccaaagttcttggaagagtcgtttggctggcaaaatgcatggcccaaggacccccaaagggtcgaagagcgatgctagatggctgaggaccagtcttcgtgtgactggcctcaatggatcaggtgttgggaatttgaagacaatttcgtctttctcggtgtcccaaggaaggccaaggactttggccttcggcttatcaagctgatcctcctgagggatttgtttcatcacctcttttgagttagagatgaactccctcaggttgaagcatccttgttggaggatgtccttggaaaatttgtatttttccaaggcctcctgtaccgtctcgcactcgaggagtacattgtccacataaatggactccgaaatctccctggacagtggggagtcgaactgttgcaagtgatggcggagtgtcgccgccaaaatgaatggcgagctgacgaccccgaacgcaactcggcaaaatcgaaatattgccaagttgtcgggagtcagtccctttgaagtgtcctttagccagaggaacttcgtgacctcccggtcttccggctccaatgaaatttggagaaatgcggcttgaatgtccgcgagaagtggaaaagtcgggcaacggaaccgaagaagcatgcctgccaaatctggcagaagcaatgggcctcggaagaggcagctgttgaggcttggtgttccgcgtgtgtgtgcactcgcgtcataaacgacgcgtagctttttggtgagcactccatggtgaaggaggaagtgctcaagctgtccaggagccctttgggcctcctcgctgatgccctgttgcagttgatcgcagatggtggcatcgtacttctccagaatttctggagaatgtcggagtttggttagcaccgatgacagcctgctgtgggccattttgaaattggaagagaggtccggattggactccttccacggccatttgacggagtatcttccgtcagcttcctgacggatggatttgttaaacagcttcagagctgtttggtcgtcatcctgggcaggatcatcctggatccccaaggattcgaggttgaagaaatgctcaacctcattgatggttggcatttgttctacattagtgctgtggatggccatcattgagagagctttttgatttgagttcggcggtccaatgttggactcgccatttatcatcgggccaaacgatgtgttgatcacaaacagcccgggagacacttctctcttcccttggaagaattgccagaagtgtcttgcgctgaggagtatcattg

SEQ ID NO: 12408 - DNA, 4564 bp, Heterodera glycines
cgcattccgtgccgcacttcgcaaatgtcgcgtcttttggtctccggtaaattgaaaaacaaaaagagaagagcgatcaaaatgggctgaattgcttttacgttattttcacttttaatttttgctttttttttaatgactgaccgtaacaaaaagcaaaaagtaagcggaggcaacgccaatggaagcgcggagggggaggaaaatagcgagaagaaaggtacgactgatcagatggaaaccgaagtgatcggaagtggacagaaatacctgatcatttggcagagattagcccacccttgggcagccgaacgcgcactttgctcgacgagttcagaggccaaaaagtaacagatgggaccggggccaaaggcaaaagcgacggtgaaaagcgaaatggccacgatcagacagaggccgagccaactcagctgatcggaaacaatttgatcagaaagccgatagcatttaatttatttgatattcctttttcaattgccccggcgatggcttcccttcccaccaacttccgtcttcgcataagcatacataaggccactgattacgatgttcatcaagagaatggccgttaacgtgacaagaagcagacgacgtcgtccaaaacggtcgatcagaagggcggaggcgatgttggagatctaatgagaataattaatgtggtaattagcggggaaggaatcaaaagaattggtaccaaactgagcagggcaaggccaacattgtcaatggaagcccaatactcagagacaccagtggtacggaaaagctccacagcaaaagcattgatcactaacggaaggggaaaaggcattatcacaaggcaaatttaagaccggcaattccgctgaatcccatggacaatgagacgacgctgccaattctgaaaatgaaaaacccaagtgagaattgacacttataatgggtgacttaaaaagtgccctttcggttggctcccttttgctttgccagccgaaaaagtccgatggaacggtgccgaacacttcgcagagtttctcttctcagttcgcccattcgctcttccaaaatttggcccgaacaattatgataaaatgccaaagaatgtcgcgcgagtgtttcattattacgaagcaaaagaaaactgaactcaaaaagagttttattggaatgtgaattggcaaacctcggactttcttctgccaccattgtcaaaatgattgttgtggccaaaagttgagtgccttcgattgtgaacattacccaccacaaatttgaagagcccaaaacgcgcggaattgccacgaaagagccaaaaacagtgccgagctgaagcaatgcgccggtgctcatcgaaacaaaaccacggcaatatttgggacttaaaattcgaaaagggatgccattgacagaaccacgggaaagcacctgcactcggccaagaaaatgccagccaacccgagacataaagccaataaaaagccaatggcaaaacgagaaaggcacagcaattcgaaccgattcagcttaaagcaaacaaaaaaaaaatgaataaaaggcattggcatacaaaataggaaaaggcactgcagaaaaggccgaaggtgcacaacaaattgctgaagaaaagaactcgaagacgcccaaagcggtcagccaacggacggatggaaagagagccaaagatggcaccgaggaaaagcattgagacgatcaaactccaaaagaccttttgcggaaagaggggggggggataattgtgggtcactaccaaaggagaaaaaaagaaatccctctggaaaatatgccaaatttcgatttcgtacctccaattgttttgtgtccattctcttcccataatttatgtgaagcgatgagttgagaaacaaaagaaaggtttgttgggacggatttgtgatggtaatttgaatgccaaagtgaaaggcaccggagagaccgaccaaaagggcgaccagcgaaaggcgcaaagacggcatagaggaagaggaaggagaagcggacgaaggaggaggaggaggagaagcgggggaagaggaaggacgaaaagcggatggaagaggaggatggacggaagaagcggcagaggaaaagcgacagtcattcattagaaagatggaaaagcaaatgaggaagcagaatagattgatgaggaggaggaagagaagtgaagaaaaagaatggaattggaagaggaaaaagagaaaggtaatttgatgggaggatggaagtaggaaaagaagaaaagtgcgggaacaaatgttgcgaacgcatggaaaaagagccataaatgggaagtcgacccttccattgttgaaaacatcggcaaatatttgttttttaattgaaaatgaattgagggaaagtcaaatactatgtaaacgggataaatttattattaaaaaatatctttcaaattttaaattgtgcctttgccatttacacaacaaaaagtctataaattcataacttttattctttttttaatgtttaaattttctgagatcattagcgtgtctgtctcgcattaatagatgagcaaatgatgagtaataattaattaattgttcaattaatggtcttttgcctctctccgtctcttcgctcactttggcactttctctccccccttttctgctctctcctccctattttctgctgctgattccgtcgtgtccttctgtcggctgttgctcctctgcttgtggtaacggtacacagtgtatttccgattggcatttatattaacggaagtgctgtggcatttgcgaagcattgaaatcggaggggacgaattggacaacggcgagtggggaggggagaaagagtcgcggaatcgcctgctaaagagcacaaattgggcaattagtgacggaccgagcggatgaaagcattgagaaaaaccaaaaagacagctaaagcaccttttgttgagcaatatgcttcggttggagcgaaagctggactgattgtgggcggatgaaaactgattggttctgctaattcgtctaattagcgtcgtcgtttgtgctccgcaaattgccggcagtgtgccgctgtcgccgaatgcgaacgttgtccgtttgcgacaatcgccgcgacttttgaaaatgccgaatcggtagagaaaggggttgatgcaagtgctgacggatgactcatcagaaattaggccatagataattagtaattacctggccagcagaatggactgaagccaattgaaatttgaggccaactgttcgcactttgactcgggctcacagaccacgcgaagaagtgccatcacctgagaagcattgaatgattgattcattgggaagggggaggggaaacacctgataaggcagccaactgagcacgaaagtgcacacaatggcggcggttgccttcagaaagcgcaattttgtgttttgctgaagccgtttgtgctggtcggtgttggccaaacaattggactgacgcagcgaagcgccctgatggcgaagggacaagccgatggagacgtagcagaacaaaatgacacccaaagggatgtagaaggtggtgatcacatggaagaagtggaaactgaagcggcaataaggtggataagaggaaaaaggagagagaaaatcacacatgggcgaatgaggggggggggtgggatcaatgggggataggcggcacaagaaagggggatgaggaggagggataacaaaggggatggggatgtaaagaaaaagcgacaaaggggggagggggaatcaaaagggacgagaaaggaggggggggtaagggggagagtgccagcaatggaaaagtgacccagaaaaaagtgccaaaaggaaaaagacactgaacgggaaaccaaaatggagaagaacttacacaatgatatgactggcgttgaacccttgaagatggtagcattggacgaacggcgtgtgggggatgggccgagtgccacggaagacggtcatcggaagagcgcagagaatggctagcagccatgccattgcgatcagccaagtgacacggcgatttccgtttgggacactgcccaatggcactctgagaaaggcacaggtcaatttgagaatgaaattgacaaaagaaagagagaagccgaaacgaaagccaatgagttaccgaccgaatacagtataacatgtcgatggcaattgcggctaccatattggaccagagatggaaaggaagtgcggagagaaaggaatacattttgcaaaggccgttcccttgggtccagtgaatgttctgaaggggtcactggtcatttcaggctctttgcggtggtggcatgggatgacgcgttggcttcgccggcgccgaacgcgtgccgcacgcagcagacgacgcggcacaaattgccgcagcccagcgacacttcgccatcctccggcgcctaattttatttttaaatttaattgagaaacaaaaaatttataagatttttaaattatctaagtaaaaatatttatttatccgaaatggaaaagaaatttatttaagtaaataattgaataaaataaatatttactttaatatt

SEQ ID NO: 12409 - DNA, 1024 bp, Heterodera glycines
  unsure (1)..(1024): unsure at all n locations
ttatttttncactcatttttaaaaatattttataataccatattaatttttcttatagttttttaaggaataatttttacaaattaatattattttttcggcttcatcttacttctttaaatttttatttcaagtttttagggaatgtagtagtaaagctgtgccaaaactttgtgcaaacgaaaaagattttaaccatattttatattttaaattgataataatttcgtaaattcaaaaaataattgtttatttttgctcgtcttcatataagtttttgatttttgtgaaacattaacagttttatattaattgttttttgtttttctttacgtgtaattttaaagctgttttttttaatttaaaatatataaaaaatattaaaaatatcatttttaaaaaattttaaatgtttggcgctactcaaacgttaatttatttgatttacgatataatattctgaagataatcatatatttaattatttatttcacattccactgtcgcagtgttttttctctaatttattaaaatatttgctttccatgtgcaaagttcacaaagcatgtctttttgtgtgaacggtattacagacaaatgttatagtataatttgttttttaataaatatattatgaataattttatatttaaattgcataaccataaataaaagaaaatgggtttttttacaattttattttatttacatacaacggttgtttcttattttatttaatgaattacatttaataattattaaaaagcaatcaataaataattttaattcctttaatttattttattagttaaaaatttaatagttattgaataaataattcttcacaaatcaattgttgtctcattttgttttattgattacgatgttaaatatgcaattataaatatattaattttttttataagttcatttctgtaattttaaataactgcaatttttataagttctttcgtttaatattatgcatttttattttctatgcataagtaaccaggttaatatt

SEQ ID NO: 12410 - DNA, 1856 bp, Heterodera glycines
tcagtcagaacaatcatatatcaattaaattcctaaagacgattaaaatttgaaaaaataaagaaaaattattataaaatccatttgataccattcaattgcccgtaatcaggttaatgcattcatgtgacgaacagaaagttatgacgaaaaacgttcaaaaactctgtttttgagtttctcaggttataacttttttgatacttaatgtattttttgagattttgcaggataatagaaaaatcaagcctttaaaatttggaaactttaggcaatgaataattttttgtcaaaaattttccatttgatgatttcaaaagtgccgaggacagtttgtaaaatttgtctaaagcgatttttgtcccaaagaatttaacataatcgaaattttaacaaaagtttaaactccatgatcaaaatttttcaaataacttttttcacaaggtgcaatacggagagccggtgctaggtcgtttcctaaaaaccgccaccatgggcgtttcctaaaaaccgccaaatgggcgtttcctaaatccgccagggcgtttcctaaaaaccgccatgtggtaggaaaacaaaaaatgtaagacatataaattcataacttggtccattttcaaccaaattaataattcttggtatcattcaatagctctaggtgttttctatcagaatataattttattaaattttttacttaagtatataaaaagatatggtaattaaattccacaaaaccttaagtcagaattttttgtccagaacttttttgaaactcaatgaaattttttgaaattttaaagataaatagaataaatagagtacttgaaattctaaaaagaaaatttaatctatttgcttctgaaaaaaagttataaatcattgaacaggctatgttttttgccatggtcatgcaaatgtaattaaaaacatttaaatttttcaagtcattaaaatgcaattaagtcaaaatgaatttatatattcgatacacctaaaaattctctattagcttgtttcaaaaatttcattgaggttcaaaaaagttctggacaaaaaattccgacttaaggttttgtggaatttaattaccatatctttttatatatttaagtaaaaaatttaataaaattatattctgatagaaaacacctagagctattgaatgataccaagaattattaatttggttgaaaatggaccaagttatgaatttatatgtcttacatttttttgttttcctaccacatggcggtttttaggaaacgccctggcggatttaggaaacgccctggcggatttaggaaacgccctggcggatttaggaaacgcccatggtggcggtttttaggaaacgacccagcacggacggaactgacccctacccgcggttggtcgatcgacgaaaagtgcaaaattagctaaatttttgagtaaatcaactcataacttttccctgacgcaaccaaattgcacaatcttggtatcatacaatagcccttcaaatgcattattaattgtgagctaaacaattttccttttaatgtacactaaaaacttgaaatacaattcactttatgtatcgaaaatgctttaaatttacgtgcacttgtcaccaaaaatgtgaaattacaattcattttatggatcaaaaatttttcttgggattttcccttgtaaaaatggaagagccgatctcgagttaaaaactagacagctaaaaaataaactgtgattcgatagagggggtcaaaatatgggcctatgcaaaattttaagaagattggtcaataggaaaaattttttttcaaggacaaagttttttctttttcaggtttaaatttccttcccatttt

SEQ ID NO: 12411 - DNA, 3912 bp, Heterodera glycines
  unsure (1)..(3912): unsure at all n locations
gaatggtcctcgaaacatttagcagattttaattaaaaaatacaatgaaactgatcccgtcaacgccaccaacggaatgcgcattgtccaccgaattcagcggcncaatgacaacctgtttgaaaccgtttcncagagacattaagccaaatctgacgattaaaatatattcttacgggatctagcataaaatatgagtgcgaaatgccacactagtaatactaaaaataagtgatgtctaattctttatcgaataaaaaaaatatttacaattacttacaagaaaatgtacaaaaagatttggctctgtgcacttaatgtgtccactcgacttttaggcgtccaatcaatgaccacaactttttctgaagatggtcacttacacgccaaaattggaggagattcttcctttctctcccgcattcactcttcctttttcttctcttcgatggcttcttctttttgttcgatattttcgttgtatttttcttcaatttcacaaaaaacaatttgattcattgccgaacaaattgcaaaaactgggccactgaaaatcggcaacagccaactgtcgttgaagaagtgagcagaaacgatgcgaatgatgcgagaagagagccgatgccaacacttggtgggagaattgcaaaagtcggaagtattgcaaatgagcagcaaagagatggacaacggatgaaagacgaaaaaggcaataagacgaaaccatttgcgattacttagaagaaatgcgtgaaaaagggaatggtagaaacatcacccacaaaatcagcgtggaaattgcttgaggaagcaaaagggacgaaagcaaaagagccaatgggaaatggacgagactcagagagccgaggaacaacgccagctgaacagcgagcgcaaaacgagcgaagtgaatgttggcacgaagaggagaactgctgaaaaaagtcagtaaacatagagttaaagtgtagaaactgacatcggaatgagaaagaaaacgccaagaatgaacagagggaggagcaaagtgagcggaacagccaatgttcttgcagggaaacggggatcggcgtagaggaacagctggagtccgtagaaagagagggccaccaaaggtgcaaagagcattcgagcgagtgccggactaacggacgccaaatgcacagcaccgcccatgcggaaccattcacgcactgcctgaacaaccgaatgaacaagtctttcatgacagaatgaaccaaaagcagtaaaggcgacagcaaaaggcccatcaaaggcatgtaaaaagccaccgaaacgaatcggtgagggctgaccaatacatacaacaaataggagtggtggaacttctccaaaaggttgttcaaagagcgcacagcaccctcaatcaaaaggactgtgtcaaccaagtcgacaatggtcgatgagtgatgctgttgttccctttcttcgtcattatttttcgcagtgtgcgcactcaaagccaccgcattaatgccgtaacggccgatgacactcgccaacgactcgacttcgttcatgctctaaaatgttgcagatacgatgggcccagtttctgacgaattacttgtgccaaaataccgcgaatgacagttttggccgatttttgataatcttcgtcgtccatcccacgattctgaggcactccatgaatagaagtcacagtgccggctttctcaaccagaagtacgcagagattcagcagatccatattgggcagtttgccattgaccttttaaatgaatggatcgtaaaacaaataaaagcagaacccaccatgctgaattggagatcaatgtgggagaaaatggttccagaaaagtctaaaacataggcacctattatttggcctccatgaagttcaagatggaaatcatcatcatatccgcccaaagattttatgaaggggtgacgatgcccgtgatagtcagcgaaccaagcttcggccgcaactttgtcgcctccatcgatgaacaagaaaatcaaatctcgggcccagtaggactgtcctatacgaagtgtgaatcatgtccgtatgagtcatcttgggcccatagccaaaaagggagcacaccgacaacatttgttttctcatagaatagggagggcatttgtccctctcccttggctacgagccgaaatggcacaacttttagcataatcagcaaaagctaaggcaacagcaaccgcttcaatcttagaagaacgcattgggacagcgagaagaatggactcggccgggttggcacgaaaggaacggacaattccatagacattcactttatccacggaagagttagtcttaaaccttcgattattgtgattactaaactgaaataagcgaattcgaaattgccaaaaaagatgacggagtcagtctgaacgagtgtttggccacttcaacgcccatttcgaccagagcattaacgatgtaatcgcgaagttcactgggaataggaaaagcctgtctcttcgaatccaaatggcatttccaaaccatcacctctttttgtcaccaacattcctgcgcaaatccctcagaaaatggtccagtttcgaagtatccttccaattttcctcaacaagtccagccagcagcgcgttttcttgaattttcgctttctccgtaccaaaatgagaaataacaaaaacggcgtatgcgaatgccaaaaaatggagaaacaaagagacggggccgactcgatcgatcagcagccgaatcagtttgggaggcttggccttggaggtcccaataaattgactgcgaatcatcgcactcaatcaaatgtgtgaaaaatagttgaaacgttattagagtaaatttgatttaaaacaaaagacaaatgcaaagaaaaatgttaaaatacaaagttttattattttaatcattataaacaatattttgaatttaaaacagtacaatatgaaaatgaggtctttcaaaatgaaaaaaaactggtacttttccattatgctgacacaccacaaatttattgggctttatgctgacacaccccaaatttattgggcttttatgcttcttaaataatttttgcggcgttttaaaggacgacgacgatccattcgatggcattttagcgcaaattgcggcctttatgcctcctaaataatcgttgcgtgccaaaactgtttggggtgtgtcagcataatggaaaagtaccaaatattttgtgttctttttctgtctatttaaatacctacatatttcgcgattttccgtcagttcattttgtattttcctgtttccgagaaaaattaataaatatgtatgttgcgtggtccaaaacaactatataacaatttaagggtttctcacaacataaatgtctttttttcatgttgaaacaaaaactacgattttggtatcattcaaaatagtgatcaaatatagtcaaaaatggatgattagtgaataatttgacgcataggtaaactatgtttagaatactctataaagaataattacttaattctttctcttcaaaagcgcttttccgttgtaatgaaaaacaaacgctgcttcggatgcatggacaccaaaacggtgcattttaaacatttcttggaccttttccgggttttgtgtacacatccaaaattttagtgacaaaaaacctttttgtgccatccaaaaactccgtgcatcttttgntacatttttntttaaatttggggggtttgtacacacaaaaccgaaaagttacccatttctcgtccataaccttttttgtgtaccttattggttttgctttttttcagtggcgtttatgtggcagcatctgtcggcattttgctcaacattgtcactggcattgcattacttagcacgagacatttttgctggaggcgttcgtaagttttgaaaatgaa

SEQ ID NO: 12412 - DNA, 1940 bp, Heterodera glycines
tttgaaatcagtaaaattttgaaggaaattgtagacatcaaaaagcagcatttataatagcaaaaaaagaaataaatggtaaaatcacttttctgctgaacaaagatagtgaggacgccattcggcatggatgccaaagagttcctcgttgtcctgtcgaagatggtcaatcagttgctataacttgggagacgtgttgacgaggacaacttggtggacgagggacaattggcagactcactactattcaatatgttggatatgtagtcgaatgacaatgtgtttaaatgtgtgaaaatgtcatgaaaattggataatatcactttcgaaatagctttcggattgaaatgctcttctgtagaaaagttcggcgccccaagggacgactcaaaaagttgagagggcgaaatggcaaatgcaattggaaatttttgcgatggcatcaaaacaggaaaagcaattttaaaaaattcattaattgcaaaagaaacacggattaattaccgaataaaattaggtaaatggacaatcagagataccgaaataatttatccgtctctaatacatcatctgagaagagacaattacataaaacattcaaaatatatcacgagtgatacattcaaaaaaacagtcagtgaaacggaagaacaacaacaatttctcaaaacatccaaattttccacctcaatcttcggcattaacttcttcggcagatacagtctgaacataacatggaatagaaaattaaaagaaatcaggaacataaacataaattcatttacatgtgtagggaaaacccaggcaagcaaattccaaatttcaagtttatcagtttttctttgttacctgcgacgtgtcaatcggtgacgttctgcccaagcggtacagacgagccaactgacgacgaatacaaagcagatctaaaaaagatataattgcaaaaattgataaacataaaatatttactttcaatatgggcgttgcattctccttcatttgcccttataacgtcatcgctaatgttttgagcatagaccaaaaccgagttgatacaatgaaccaattcgattttctaaattctttttttattgacaaaaatttgtttattttgtttctgccttggacttgtaaaaacttttatgccaaaaatggccatattttcctagtaattagcctacttttttccttccagcattcttgcggattagctcagctctaacccatgaattttgtttctgccacacaaaacaatcataggccttggaaacccgggtgaaggcccatcgaatgtcaaacggaagattggaaatgagttcgaaaagcaattcggatggaattctcccattcttactccccattttttgaatggaaatcatgggagaaaatggcgcattttgtacttttcaaatagaaaaatgaggcggaaagaaaaaaagagagaggccgtgggaaagggataaaaaaggattatagtaaatcatttaagtattttctaataaaaataatgtacaagcgtcatgttaaaattaaatcccttcttacttttgaaatggaagaagaaacgggggacaggcgacgcttaaaaataatttaaatagtattacaataacttctcagatcgtttaatattcatttcccacactatctactatatctctctcttcttttcagctagccttcctccccccttagttaatttagttggatactgtactaattagattttataagttagatgctttttttctaacttttttaatcggcggagtgctcgtgtcgatgcccatccgttggcgcttccattgcttatccccatgatccatccgacggactagcatcagcaaaatgcaatcgttgtgctgcgcccactcgggcaaaccgacaccgtctaacggcaacagatcgacatctgaaagaaataacaaatcacagacggc

SEQ ID NO: 12413 - DNA, 2454 bp, Heterodera glycines
ccgctttcagcgtgaacacataaccgtctttgattgtcgggtggtcgacaaagtccagcacaccaatttggttttccttgtcgcagaaagtaacacattcgctgtatttgtccaaaagttgccctcctataaaacaatttttgtaaaacgacatcaataaatggattgagagaaaagcaggaacgaaaacaagtgcttaattacataccttcgggtttgttgatgatcatcatacacaccttctcatcccagctgtccctcagctccaccacgtacttccaaacagcgcacgagtccgtcagtccgatcaaaaagatgcgtcctcctccgtcaccgcttccactctgttcgccttccgacacggttgtcatcatctcacgacccgcttttgacactgtaggaccaccactcaaaggtgtgcacgtacagtcgaagaatttttgttccctccatatgaactgtcctctccacacgtcattgttctcaatgtatggaggcgttggaagctacaaaaattttttaaaagaattttaataaacgttaggggtaatatcaaaggaagaacagtaatttactcccatctgtgctgccagacagacattttatttcgttgttaaattagttccattggcaatattttccctccctagcctcacccaacttttaaaatttaaattatccctggggacaaccagcctacaaagcacaagatgagaattttgtgataaaactgacttaccgacgcttggggactgccttgggctacaaaatgagtggcggcgtcagtggccacagcagcggactccggtaccaacggtgacgaacggtctgattcggtcacagcagaagggtcgagaatagcgaccgatgttgacgaagcctaaaacacaaaatatgttagtgttgccaataatttcattgtctcattaaagaatgacacggcacaggcggttcggcaccgctaataacaatttcttttctttgctgacagccaaaatttatgccttcatgaaccgtttcgttttgacacataggtaaatgtggagcccatatagattttaaagcatgccaatttttggatgtaagtttacactttggcgactgtcggcgccgaactgactccgacccgaataacacgaggcgcaatgtgaaaccactgaaaatcaaacctcagtatttgtcacgcccggattttgctcttgttccattttaatgttgtaaacctttgaagtcaattaggtatatacgtattggaaccaaaataaaagcaattattgcatgtgtggcagttgttttattaagataaccaattaacaaagcacggaggttcgaatctgttcagtgacactaattttccgaaaaaatagcttttcaaaaattattttagtgtttttgcggctctaagtgcactttaggcatccaatgaacttttaggcgttcaatgttcattcttggtttcattcgaaggctcatagagagaaactaagcaattgttaaacaattgggaggcaattgtgcagattattggtcccataaaaagagaaaaaaaacaaaaaaacatatttttaggggttatttgatgagctgagcacgaatatgacatccattttggccaatttcaaaccaggacccgaattcgaacaaaaagtcgaaaattcaaatttcgatttagcacttattctaaaattgattaaaactagcagaaaataaatcacaggtaattttaacagcaaatgagccattctatgcagattcaaacatagaactaaaattcaaaaaatttaaattttcgtctttgttcgaaatctggtcccgggttcgaaattggtcgaaatggatatcttattcgtgatcagcgaacccgaaaaccccaggaaagatttttatttacatgactttaaaaaaattttatttttaataaaaaaataaataaattgttcgaattcgggttcggggttcgaaacaaggccaaaggaagaccaaattcgtactcagcgcatcaaataacccctaaaaatatgttgtttttttttgcctttttattctttttttttgtgggaccaataatcttcacaattgcccaattgggatgtaccagaaaagttgcgacccttcaacttttctttttttgcgtatgtttattagagcccggaattttgaaatggccgggacttggaaaatggacccgtacgggaccgggacttggaaaatggacccgtacgggaccgggacttggaaaatggacccgtacgggaccgggacttggaaaatggacccgtacgggaccgggacttggaaaatggacccgtacgggaccgggacttggaaaatggacccgtacgggaccgggactcccgtttttccgggacccccttcgccccactacttgctccgtcttcgcatgctccctagggagaaaatttacttcattttgtttatccatttttcgttggt

SEQ ID NO: 12414 - DNA, 2722 bp, Heterodera glycines
gcaaagaaaaaaagtagaaagcatagagaaaaacaaaagaaaagggggacaagagaaaccggtttaacaggtaaaagggcagagaaaaaaaaaggaaaaagaaaaaaaacgaacacatacggtcggtaggaaaggaaacaaaaatttcgccgccaggcactgtctgccccgcagcagcaaaacagacgcacgcgtgcggttgtttacgccaaaatgtgggcgcatcacttaataatttggtcaatttgatgggcggtaggacgggagcacaagaggggtgcaaaagcggcgagaaatagtgtgccaacatggagaaccagagaaagagagacatgaattctctcctagctttagccatctgccctcttttgttaggctttcatttccacactattttcttgttttctctccatctttgccttgccctactcactcccctcagtttctccatggtgccctttttcttttcatgtctgccctcgctttcccaattttatttcgcccatttctttgtttctcatccttccccctactcgtgccacacactctcgtcagtcaattgatattccttccgcagcggatgctccaaattggtgaaaacaaacggcgccacaggggagcggctgacattgaaaaatgaaaaagggggggggggcggtggcaagaagaggaagaaacatccaacagctttttgtggaattttgtttgtttggaaaaggaagtcgtgaaaagcatagtgaagccaacaatcgttcgactcgtgtacagacagacagttcgccaactagacatttcgtcaaagggtcatttcgccaactcaaattttgacttttcgccaattcttctcgaaatcgaacacaactagcctactgtatatgctctaattatagcccatggggattatttttcaacctcctcagaaaagggggggataattagagactgggggattatgatagagggattatttttcaaaacacctcgtagactgggggataattggagactgcgggattaatagagactgggctataattagagcatatacggtaaattgatattatctttataatgaaaaaatgaaaaaattagcataaaatgcacctaagcaatgaattttaaaaaataacacacaaaatatggaaaataagaatctttacaaagtctgaaattcaagccttatgtgtctgaaaattaggcgaatcttgggttggccagctctcacttcctgataaaaaatgatataaaatcgcgaaatatggccataaaatatcagccaaaaactgagaaatataaacataatttgcaaaaatggacataaatttttcaaatttgaaggtataatttcttaaaatttcttcaaattcaataaatctaaagtaaaattttcaaaaatggctaaacacacatggtattacatttcattttataagaaaatagtaataaagctaaaatttactattcttagcgaaaacaacatggatgagaaattttcgctattttgcatatttttcacacagtttaccaattttttcagaaaattttcagatcttagggatcaaaaaagtcaatttagttgatgagggccgttgtaatagatggaaaaatgtcaaaatatggtcgaatatggaaataaatcgccaaattttgaaaatatgaatatagaaatccatcctagtagcttcaaaccaagctaaaaacaagcctttcgtgcatttcagacttcacacagtccaggaaaaaaaaatatggctttccatataattatcagccctagtcataaatgaacacgactcatctttcattctacaaaaaatccaggcgttttgcattttcagtgggtaggctcaattaactttttcaacaaatttttttgttctaaataatgaatcggtaccattattgctttaaaattttctttttgctgttttcttattcgatattctttacaaagatatttttttgaatttttatttaaattttttttttgaatttatttcgaaattaattttactttgtttttttaaaaattttatttttacatttcaatattattagaattagttttaaaatatttcgagttttttgaattttaattttagaattttattttatttttaaaaagtgtcatgtgacaaaaaatggattttttctttttaatctattatttttttaaatatacactaaaaatccctcaaatatgccctaaaaacccgaaaaatgcccaaatatgcactaaaatatgcatttaaaaactgccaaaatggctacaatcaaaaaatgccaaaaattatgtaaaaattcagaattgactttaaaaacaccaaaacaaaagctagggagcatttttttaaacaattacaaaaatattgaagttacaaatttttaaatttttgaatttcaaaatttacatatgcaattttgaatttttattttatgctcaaacaaaattacttttttgtatcttttgtatcaaaattttttttcaaaagttcttgcaaaaagtccaaatttttcgatttccaagcgtgtattttttaattcccaaaaagtcgatccttagtagtgttatttttcgtttttattgcatttttcttataaaaatttgccaaaaaggacctaaatatgctctaaaaattcaaaaatggcaaaatatgcaagattctcgaaaaccccaaaatatgcttttatatgcttaaaaaaccttcaccaaatcaaaaaa

SEQ ID NO: 12415 - DNA, 2438 bp, Heterodera glycines
ttgaaatttagagctctaaaattatataatcgttataaaattatggagcaaaagtgcatgtataattgcaaatataaactttcataaagcaaaagaaatggcctttattatgagcaacttttttgaaatacaaaccttaaaaatagggcaaagaacgaaaattctggaacaaaattaaatctccgttttattagtttttgtacgacttttgcgttagtgaatttcataaaagtcaaaaattgacctactttatgcggttttcttgaaatttagagctctaaaattatataatcgttataaaattatggagcaaaagtgcatgtataattgcaaatataaactttcataaagcaaaagaaattgcctttattatgagcaacttttttgaaatacaaaccttaaaaatagggcaaagaacgaaaattctggaacaaaattaaatctccgttttattagtttttgtgcgacttttgcgttagtgaatttcataaaagtcaaaaattggcctactttatgcggttttcttgaaatttagagctctaaattatataatcgttataaaattatggagcaaaagtgcatgtacaattgcaaatataaactttcataaaaacttacaagaattaagcaaaacaatagatttctcatcaataaattccatacaaagttacagaaccaaacttaaaaaattgttggagatctaaacatatccaaatgtgtaagcggcttttgtccttcttttggattttttatttgaataaagtttggaaatttgatatttttatttttcgtaaaatgccatacactttcgagtccttctcgaagatcggtaaattgttgttaattttttcgttttcaaatttatcatatatgttaaattttcacgtaacgcattgtaaactcattatggctaaaaagaaatgtcattttcgtgatcaagacaaaaaattagcctagaaaaagagatcggagaggacccggtttttactggattcgaaaaccggtccaacgatttttggaaaaattcttgattgaccggttttgagaggccgggtcggaaaccggttgcttttgaaaatatcagtccggtccggtcctgacatttttgaaaaatccgattttaacaaatttcgaaacccgttcccaagtttgaaaaagtcgaaaattcaaaattttcaagattcacttttatgctcgtatctgtatagaatgattattttttgatgttgcactggttcgtggttaaatacagtttgttttaatcaattttggaataaaagtgcgaattttgaaaattttggattttaaactgttcgagttcgggaccgggattcgaaattgtcaaacgaaagttagattcgtgatcagagaccctcaaaacctactaaaacattttttcacgaccttatagaagaaaaaaaaaattttacaaaaaaggatcgaccatcggcagttatgtattaacaaaaatctcaataaaaacttgtgtttaatttcttggattttttctttttcccctcagcccccccccctgctacgccgcacttggccctatttattgtttaaatatatttttataaaaaaatttattgcaatatttttgactttggcgcctcggctttagtaacacatgcatacatacttattgcaattgaaaatttagccttatatttttgcattttctcaactactgattataaatgttaaacggcaaccgatacatgcacttttgctccataattttataacgattatataatttagagctctaaatttcaagaaaaccgcataaagtaggccaatttttgacttttatgaaattcactaacgcaaaagtcgtacaaaaactaataaaacggagatttaattttgttccagaattttcgttcttgccctatttttaaggtttgtatttcaaaaaagttgctcataataaaggccatttcttttgctttatgaaagtttatatttgcaattatacatgcacttttgctccataattttataacgattatataatttagagctctaaatttcaagaaaaccgcataaagtaggccaatttttgacttttatgaaattcacaaacgcaaaagtcgtacaaaaactaataaaacggagatttaattttgttccagaattttcgttcttgccctatttttaaggtttgtatttcaaaaaagttgctcataataaaggccatttcttttgctttatgaaagtttatatttgcaattatacatgcacttttgctccataattttataacgattatataatttagagctctaaatttcaagaaaaccgcataaagtaggccaatttttgacttttatgaaattcactaacgcaaaagtcgtacaaaaactaataaaacggagatttaattttgttcctagaattttcgttcttgccctatttttaaggtttgtatttca

SEQ ID NO: 12416 - DNA, 3021 bp, Heterodera glycines
catccagcagactgctgctgcacagccgcacgcgtctgttcactgtatgccctcccacccgccgctgccccgcgtagacagacagtcagacagcgcactactatttgccacctttccctccctctaaccaccacagcacggaaagataaatcttttccctttcaactatttctttcgctttttcttttcctatactatttcttttgccttcttctttttctaaactatttcttttcatctctttttcttttctaatctctcctcacagcaaataacataaatacaaaacgccacattcaaaccatgttacaaacagacaaacactcaactttattatataggattatacataaaaatagattatacaacaagtgaatctttgaatttaataatcttaaataataaaataattattaaaatggtaactaattgatttttttatttgtttaaaaggcaaacaaaatgataaaaatttcattttaatattttttttacaaaaactacaattaattgctaggaatatttgtaggaattttacatttatttgttgctcaaaaatagttatttttaaaaatatagaaaaaatgaaaatgccaaatctctcaaaattattttgtgttttatttgttttttcaacatttattgaaaagacaattggtacccccaaaaaaggaactgcttctccactggaaaagcagagcaaaaaggcgatgaaccaaaactgggaaaagaagacaaaaaattggtgaacaacaaaaaagaattgctaaaaaaagaggtgaattaaaaatatattttaattgaaattgaaatttaattttaatatttttgattgaaaaattgcaaatgcaaatgggccaacagttgaacacaattttggaagaaaaaattcctacttttgtacttgaagtgaattaaattgccgaaatgattgacaatgaacaaaagccattggaacgcaaatttattcaacaattgatagacaaagtgcgaccattgtacggtaagtgaaggaaaaagtactgtaattttaaataaaaataaaatattaaaaaaagtagttgatacgaagaaggaccatctgcatttgtggtccaaattgcgcattttggggcatgacaagcagataaaagatgacatatccaccacggaactgttggtaaaaaatcttatgtaattgttagacactagcgggtgcgtgaaccgtcggctatttagctgggaaaaagcgcttcgcgctttgggagcttcgctacctagatttgatcgaattggttggagagatttttttgaatttttaaaaaattattaggggtttttagtccacatcgaggctcaagacgggcgcttcgcgcccgtttttaaatttgttggccttggacgggcgcttcgcgcccgttatttaaagtttgttggttcatacgggcgcttcgcgcccgttattcaaattttgttggccttacagagattagaagaggtacaacagtgattaaaagacgtcaaaagtgattaaaagaggtggtacatcagtgattagatgaggtacaactgtgagtaaaagaggtacaactgtgattagaagaggtacaatttgatcgtaaatatacacctaccctatcccgagttatgattttttgaaaattccttcaaattcccagtggccaaaaaagccggaaagtgattaaaagaggtacaaaagtgattagaagaggtacaagagtgattagaagaggtacaatggtgattagaagaggtacaatagtgattagaagaggtacaacagtgatttgaagaggtacatcagtgattagtaaattcattaaattaaaatgaaaatattttttaacaaatttaattaatttattaactcaaaaaatattttaaatgaataaaaattgaaaaacattagaagaggtacaacagtgattaaaagaggtacaaaagtgattagaagaggtgcaacagtgattataagaggtgcaacagtgattagaagaggtacaatcatggtttaaaatgaaataaataagaaaattgtattattggatgtattataaatttatcaaattaaaaaaatccttttacttattaaaaataaagttagaaatttataatatagaatatttattgaaattaaaaggaattaatttctcgaaaattcaaattaaataaaacaccttcgatttgttatgaattttcaaattttaacccaaatttccaaggaccaaaaaattgaaaaatattttcgaatttttaaaaaattctaaaatttccaaaacttaaaataaacattatattcgtattcagcacctcaaaatagcccagaaaaaaatttttcaccctctttttcaacccaaaaaaaatttccgaaaatttctagggggcctagctcgaaaatttttgaaaatttccggccatataatacactattcgatagcattttaaaagctctacaattttgctctaaggcaatttttggctaaaaacgatccctgacgagttataggcccgggactcaaatgtcccgctcaggccaaaaaatttttctatttccgggaaaaaatcgaaatttttccgaaaaaataccaatcgatagagctcgaaaaactatgttttggaagtggtctccgtttctctgggaaaaatcgttaaaaaatcctaaaattcaaaaacccgaaaaccgttttttaggcctaactcgaaaaattttgaaaattttagaaattttaaaatttggaaaaatgcagctttaaaaactctacaataagttcgctggcaccccctcgctcagaccaaaccctgacgtggtattcacctggtactgaagtgggaaaaaaaaattaactgagtctccgtgtctgtacaggtccgggatttggtctgatcaaaaaataaaaaataccggattatagaggacacttctgcggagtgccctcacagcgggcacaaaagcgcttcgcgctttgggagcttcgctacctagattagctctggttttggagatttggaatttttaaaaaa

SEQ ID NO: 12417 - DNA, 2496 bp, Heterodera glycines
gcccatctcttccagtttttccgattcttgtgccaatgaaagttcttgttccaatgtgaactgttcatctgaaatgatttcacatatgagagatattgaaaaattagtttaaaatattataaaatttaaattaaatttttgtttaatccacccactttttgctccgattggtgccaattcgtccagcgccttttcattttgttcttcttcttcttccggtgatgaaatggtcctggtggaagtcgtgaacgaaaagtggccaattgccttaaatttcaaaaaaataaacttcgattaaatgcttcttttcaaaaattattgtgattttttattttgtaattgataaaattcatctgaaatactgtatgtttactgtataataataaaataagttctctcattaaccccccccctattttttatttttaaattcataaattatcatttgaaatactgtatgctactgtataataataaaataaattctctcattaacaccccccccccccctattaatagccaagcactaccgaatgagaacgttgctgatgaatggcgctggtgacatgctgaaccaattctaggtcgctttccaaacggcgaatttcagccgcgttttgcgcatcattctcggctttctgtcgtcggactttgtcgagatcatctttcagttccttgttgtttttatttgctttctcaagagctgcttccactttgccaagtttgtcagcgtagtcacacttttgttggcattcctcggcgactgcctgtctgagcgctgccttcgcgacttcgtctttgtgcgccttctgttgcaattcttccaattttttgctctgctcctcgataattacgtcctgaaattgtaagaaagcataattattaatttatataatttaatttaaaagtcatatttttacgacctttttctcagtttgttccaactcgagatgaaatttcttttgcacacttttatgcaattcggaaatatgggttttttctttcgaacaatgttcggaatggcagtcgttaatgtcagtttgtgtagaattgtcctccattttggcttcaaaatttaataaaggaaaaatggatttaggacaaaaaataagtgaaatattgtcaaaaattcgtttgaaaaatgaggagaaaaaacccaggggcatgtcgaattaaggagaaacgagataaaaatattgaaacaaaacaaaacggattgggttgaatggcacaaaataagaaagaaaaaaaataaagaacccaaaaattaaaaaaaaagaaaatattaataaccttaattcaaattagttaattaagaggatgagagagcaaaaatataaaaaatgaaaaaaacccaattcagaatgccaaaaactgaaaaatttggggggaaatttcatagaaagtcgaaaactcagagttgattatgaaagtagagcaaagatttaaatttttatatacgaaataaaagaaaattgtcaatttatggctaagaaaaaagaaatttagtaaaaacgagttgactagaaaaactaaggttattgagcaaattaatgggataagagactaattaaaaaatggcatgccgatataatgaaaagaaatgagatttgaaaaaagtgagacctatttatacaatttctaatttgcctaacttagaaataagttttaatccgttcatcaaatttcaaatatctttccgaaatgtgccgccagcacaatcagcaagaagaaagtgccaaagtacgatggaaaggagtgacagaattcgacaaccggatatgtgaacaaatgtgggaaaaagagataagacaaagacaaagtgttgaatttttgattgaagacatatttgaattaaccgtgtaattaggcaattaatgagttagttaatgatgacaaggcacacttactcatagcagtgttatgtagtgcatttgattagatatttgatggtttaatgatttttgatgtttagataaacattcagaaggaaaaaagagtaaaggatggcaaaatgatagggtagttccagaccgaaagaaacaaaaaatttcaaatcttcatcgatgcctatgcaggggtgggcccggatgcgcaaaaaattccctgaattcggatttagggcctaaaaaatctgaaattccggaaccggaattaggcctgaaaagggagaccaaaattttcgaccattaccgaaagtaattttttatgttggtaaaggttgagtttctgcaattttgtttcggtaataaaatatgaaaaatgtaaaaaattagaaaaagttgaatttttcaaagaaaatatagagaagaactttagatttttaaggaactagaattttttaaaattcaaaaatttctataaacatttgttttatctaaaaatgactaattttttgaaactcaaaagtcagtaaaaaatgcataaataattgaattcagcaaacatatttttttatgactaggtctatgcaagggcgtatctaggggggggggg

SEQ ID NO: 12418 - DNA, 1801 bp, Heterodera glycines
agccattgtcccttatctgccgcattaattttctttcttgttgtaatcacaaacttttggcaaaaagacagaaaattttgtcactattttgcattgttcattgtttttatttattgctaattttttaaatttcattttattttaataaatattaaaaaaagataataattttttgcccgaattttacccaaatccataaatttttaacactaaaattaccgtacttactgaattagtagctccgggggttctatttttcaacctcccccctcgaaagggggggttctaatacagaggagggttctaattcggaggggggtacgaattcagtaagtacgttatctatgcctttttttatcagaattataattaaaattgtacaaaaaatgaaacgttcttcaagtggaaacgagtctgacagtgcgaccaaaaaaattaaatggtaaaaaattctttttttaaattgtttttccatgtaaaaatcctctacaggagcccaccggaaaaaataaacttcaatcactactggactgggtaagttatgttataataacttaataattattacttttttaaaaatttaatttttcaataattaattcatcttttaggaaggttacgtttgcgcagtactgggacgggtaaaaaatataatgttaatatgttacttacaatttttaaattcagaggctaccttcctcctgaccccgaatttgcgaattggtgagtcagaaatattaaaaaaaatgtaaacaatataataaaatgggacagttttttggcaattcttcggttcttttctgttttgtgccccctctaaacaatttttttttaaacttttttctatggcaatttcaagcgctgaaaataaatcggaaatttatttaaggctaacaaaatgtttattttaataattattattttttattattattttgttaataaaaataatttaaaattattgaataacagagcaaatatttgttattttaaagaaaaaccaaaaatttttctgaatttcatatacaaattgtattctgttttgataatttttcactgtaatattttaagcaaattgttttagcattttttataacattttttgcgggcttcctaagggataaaagttctcaaaaaagcgctaggggctaggaaatttttctgcgaaaaaaatagaaggccaatcacaaagagtaactaatgctctaccaaatctcccgcaaatttaaatactgtgcgggattactccgcggtagcctgatcaaaaatagaactttcggggctctagtcttgacctccctaaaatggtgtttggcacactcaaaggtttctctagccaacattatttggttataaatacaagaaactaattactggctttatagaaaaaaaatcaaaattagaaaacccgaatttaaaacccgaatttagttttttttttttttgaatatccaataaagttttgcgttattggtcaaaatctgttataaatcagtccaaagttttaaaatctttttcgagtctaggcaacccttaggaatttttcctaaacttttcccaattttcaatgttttttgggtgtacaatcaccataaaggaatgatctgatcaagttagtgcaagacttttttttaattataataaatttattttttgtcttgattttttcttttttaaataaataatttattaattactttatgatttcataaagaaatctgttgttttggctttattttttaaattttttcatggcaaaatatgttaatttaaaacatcaaaatcggcaccgatctgaaaa

SEQ ID NO: 12419 - DNA, 1336 bp, Heterodera glycines
  unsure (1)..(1336): unsure at all n locations
gaacaaataggcaaaaaattacaaaatgaaaacgaagaaaaaaaaattcaaaaaaattagtataaaagtggttgctccaccgctattttcattattattttttcatcgtttatccatgataatgcgttcaaatgcttttctacatttacccttatctgaattttaattttaaaaaacccattcgtcttaccattataaatttagctaatatgagttgcttatgcttatcttcaacaaaatctgcgtctgccgctgcttcctcttcttcttcatccatcgtcattggtgcaacaactttcgtcaccgtcgaaacttctgtgcgcaccgctggaccgtcgtcttccattgctggcacttcgacacatccgaaacaccaacatcgtggacatggatctcaaacaaccggcacggcatctgcttctaagcgtatgtttgatgtaccaaatttctatttaatcattcaccattcgtttttaaggacgccgtggcactgtgcgcactgctggaacgtcgtcttccattgctggcgcttcgacacatccgaaacaccaacatcgtggacatggatctcaaacaaccggcacggcatctgcttctaagcgtatgtttgatgtaccaaatttctatttgatcattcaccattcgtttttaaggacgccgtggcactgtgcgcactgctggaacgtcgtcttccattgctggcgcttcgacacatccgaaacaccaacatcgtggacatggatctcaaacaaccggcacggcatctgcttctaagcgtatgtttgatgtaccaaatttctatttgatcattcaccattcgtttttaaggacgccgtggcactgtgcgcactgctggaacgtcgtcttccattgctggcgcttcgacacatccgaaacaccaacatcgtggacatggatctcaaacaaccggcacggcatctgcttctaagcgtatgtttgatgtaccaaatttctatttgatcattcaccattcgtttttaaggacgccgtggcactgtgcgcactgctggaacgtcgtcttccattgctggcacttcgacacatccgaaacaccaacatcgtggacatggatctcaaacaaccggcacggcatctgcttctaagcgtatgtttgatgtaccaaatttctatttgatcattcaccattcgtttttaaggacgccgtggcactgtgcgcactgctggaacgtcgtcttccattgctggcgcttcgacacatccgaaacaccaacatcgtggacatggatctcaaacaaccggcacggcatctgcttctaagcgtatgtttgatgtaccanaatctctattgatcatt

SEQ ID NO: 12420 - DNA, 1108 bp, Heterodera glycines
tcataattaattgatatttaccccatcgatctacgccactaaaacttcataataaaactgaaattccacatttggctttccttttgcttagccactttctttgcttttccattccattcattcatttcccaaattcattttcattggtactctgtgtctcttctgttggtcggctgtggcaccattctttggttcttttgggacaacgtcaaaaaacgacgacgccccaacaaaaaagaaatgtaaaaaacaaaaattaaattaataaatcttctttttttcagcttcatctctgccgactgttggctcgaagtgtttgctttacttccgccttctcagcttggactcggaatcgctctgatcagtcgccgattttaccgccgcgtggacaaacatttcaaagcacgcaaatggatattggacaccgaattgcgaattcaagagaaagagctatggtttggcaggaagcaaatggaaattgtcaatgccaattggaagcgtttgccaatcccacaaaatccgttgcccaacaaagtcatcggatttaaacacattacgttcatgtaaaattgataagtttcccattggtttgagataactttttcttgttttagttacttcgaccacaatattctcacatttgtccgccgttttcaccgctttttcactttaattacaacatctttgggcattatgagtgaaaatgttcgcatttttgagttcttcctgtccaccatttggccaatttttggtgacttgatttttaaatttttgataaattttctagatttttttcctaaaattagaagaaaaaaaaattttcggcggcgggagacgttttgtggtgtacccgggacggacggtgccgaaataaaccggcacaacaatggcaaaggcaagtgcgccaacctgatgacggaggatgaaattatgtcaaattttgtgattatctagttgatgagatgggacggattaaggaattggcaaaatgatcgattgacgaacaagacaaatttgttgacattttgactggcacatcaaataaaatggcatttgttgtaatattgtaaagagaccgagaaaggcaaaaatcagtaactaaaagagg

SEQ ID NO: 12421 - DNA, 4907 bp, Heterodera glycines
acagaaaaaattttttttgggcggagcccagatttttcagtattaccgtttattggtttgaaaattttattaaattaatttcttttcatatttttcatttgccagcattgtctgtttattggcttaaaatagcaagatgcatcttaaagcgtaacaaaaggaaaaaagaacaacttcatctctatcaatttttcgtcgattcactgaccaggcaatcccggcatttcattcttgttctttggatttttgatggtttggtcaatgctcagaacaagacaagctgcttcggttgccgatacaattgcattctgcaggaattaaatgagtacggttttgtgaatttcccctaccctatcgtttttttttgcaaaaatttcgattcaaggtttgtggtgtggcagttttgatacctgttttctcattcaaataaatactttcttcattgatagttttttatttttaaattgcttcgatttttgtgggaaataggcgattgaacccctcccccatgaattaaccataatacacttttattatttgcacctctttgacaagtgcgggttcccaaacacatccctccatgttatctgcgacgcattcccgctgaatgtcgacacccgcccacttttcgccccgttgatgggcagcgcgaagttcgccaagcatagaaatggagtccaaaccagcattctgacaaagttgttgtgggatcatctgaaaatggggaaaaagcaaaaacatggatcgaaataaagaaaaccagaaaaaataaacctcaaatgatttagcaaaagccttccaaaagaattggtccttcatttcacgagtgtttgccaacccaagcaaatgttttgccaattccatttcaattgcccctccacctaaatcaattatatttgacacgaattcaaaatactaatccaaagatccaccaaccggcaacgattgagtcgtttttcttggcacgtctcacgatcataatcgcgtcgtggagggatcgctcagtctccgcaatgaattgctcggcgcctcctcgcaaaagcaaagtgcacgatttgtgtttagacccatcaatgaaaaaattgtagctaaaagtgtctttttaaaaatatcgagcctttgtatttttttaattaccgttcactcccaacttgttgttcatagaattcagcgcattttcccaaaacaattttgtcgatctgagagaccgtagtcagtgttgagccaccacaagcagccattatacgacctaaaaacaaaaaggaacataaaatagcaatcacaaaaataacacaccgagatcgtcttcctgaatccgtccagcacaaaacatatcgctaggtttgagagaataaatcatttgtaattttggctaaatgctattaccgatccgcaaaccattgggtagcaacatccccaatcggcaatttagacagaacaattttggcaccactttcatgtattttctccaatttttggtaaagaatagtccattccgcattaaccacctaagcaaaagaagagccacaattttaatgggttttggatgtagtatagccaaccacccacaagatttataaatcgggtttttaaaaaaccaaaatgaagaaaaccacgcacttctaactttttaagacgctcaaaccccgagtaagtattatcccaaagctgttgataagtagaaaaatcaaaggatgaaatacacaactcttctgacaatgaggtttttgagccggttcaaaacccaaaaaaattaatgaaatgaacgaaaattgaaattttgtttgttgcacaaaaaccagcgcacacccatcttttatgctccttttcttgtcaaagagcctttgaatgatacgaactagtcagagtttaaagttagtgataagtaattttttaatttaaatcggtttaaaccaattttcatatcttgaaatctatttttcgtgcttgtcgagacgaatcggttagtataccaattgtgcatttttacgggggttggctatacttcggtgggttttgtttttgtctgggtttcatttcggacttcctgataatccgcaacattgccaattcgcaattcggcgttgtcgcgttcggccttcagttccaactcgatgttaagaatggcgatcagaggttctttgtaatgcttcggttgcatttcgaaaccagcataactgaacgcctttttgaatgcaactcccttaacaagtcgcgaatcctgaacgatgattgtcaagtttggcgatgtgtaataccgaattcacctttattgagccaccgctgacttttttgactccgatcatattcagtggcaaatcaacgtctaagtaatccaccgcattgaccaccatactcgcaaagtgatgacgttcttgtttgagctgaagtaaatattaactcgccgtttcttttggtgcactaccaatttgctgctaagtgttgtagctgcacaacggattagcatctcgcgactctcttcggtgcccgtcactttcacagacaactcgcgcaatttgctaattgccttaaacaaataaaatcccttttcccgcctcggtccaccctcaaacttctcgtgaggctgcgttaaatgctttgatgattaattgcggactcacaccctcctcaataaaaggcttagcggatttaagcagttcagctgccaatatcacaactaaaaatggctctaatgcactttgtgagtccaatcaattgacaatacctggtttttatactcgtccatgtttcgaacaaaccctaatctttttggcatcattcgaaagcacaaagtctaacgaagctaaaatatataaaatcgcagcgttcaggcaattaccaaaaaagatttgattaattaagtaattgctgattattttcgtttgtaactttcttggaatgttagaattctgttgttttctcgtataattacattattcagactttgtgcattcgaatgataccaaaaagataggatttgttcgaacatgaacaaagttattgtatagaaacccgggattgtcaattgattggactcataaagtgcactagagcccctaaaaataatgtattttcaattaagaattatttgtttttgtaagagaattgacgtggtgataattaaatatttgcaaaattaaacaaaaaaaatataaaccggttataaaactcaggaaaaggaaaaaagagcattgtcaagaagacttgcataccactggtcgtgccatcgccgacttcggcatcttggctttttgcaatgtcacaaatcatgacagcagcaggaaaaacaatgtcaagttttttcaaaattgtagctccatcgttagatatcgttgtttgccctaaattatatttaaataaatcagggaaaatgaaagtgaacgctgaaagccgcgccttggagaaaatgtctttagttaccctttctgtccactaacaatttgtccaaccctcgtggcccaagtgttgtgcgaatgttgtccgcgacagcgcaacacgcgttgatgttgcttaaaatttggtcacgtccctgcttagattgtgtgccttcacaaaggagaacaataggaacggacattgtaaatttttctaaaatttttatgatttggtagagatttgacggtacatatctttcaaaagtgtctctatcagtatacctacgaaagtttgctaaaaaaaagttacgatatattctcaatcctaactaggaatggaaattttaggcacaaaatagtagatagagcccggaattttgaaagtaccgggaccgggcttagataattgaccgcgaccgggccgcccagtaaaagcctgccgggcccccgggtccgtcctggctctattaaataggcacaaaaaccctcgaatagacactaaaacagacaaataaaactccccacattattgttttttaacagaaaaccaggaaaattatcattttttctttttgcgtataatttaatgtttaaagaaatccaggcgaattattgaatgaaacggaccaataacattgtcggtaacaattgaaacacacacaataatgctagcttagggtttggatcgtaccaagaatatttatcgaacatttatatgtaacaaaaaaaattagctaggatcatttttacataccgtatttactcgattatacgcccccctcgaatggaagccccccccctcgaatataagccccccttggaggggggttgaacaatagaagccccggggcttataatcgaggaaatacggtatgtatctcttaaagtaaaagcgatgtttttaaataagcgtgagagcatttatttgcttcccttcctctcttctcttttcacaaatgactctctccctcctccgtttctttccctctccgccgtactctctcctcgcccttttctttcgttactctctttctcattccgttttcttttccatttctcgccactttctgttgatgttcttcttccaacatttgcatgcccgaattttggctagaactataaaaggacaactttccttcttttgcagttggacaactcagccgaagggtcaatttgactgagggatgctttttttacaaagttttcgcataaagttattcttttttaactaaccctttttgcttgtttaagtagttcattcccgatattggtagttttctacacaaacttgaaaagatcactcctttagatctggacaccataatatacgttgaaaatcggggaatctttggaaaatttctctggaaattttgaataggctcattttaagagcacaaaattctatacccaatttctttttgaatgatgtgactaactacgacttgtacatagaaacacattttctccgaataatttttgatttagaacgactttattagcacctaaaaaccaaaacggagggggggggggggg

SEQ ID NO: 12422 - DNA, 1658 bp, Heterodera glycines
  unsure (1)..(1658): unsure at all n locations
tcggtttaattacncaagtttgaggtacttgacgtatcctgcccataatatctgtggcatggaataaattttggaactgcgctgcctaacggcggtgcttaaaatccataacgtatgatgaggtgatttttttcatttttttattttgtttaaattccaaagtgaattcgaggcccaaaaatttattcataattcatgtggtaaaaaaatggattgaaattaaataaaaaatttcttgaatttttgcttcgaaatttttaattttgatatagaaaattcctttttctgaaattcacaataacaatttggcgaagaaattcattgaaatttttataaagcattttgattaaaaatgttggcgggtttgacaaatttgtacaccgactattggatctcagcagcaatgagaaataacaaacagaaaagagggagaaaagggcgttggctttggaaaatagctgatacaaggagaggcgagcagacgatgagtgagataaaaatagtggcaaaaatggacaactgctgcattgggagagtcataaagggaacacaaagtgttcgcacagcatcgaatatttccttcattttaggcgccattttcccccactgcacctctttcttcggtttaattacccaagtttgaggtacttggcgtatcctgcccataatatctgtggcatggaataaattttggaactgcgctgcctaacggcggtgcttaaaatccataacgtatgatgaggtgatttttttcatttttttattttgtttaaattccaaagtgaattcgaggcccaaaaatttattcataattcatgtggtaaaaaaatggattgaaattaaataaaaaatttcttgaatttttgcttcgaaatttttaattttgatatagaaaattcctttttctgaaattcacaataacaatttggcgaagaaattcattgaaatttttataaagcattttgattaaaaatgttggcgggtttgacaaatttgtacaccgactattggatctcagcagcaatgagaaataacaaacagaaaagagggagaaaagggcgttggctttggaaaatagctgataaaaaggagaggcgagcagacgatgagtgagataaaaatagtggcaaaaatggacaactgctgcattgggagagtcataaaggggacacaaagtgttcgcacagcatcgaatatttccttcattttaggcgccattttcccccactgcacctctttcttcggtttaattacccaagtttgaggtacttggcgtatcctgcccataatatctgtggcatggaataaattttggaactgcgctgcctaacggcggtgcttaaaatccataacgtatgatgaggtgatttttttcatttttttattttgtttaaattccaaagtgaattcgaggcccaaaaatttattcataattcatgtggtaaaaaaatggattgaaattaaataaaaaatttcttgaatttttgcttcgaaatttttaattttgatatagaaaattcctttttctgaaattcacaataacaatttggcgaagaaattcattgaaatttttataaagcattttgattaaaaatgttggcgggtttgacaaatttgtacaccgactattgatctcagcagcaatgagaaataacaaa

SEQ ID NO: 12423 - DNA, 1437 bp, Heterodera glycines
  unsure (1)..(1437): unsure at all n locations
ctcccncacttggtggacattttggagtgtatggcggttctccactgggcaagtctaaatgaaattacgacgaaaaaggctgctggacgcattgcttctgatgcggaccgacccgatgaagagtaaggaaattcttgaaaaaaacctaaacatttaaaatcaggaataaaaacaatatttaaaaattattaaaaagtatttaaataatattatttatcatttttggctttactccacatttccagtgatgttgagctcggtgctgcaccggacggaaacaaattttcggtggcacaaaaattctcgcggagcatttcgatgatcggcggcaccatccacaggcaggacaccgccacgggacgtgccaaaaagaaggcgatgggctcgccctcagaggcggccatgctcaattacgtaaaccaactgatcgacgtggaggagacgcgcgcaaacaacaacgtaaaatggccaaatcacacaaaatggcaaaggattggtacttttcagatcgttttcgaagtgccattcaactcgaagcgcaaatggcatttggtcattttggaacagtccgaggacaatgccgacggactgaagcagtacaaaatgttgatgaagggcgcctcggagattctgtcgcacatgtgctccacctttatggacgagcatggccaccaacagaagctgggcaacgtggagctgaagcagttcgaggacgcgtacactcacttcgcggaggggggacaccgcgtgatcggattctccaccaaaacattcagtgcaccacggtaatatttgataatttataatattgtgtaaacagctaactaactggcaatccttttaccctgaaggggcacaattttcgacatggacgaaggcaatgtgccattggaggacctgaccttcttgggaatgtgctcaatcatggacccgccccgtgacgacaccctcgaggccatcaagcagtgtaagcaggccggcattaaggtgagctcattggcatgccaatgccaaattcaaaaactgaagaattttagtaatttctttcattaggtatttatggtgaccggtgatcatcagctgacagcaacagccattgcacgtcaaattggactcattgaccacaatcggaaaagcgcaacagaacagtcaaatggacagtgagtaaagcgaaaatgaaattaaaaacgaacccaaaacaaagtgaaatcaattaatatttactagagtccggcgggatcgggactcccgcgggattttacgggagtcccgctcccgactcccgcttttttcggtgaacgggatttttaacgggagcgggatttttacgggattcccgttcgggactcccgtcccggaaaattttgaactcgcgatcccgctcccgctcccggaaatttttacccaaaaacgggagtaaaaatgcactggtaagaa

SEQ ID NO: 12424 - DNA, 2208 bp, Heterodera glycines
aatatttacttacatactaactgtcaaataattaaaaaaggaagtttatctataataaacccctgctaattaatgcagaattttgccaaaagtgctgaagaagtcccaaactttcgcctcgcatcagcagttggcactttgcgtgcccaaattgatgatgaaaacgctgagctcggaattgccattgagcaaagcggaaaaggatttcgaggcatggcaaattcgaaaattaaataaataaataattgtaatttaataaatttgccaaggtcattcatggtgaacgaatttcgcgtctgagtccctccgaatgggacgaactgatcgaaaaggaatcggtcgtttttgcgcgcacgacgccggagcaaaagctgatgattgtggagcagtgccaacggcggggaaaactcatcgcaatgactgtacaaatttcaaatcgaaaaaatgaattttaaatgcattttagggggacggagtgaacgacgcacccgcgcttaaaagggcggacattggcatttcaatgggttcaggtgcaaaaacggcaccgccattttgacattgatttttgcatttttgtgcttttcataggcagtgaagtggctaagcaagcggctgacattgtgctggtggacgacaacttttcctccattgtccatgccgtggaggagggccgcgtgatgttcgagaacatcaagaagttgctggcctacacaatgccgcactctttccccgaagtttggcccgtgataatcaacttttgtttcggctttccccctggcattaccgctttgcaggtgcaacactttaacaaattgcataattagctggttaattggttgtccaatttgtgtgtccagattctctccattgacttgtgcaccgaaattctgcccggcgtttcgttgtcgcgcgaactcgccgaaggcgatgtgatggcacgcccgccacgggccatgaacaaagtgctcatctccaacactttgttggcttactgtaatttggtcatttgaattcggaacggttttgtcgtcctacttttactttagcatatgcctacacgggccaaattcaatcgttgggctgttttttggcctactgttgcgtgttctggtaccacggcatcgccatctccgacttgtggatgtccgccctgacaagttggaagccggacggagtggcatttgccaggtgttctaacaaatttagcgaacattcgaatttttggcaaaatgaatttcagcaatggcaaatcgttctccgtggagcagcagctgtacattgggcgtcaggcgtgcagtgcctggcaaatgggcatcgtcttcgggcagttcttcaacatttggagcgcccgcacgcgccgagtgtcgctgttccggcacggctttctctccaacaaagcacttctgttggcattgcttgtcgaattggcactgatcaattgctttgtgtatatgcccggtttgtgagaaaagattttaatgaattcccacggagtccgccccatccgcacaactttaaaatgttttcaactctttcatatttcaattttaatctccaatgagctagcttttttaggtgtcaactcttttctcggcggtgctcccatcccttggcactgttgggccgttgtggccgcggttggcttatttatcaacgcgtacaacgagatcaggaagtattttgtgcgtaattaccctcaaaacagaattgttcgctgcttcaaatggtgaaatgatttctcaaaaaaattgtttttttaattgaagatttctttttatttgtatttttgcatgacaaattgcccaaaaaatataattaatttaataataaaataaaaagccggagaatgatttttaaaagagtgactgaattttatatttaaaatttttaataacgattaaaatatatataataaacacatatttcaaaaattcatttataattaattttgaataaaacccaaaccatttaatgcttcaatttttgccggtattattttattttgttttttaattaaaatgatgtcatttttattatggtgcatgatccttattgcatttattacgttataaacatatggtctgaataatttagaaaattccatttaaaaataataaaataattccacatttttatcgacttttttatttaaaaatgtaaaaatgaatgcaaaaaagtcattcactttatttttattacatatatgcc

SEQ ID NO: 12425 - DNA, 1271 bp, Heterodera glycines
  unsure (1)..(1271): unsure at all n locations
ttttgnacatcgtncgaccaaaatgaaagtgccgctgtccgcggagtgcgcgaattcaacccggaatacacggcacccgaatattatgacgagatgtacgggcaggtcagcccaactaatcgctaattaataactagggatacgatttttcggctctaaaaactgccaaaataggtcggctttaggtcctaaaaacctcaaaaataggctctaaaaaatggaaaatggcactaaaattacctcatttctaaggtgtgtaaaatgacaaaatttattcaaaaaagtaaaaaaattaggccaaataagtaatgagctaaataaatttaaaaaaaaattttggacatgaatttttgagaaatttttcatttcttaggggtgtatttttcgttttcttacgtttttgttaacaaattttgggaaaaatgccaaataggtcaaaatagatttttttcagcattttttgatttttggaaattttttgaatttaattgaaattttttcgaattttccaaaatcccgcaatcccgcacgggatcccgcaaattttaaatgcgggatttgcgggattaatcccgcgggatcccgtcccgcaaaaaattttgagttccagtcccgcagcgggatccgcaaatttgaaatttccgtctctattaataactattaaatgctatttaaataaatatttaccaattacagatttccacaaaatttgatatttggtcagttggaataattgcctttgaaattttcattgatcaactgagtttggaggagaaaaaggcaccaatgaacggggtaagcatggatcaatgtatcatcagagacgggagccaatcccgaatcatttcaaaatcttggtatagttcggtagccctaatgaatttattaacatcattcttagtttaagaaaattccatcaaacaattaaatttcaattatttgtcgaacaaatgaatagatgaagaaaagccggacaaattttgggtggtgttggtcaattatttcgcactgacttttattagtttttttatggatatgatgcaattttttttttgaaataaacaatcaaaacaaaaaagttttttttaaagatggagcgaaggacaatgctttgcaacatcggcaatttgttcttcggatttaaacggaatcgcttcggagattaccccggcaatgtcaaagaagtgccgcttttgtactcggaagacccaaattgggtgtggcaaaacaagagacgccattcacgcggtgctgcgactttggcttaaatt

SEQ ID NO: 12426 - DNA, 1823 bp, Heterodera glycines
ttctgtcccctccctcctccgccgccgcccgcccattatctccgattttgatcaaaaatttatttcaaattccacatttatttttcgtcatcaaagtgtaaaaaaaggtaccttcattattttttaattcaaattttaataattttttttctggctcttaaattagcggctatgaattcattgttttggaattaaattaaaattattaattgatttaattctaatatatttaaattcattacacttttaccattagtataagaaatgcctattaaatttaattgagtttttcaataaagaaataaacaatcctttattattaaattaaatatttttaatttttaaattaaaattattctacaattatattttgcattattattattttttaatatttttacttatgcttaacttttttttattacttaaaattaatatttcaaatgcctgcacaacccccgagaagcagaaaattttaactttaaattattttgatatattaatataaaaataattactatgtaaatttgttgtaatgggcttcacttgtttagcaaatggcgaaaattgaaaaattgtgacttttgcattgatcgttaagaccatagttttcaagataaatagttatatttatttcatattgcaggtgaatgtagatcgggcctgtttatagaattaaattttatattgaaagttgattcagtttatgattattatcacaacttattttatttcattaatttcattaatttttttaatttttttttattgttttcgaagttataattagtttaaacagccctttgaatttatcaattcagcgtatttttattttatttttttctcagctaagcgtcgagtaccccttcatctttgaggtatcgtttcgcacccccattctaatatttttgacattttatatatttttaaaaatttgtttttaattatttttatttattttattttcattcccatctaattcacatcatatttatgtttgaaaccttgtgcaattaataagtgtaagcattctaaaaataaagtctgtttaacttacatcaatttatttttacatacacacaacatggtaaataattaaaattattattgattttctttttgaatcatttatcaattaataatacagtttttcagcctctcgggtagtccaatgatcacaagcgaccgattcgctccatctcttttgctgcagtttccatttcgttattttattatttgtttatgcatccgatcataactagtttttaattatgttaatttaggatttttttccatctaaaatacaaactttataaaaaaaattactataaattttgataatttttgagttaatggtaaattttatatgttaaaaatttgttattaatttgtttggtttaattttgaatattatttattttatacaccattaataatttgcaattattttgctcctcctctccttcactcaaacttctaattgtatgcaatattaaaatttcgaatgattaatttttcgcctcaccgttaattatattttttaacttttaattataattgttgatttttttaaattgtagagtttccaataaaatttgtttgaataatttcatatattttatttttcattttgctttttttggggagggggggcagcggtgccgataggccgcctggcgaattttgaaattaaaaaaataaatcaaaagagaaaccgtcaacctgcatcgaactcatgccagaaaataatgttaaggttgatgcactatccactacacacactacacatcaaaaccataataaattaactttaattcataaaa

SEQ ID NO: 12427 - DNA, 2175 bp, Heterodera glycines
tttttattttatattgcaaatatttcatcgttttgtgtaaaacgtctccgaagattttttgatccataactttgttcgttatcaatcaaattaagcattcttggtgtaattcgatagttcattgtgaatattattctgataaatccaaaaagatttcattaagtttcaaaaactagtgtccagaaggaactcaaaaacctagttgatcggagtacgaatcttcaaacattaatgcgcattgtgtttcctaaaaattgatataattataacgcctatttttatccagataaaattctgaaaattgccccttaaccagtcagaaagttccaatcattcaaaatactggtcctgatttattaaaaaggatattctctagcatgaccgaggctttatgccacgcccaaaatattcttcagttatttttttgtgcgtttgactgttcgggtcctctaaaaactttgaaatttggctaatttcaaaaattgctcgaaatcatttaaataaaaatcattttttataacagacaattacatttgaaagagcagattttgtaggctatatatatggtttacgtgaatataaagcattatgaattttgtaaattaatcccgaaaaaatattttcaaagttgcgtgccggagggattttttctttattgcatttgtctgtttaattaataaaaatatttcagatttcttccaaaattattattaatacaaaatttaatagaatttataaaaaaaattcttatatgtatttattttttgttttaaactttttatttaaaatttcaatgttcaaaaattcatttaaaatacaaatatatgctttatttatttatcgaatatattcgttgatattgcgaatgctgagttaaattctcgttcagcttttccgaaaatttttgactccagcgcttcgccgcacactcgactacggcggtcagtaggtggggtgagactacgggctacggaagaagtccgcgcgtgatccgcaggcggttgactgacgtcagacttttcctccgccctccgtctcgccccactacttgctccgtcttcgtatgctcccttttgcgaaattttgcaattttatacttagctcgttaagattatacaattttaagtctgggacctatgatggatattttccgtttttcttttcatttatgcatttcgattttttgttcgaattagggttcgggtttcggaatttagcaaaataaaggtcatattcgtgatcagcgccacaattaccgtagaaaaattatttaaaatgtcttttgagtgctttttatagtgcggtcacttgagtcccagttgagtttggcactccaattccggcactttttcatcctgaaaaagggcaagcgcgcccctaattctatttttcgatcccatttttattcagtttacattgattctgaccgtttttaatcaattttgagtttggtgactatgatcaatatttaccaagggtgcgctttttctgaattactttcctattgtttcgaaaattttaaatttctgtataaatgggctgatatatgtaaacaatattcaaattttattcgttagagaatttttaacagggaatttttttcatcatgcatgggtttgctaacaatgcaatttcttttacaaatttaaattgttttataataaaaaatatagagtgaatttggcgaattaattttcgatttttaaattttatacacaatagtggcaaaaggtgatgcagaaaaaaaattttgaattaaattttaaaattatcttgtttatggccacatgttaatacgaagtgaatcttttaatataataaaatggatttttctctgaatgcgaaaaagggaaatcattggtgaaaatggcattgtaaggataaaagaagatcaaagaaggaatgaatgaccacataattggaggagtgccactgaagcgatgcgatgtgttcgcgtcgtttctattgattcacaaagaaatgtttgagaaaagaagagagtaacaaagagattaaattatttttcaacatttcatgacataattttaaaatttattatttttttctatgcctattaatttagatttttattttatgtatttttatcttttatattaatattttatggacgaatattataaataaaagagaattgtgatgattaatttaaatctg

SEQ ID NO: 12428 - DNA, 1778 bp, Heterodera glycines
  unsure (1)..(1778): unsure at all n locations
ttaattttcaagattatctttgatcctttagttttaattttttttcaattaatgctttttcaaaatcaaaaaaatatagattattaattatttatttatgattaaatccttaaatttaatgatttgcttaaagcaataacacgcgaaaacaatacaaattatatttagatttttaaaattttttgtagatatattttttgtttttgcgtatgaagaatttatttaatatgctttaataattctattgatttttcgaaattaatatataatatattaaattactttattatattataattttaaagcattttcttcgattactcaatatccttcatcctttcaacacaacgtccttttgacacattcatttatattttaaaaaatttaaaaaatttattagttttctttttttggttatatcttgaaagccatcggctgttatatttacaattgctgtgataagcagaaatatattcaatattttatttaaaatatatttcaaaaatataatttctgtgaattgtttctgttctcgttaaagagaattataaataaataaatttgtcaattaataatataatttatctctttgacataaattaattatgaaaatttaataattccacttgaaaagcataatttatgattaagagttactgaattttatctaatatttataattgttcacttgtacacaagcttaaggatcgattagagctgtgtgattatacctagtaattaaagattttaaaataatttttctttatatttaccgaataaatattatgtttcttataaatatttggtaagattttcatgttttatgtttttcataatagataatttgagtttttcccactcctcctcccgatattaatattcttagtttgtaactgaatttttatattcaatttatgtaaaaagtgttgtatttaattttatgttttgctttttatttgtagtttaatcaaagaagactttatttttctgaagattttaaaataacaaaacctaaatatgtttggaaaagttttggtacttttttagtaattatcgacatgttttctaatttgctttcaatttatagtttcttacaattatttttgccatatgtagcttttggtttaatcgtcagtttaagccatgaagttcccgtagtgaacatattctcgacgattataaaagctttaaggtctaaacatttactcacttttgacacttactaatctttggaataactgattcctcgtgtatttttctcgtttcacagagaccgtcactccggtatgtcccagttgaaataacacataataaaattataccaattatatttagatttgctaattatataacaaaaggtttgcatttatgaagtttttaacttttttaaataatttatttctttaattgcaatcgattaatatattaatttattttttaaatatgttaatttatttgttatgcattttattcatagtattgattcttttttagaaattaattatgttttctttgttaaatttgttttcttatgtctataaaacttttccatattatctttttctgctttttaattgaatgtttctcttttttgttaagttaagtaaaagcttttttgtttgtcttataataaatacatttttttacttctttttctttaatttcactcacgcgcaaccacaaatcanagtttcattgtccagtcctttcttagttattttcccggtattttttattgtatagttttaatcttttttcaatctcattctcaaaatgaa

SEQ ID NO: 12429 - DNA, 1470 bp, Heterodera glycines
tttatgaattttttttagcttataactttttcaatactctcccaaataaaaccattttatgctcattttggagggaaacttctgaagaatatttcttaattagtcaaaagtttaaaaaaattgtttattggcaaataaatgattcatgtgttattttatatgtcagagacatggaaatagtatgcccaaatgagagaaaaagaaaaaactttgccctgggaaaaaattttttcctgtgggtaactttttttgaaattttgcataggcccatattttgaccccctttatcgaattctcttttgttttttgaaagtttcttttctaactcgagatcggctcttgcatttttacaagggaaaatccccaataaattttaagttttgcaaagttttggcgttctgattactaaataaataataaacttatttgtacttggagcccaaaattgaatcgccgtgtgatatgaaaagctgtccaattaaaattgagacaaaaaaaaacagcggaaaataaaagcgcttaaaacatcaaattgcccaacaattggcgtggtgttcaaaatggtctccgataaaagtctggataaaagcgtagccgtggtcgtaattgggatgaagtcggtatttccacgtcagattcggattttcaacggccaacaaattggctggcaaaaggtcgccgttggcaaggaatgggtcggcacttcccttcaaaacattccatcatttttgatcactttttgttcctgtttttctactcgcctggtcaattagcacttcccttttgggcccttcgtattttttagccaattccgtggcgtcgtaatttgcccattttccctcatcgttccccaaaaagacacgcaaatatttctgtcctttcgccttcgacggattgcaaattggggcaaaggccgacacggagctgaacaattccggatgcttaagcgcaatggtcagagcacctgggaaaaagtcagtggcaaaagtgcagagacatttaacaattcttttaaactcaaacaaaagtctggcaaaatgaaaacattgtgaaagtattttggttgagtgagtgaatgtcccattttaatgccaactccgaggacggtgctctctggattcattatgtctggtagcggattgggatggcggggttgggtgtcccatgggtggtgggggggggtgttccatggttgggtgtgtctccgtgtaccctccctctaaccgcggacagattggtccgtgcctacaccgcgtgttcaccacttgccatggcctcccattgaatgtccaaaaattccgcatttatttttctccactgaaaaagtgctgaacacgagtggcacgagttcatccaaaatgtaggaatacattcgataattctgtgcccattttgtttccgtcgcgtccaaataactgaaattgacaccattttgggtttattatttctgatcagaagagttcgttcgac

SEQ ID NO: 12430 - DNA, 4343 bp, Heterodera glycines
caaaattttcctcggtgcatttcaaccctcaaatgttttttctcagtctctccctctccagccgttcaaattctattgacttcataccagaaagataaaagagcactggcaatttgctttccggctgattgtccggtaaataaaccccaaatcgcattcggcactttaactgggcactgtaacaataaaataattccaatttgctttttttcatttcactaaacctgttatgttcgaaaattttctgatacccattgaaccaccgggatttgcttaattcgaccagcgacattgtcaaaaacgaagtttaaatttaaatgctttcagctgcagcggtttaacggctctttaactaacaattagccaattttaaatagaaatggatatgcaattaacgaattttataatttgtaaatgagtgcttgggcgcgccgctattatctgtaataatctgtaataaaggccagcttcttaattacacacaccattaaaatttggagtttttgatatcgctattgaatcgtttatttgccataatcactcgcttaagttttaatatccaaaaagttttacaacgaagtggcgtgtctaaataaaaattgttcaaaaatacataaaacggaaaacattgaaaaaatgtacatacacaaaaaaagagtgaacgacgtgaaagaaggggggggggggggtgattccgcgataaagcgctgaattggaatggaatgaataagcatcgatttaacaacattagcatgtttccctttgaatacataaaaataagcttcattcaattctttaattggagataaaaaacattaattcgcctttgtttaaaaatttctctgatttgatcaaattcaattacctaattaaatagtataaattacagaatgccttttcaccactaaatattatctgattgtaattaaaatttaaactaaagaatcagggcaatgtctgaaggtttggtacaaaggcgacggaaagcagccgagtcgaacaattcgtcaaacggtggtcaacaattggatgtgtgtaattttaatgccaaatttacactttttggacttttcctttcagaatgatgacaaatcggcgggtacttacagacagacaaccgactcaaatggtgctggtgatgaggacaacgacaaaatgcaacggctaacactgatggaggaaattctgctgcttgggctcaaggacagagaggtgggggatggctatttgtcaatctttaacttattctgtattttttgtcccctcctaaaatttttcaaaaacttaggggtacacttccttttggaatgactgcatcagcagcggactgcgtggctgtgtgctcatcgaattggcgttgcgcggacggattgagttggaaagggcggggatgcgaaaaaagggcttttcctctcggaaggtcccattttgggacgtcctttctttaacacgaaaaggcatttaaggtgattttgaagaatgagaaaatgaccggcgatgttattttggacgaagcacttaaacacatcaaagagacaccacaaaaagagacggtggtcagttggattgaatatctgaggtgggccaaaaacgcgaaaatgcattgttaagatgtttttttttacatttagtggcgaaacgtggaaccctttgaagctgcggtatcaaatcagaaacttacgagaaaggcaattgcaatttattcataaattcgtgttaaaaaacttatcttttaaggcttgcaaaaaatcttgtggaaaagggcgtgctgactacggagaagcagaatttcctccttttcgacatgaccacgcatccattgaacgatggaaatgcaaaggcaaaacttgtcaaagtgcgttttactcaaattgtgaaccgaaaatgcccaaattcagcttaggtgacatttccctaaattagtaattttgtaaccaatgaatttgtttaccgatcaagccctatccaggggaaagaggggggtgggagaggaggtaattgccccctcccattcgaaatgaaaaatacgagggaaaatgggctttaacaaattaacaaaaatgcagttttttgtcagaaggtcttcgttttaattatgctttcaaagtatttttttgttcaaatgtttcagagagtacaagaggcggtcctctccaaatggacgaacgatttccaacggatggacaagaaaatgctttctctgctcattttggcacatgccagcgacgtgctcgagaatgccttttccccactgaatgaccagggtattcggggattatctgctcaattgttttccatttgtttatcccaccgtttccataagactacgaattggcgatgaaacgcgtgcggactttgctggagacggactatgaggcggagagtgtgaaaagcagcaaattgcaggccaacggcggaggcgaaagttccgctggctccgccttcgatgtgatatacgccgtgttcgaggcgttttcaaagtgatacaaattagccaccatacccattaatctatcttctattcaaccttttttgctatatttacattacaaaattttagatgaaagttacaaaaaaaaaatcgacagaaagtggcaaaaaagcttggttgaaattacccttttgtgactttttctggggggagccaaaccgaatttttgtgcgtttcttcgcaaattacgttccgatcacaacaaatttgtagtgtttctacgtgatttggtgttttcattttttgttctatttctgtcacacattttagctgtatacctatttttgcctaacattcgaaattttctgtccataatccctattccaaacgcaagaggtgaagaaatgttgaattttattacttttacctgtattgtgaaaagaatattaaagttatcaattccaacaaattgctataattatagtttccaatgaccattacttaaatttctttcaaatattccaaagtgtatcccatttaaacaatttttggatacgcaatgtcaccaattcgctatccctcgggagttaaattgcctcccttcgcccgcttttatgataatgtgtactggaaagtgaagcgctacatgaagccccaattcttcggagttgtggccactgttacaattattggtgcggcattttgggcgattgccattcagccgatgatcagcaacgaatattatgctgagaaacaacgcgagtggtggaaacggatgcccgtgtcgagggaggaacttgcgggagggctgcccgtgtggagggacccattcgaccgcgaggaccgcaaaacgccgtcgtacgccaaatagcaaccgaaaagcgggaggtcgttgaatccctttctcattgcccacactttgactgcatttttcgtttgtcggcacttttatagatacggcagtatgtatagaataaacctaatttttaagtccaactaaatcaccttgttttttgaaataagcatcggtcttcctaaatcataaaagtgtcctttgcttttgctcatatatattattgcatcactgttctttatccaaatgcatttttattacactttaattggtaacgtggaataacttattgttagtttatcatgtggaattgctcagttccaaagttgttgggattggtgtcacttggtccagcgttgactgttcctcgtcctcctccccatttcgcccttttctttgtccatttttgccacttttctgtcctcctccactgtgtgcccttctctcttcggttaatgttttggcagacagaacttcgaccagttcgtcgtcctccgcttgtggcgattgcctccgtgacgtaatgacaatgcgccgctcctccgccaacgaatgattacatttgttgctggttgcacagctacaaccgatttgtccaaaaattaatacctaattatataatctcaatatttttgttgttattgcttttctcaccactttttttgcggcttccgccgttgtgcaaaagtgagaagtgcgccttcggtgtccgcattataaacatcaatgccacttctgaaaccggaaccgatccaaatgttatctttgtgaacactcccacctcgtggccaatattcgcgccactttccgtccattcacttccccaacactcatttcagtggaatttgtcgagttcgctgttgttgaaatcgaactttctttgccattgtaaattgaagcggcactgacactttcaacaagattttcatcctccttttcaatgccttccacttttaaattggcaaaatccaagtcactttcgacttggaccgatcggtcaacaaatttgcaatatttttcctttccaagcgaaaaggcatcgatgaatggaattcgagt

SEQ ID NO: 12431 - DNA, 913 bp, Heterodera glycines
tcaaaaagccacaaaaatcctcaaatcctcattttccaaactccatctcattgacctatcaaaaagccacaaaatgaggataatcctcagatctgggagccctggatatcatagtgattcaaatatgtttcacattgcaaaactttatcttctcaatattttactcagatccccattcttaccggtgcatatttttttgcctatgccgcgggttgagaaaaatttcgggtttcgggttgagaaaaacctcgggtctcgggtttcgggttcgggttggcatcactgtatgtacagtatattatatcccccggttactgtttaagcgactgtaattgtctgtttgctgacttgactgatcagtgatcaccattatcaatgtgttgtgtctctgtgttaatgatcaattgttgcgcctaatgtgtgtaaataaatgtgaattcttgctaatgttttttaattcatttatgtacacaaaccaacaaaaacttaaattgaagcttttttctctttgcaaattgaaattttatgttaacatccccaggcttttttcggtttcctgttgttcgagtgaatttgaaaaaaaaaatgccattttgcgctcaagccgactccaactgaatgcaagcgccacatggcatcattgccttgccggacttgtgccggacatgcccaaccctcgacctaggccgatcggctggcacaccctttacaatgcgaatgggggcgcgaaacagcgccggcgagcagacaacgaaactgcgttgtcagccattatatatgctgaaaatttgttgttcttttttccgttggggtgtaaaagacgcgaggaatgggtggcagagggacccaagtcatgcactatttctccactgcgctgttttctttggttttggtcggttttgtgcgtctcatg

SEQ ID NO: 12432 - DNA, 2226 bp, Heterodera glycines
tttttaatttttaaaaatttaatcaaagaaaatgtgaaatggaaatgaacaaataaaatttgttgggcggtattatgatcaatggtgatgccattgagactgttagcagggtgccaaatgtcaaaaaagtgatcggacggtgtaaatttcgctgatcagcggttgccgagtttagtgagggagaagaagcgcgatgccacgtgttcagcgatgccatgtcaatgcctggtgccattctgtgtccagcaacagcaacgaggtcctaaatgccagaattgttttttacgattgaatgaacgacgatttatttggaacttaactgatcaatctgatcacattttttgggtcgtcaaaaatgccgggtcccgattgacttaataatttttgagccaaaaaattcaattagttccttaattctatgaaattaaaactgattctgggccgtttttcatttttccaaagttgtttttttttctaaatttgcaagctaattgaaaatttaatgacagtttatgtccgcgtggttggtacttttttataatttagcccaaatgagtttaaaagtcaatttaattcgggtttcaaaacaattaaaaattaatacgccaaaggattttcgatcctggaaaaagcccttaaattcgagaccacgaccgagacgaaataaatcaaagaaatttctcgagaacgagaatcttaatcagctcaacaccacattgaactactgctcctattaccgcttctgttgagatgggtccgcgtgcgctgagccgcacctggcgctggtccggcgccagccgcgccagcgcctgcgcctcctccaacagacggcacagtttgccgtgcacgtccacataaatgcgatgactgttcccgcgcgcaatctcatcgctgagcaccagcgacctgtgagggaattagggtcagtcaattaatgagcaattaatttactaattgaccaaaacgatcatggagcaaaattgggccccaattaattaaaattttataatgcagaaaaatcataaaatatttgtcagaagatggaaaaacgatgataattagggctacaagttttcattgatgaaaaatctgttaaattagaaaagcccaaaatagagatgtcaaaatgttgcaccaaaaaacaattaaataatcagaaattttttaaaatactggccaatattcacttaaattatgtttcgtgtcgatcagttttctcgaccgataaataaaaaattatgatcatatttgatcaattttctcgatcaggaacagtctcaggattcccatgggttggttgccattggtctgtccggccctaatggcttaaaccataaacaaatgccacactttcgcgtgatcctgttgtacttgggccagaactcgatgggttcactgaaatgtggatttgaaaatgataaatttatcgtttaaatgatttatgcaatcccaaaacttgcccagtgcgcgcaaaacgtccccaaaagtccatgatttttgccgaaaatgcccgctccatgtccaactctttttggtcgtatgcttgtgggtgccgaaatggcatgccgaacacatacctgaaaatgggaggaaaagccatgaaaatgtgggaggtgacaatgccgaatagatgatttggacctgccgttatctgcgctttgaaaaggacacattgatcgaaatgctttaccatgattatgatttgaaaaattgacaaaaatttcgtttcgatcaatgcgaccttttcggcgacccggtaattaccgtaatcgttttttcaccgaaaccccgaaaacgacttgtaatgataaatttataagggttcaattaccggctttttttgccaattagaaaaatcaatatttctttgggtagctttcgatgattggcggtaaatgaatggttaattttaacggtatttacgacaaattactacggtaaacgatcctactgtatttgttattcaaatataaaacccactcaatttcatagccgtgcataatgcccatccaacgaggccacggattggcggaagaacgttttacaaaatagtacatgaatacggagccgaaaatgttctctgagctaaaatgaaaacaaattaaaaacaattaagctaatcaatgcgattaaaaacttacacaatgtcagcaaattcaatgagggcacaagtgaagaagctgaaacgaaaagcataaataaattgcaccaaaaaagcagtgatca

SEQ ID NO: 12433 - DNA, 1346 bp, Heterodera glycines
aattagagataatctcactaatcgccgaggaaccgtgccacaccgtcccgccaccgttccaccgccttggcatggttgtgatcaggcgtgatgcgcgcataggcgtgcatcagcgcgtgccgtaccaactgcgagttgccaaagtaaggcaagaaggcgtcaaaagctttggtgtattcagctctaagaaaattttcaaaaatagaaaaatgaaagaataggaagtttttttaattcttaatttttctaaaaaattgctaataaatttatgtaaatttttaaatgttgaaattctgaaattttcccggatttttctgaacatgatccttattttggaagaaacaaatctcggtcccgactttaccggtcccggcgtttccaaaaatcccgtcccgcccatccttagaacaattaattgatcaaaaatgattaaataaaaaaagtgatcagaagcccaccaaattttaaaggaatgatatggacaaaaaacaaggtaataagcctaattgtaaattccaacttactcagtgaccagtgcctgattgtactgatcctccggtgatatggtatggttgaagccgaacccgtatttgtgaaggtagtacggtagccagtaagtgcctgtaaagtttgttgtgctaagattttttttcagcggctctcaaaattcaaaaaaactctctggagaggctgagtttccggtgcctaacggcaaacgcattcatttaacaattatttttgcataatttaaattcatttttttttaatgatgggatcaaaccggaaaactttcccagattgattgattttttttgatcaccacccaatcaacccgaaaaaattcttcaaccttcaattcgatcgatttttgcttctacaaattgatcgttagttgatttaatttgatcaatcaattctcaatttgaaaaccaattaaatgccagatttggcataaattagggctgcacgagaagctcgacattgagtcatgaaaggtttcgcgttttttggggtttcgtatctctggctaaattctcaaggcctaatcgaatgcacggtaattgccggcatcaagcagttgtggcacaaaatgccgccccagtgccggtgccatcccccttttttggaacaccttcgtcccggaccgtgccgagcatgatgctcacatccttcttgaactccttgcgttgtaacttctcgaacagattgcccttgaagaaattggcgtcctcatcgattggcacaaacgcaaaattcatcggcaacagcagagggcggagatgtgatcagattctctctgaatttttgtgatttacaggtctttctggcaccgctgtactgtacat

SEQ ID NO: 12434 - DNA, 3425 bp, Heterodera glycines
caaaattattatgttaaaacgatattaaaattattttgcaaatgtaaaaacaaaaaacaattatttgcagggtgggggaaatgatctttagaagaagaaaaaaataattgaaggcatacccactgggccatcaacgctcacattggcttaacattctttgaaaatgatattgatatgtcaaaaaggaaaagcttcatatctcggcccagaagcttcatgttagcaaaaaataaaaaaaaattttatgtcacttgggtacctctcctttttgcagtgtgggcgttccacaaaaaagctcagtgattgataaaataaaataaattttaaaatattaattattgaacggcaagtgtaattttgatttaatttctattagatgtgttataaaaaagaatttataatatttattacatagctaaaaaaggaaaattcacaaattaattgaacacaattgattaggtgctaattttctttgcatttcatgtaaagattttataatttcattcccgaaacagtgaattaattgataacataagaatgtcatagtaaaattttgagtatttaagctaatttttattaatctataaatcacaaatttaaacaaatattcactctcccaatcgctgcaatgcatccaatcaaaaaatttatatttttgtatcttatactttaccaaagtgtgaaaatcgaacaaaaaccggtacaccgtcgtgctatcctctctgtcttagcaattggaggtattgtcgctcttgttttggtaccaattgtggtcggatcggcggtagtagggtatttgatatcctacaacatacattgtgctaatggaagatgttagtttgtttatataccgtactcaaaaggcttatatcataaaaaaaatttaattcccctattaaacagatgtcgaacgattgaaagtcttttttgcttaaaatgagaatctacgaacaaaaatttagcagcttctagctgaattttagatgcaaaaagcatagttccaatttctcgatttctatagatcatccattctgtttcagtaaatgtttttcccattagtagtttgagtgatcctaattttgttagttgtaatctttcaggaacatcaaagggatcattcgaatctgtgccttgtaattggtgccgcttacggttgtaagcgcgtcgaactgatatccaagaggggtaattactcgaaatcgaattttcatctaacggatctctatctgtttttaagtcggcttctcgtgcttttcacaaaccttggcgccaaatgatattgccttctgactcaaatttataattttctcttctttgttctctatcaacctgttctgcttctagtttctctaatttttctggcttacagttagcattatgagttggctgcaacataacaagtttggttccctgtcgcagaacagctgacgcgacgttcgatttgacattaacatttttttcttgttcgcgaaaataacgacattttgaacaagaaatatatatgtcttcattattctcatttgtttgaatatattttctccaaatcttattgtcttttaaaaaattggctctaagctccaccctctcttatccaggcgtggatttttgcctaggtccagaggttcacgccatttttagcaacatgtatttttcctgaacctggatttttgtaaagaaaagctatgcttagacccgtgctgagtcgttccacaaaaaagctcagtgattgataaaataaaataattttaaaatattaattattgaacggcaagtgtaattttgatttaatttctattagatgtgttataaaaaagaatttataatatttattacatagctaaaaaaggaaaattcacaaattaattgaacacaattgaatttattttattttatcaatcactgagcttttttgtggaacgccaacagtgcgcttggtgcttaagttataaaaactaagattagcgggaggcatcgtggagaagttaatttaaaatgcaaaccaaataagatagcaataaaagtgtaaaaaatgaaaaagcaataacaatatttgttactttttattttctaatttaaaaaatatacaaattttttttataaactattattattctgaaataaaataaacatttcatattttatacaaatttcaataaattttacatttaattacacaacgagatagattaaaataaatatattagtaaataataaatatcttttcaaaaaagtaaaatgcttgtgtgtaaaaaatttaatagaagtataaagcgcaaataaattaatacaaattaaattatcaaaatcaataatttacatattagaatcaaataataatttaaaactttattcaataaattaaacattatatttatagaaaatttaaattacgggaggcatcgtggagaagttgcgcccaatttggaagcaatcagaatgacgatttatgcgccgatgccatctcacatcgtcaaacgacggcaacataaccgtttggacgataccgccaccgtgaggaaaaaaatattataaacattactttggtcggaatgtaaatgtttaaataaataaattactaaaaaaaaattctgttggtataagaatttaaaattgcaaaccaaataagatatccgcatttacaataaaattaattaaaaacaatttttaaaaggatttgaagttttagtccgtatttttgtccatatttggcatttttttagtccatattttataattcttatgtaaacaaagaaaaatgttcgaggaattaagcaatttataatttaaaaaagtaaaattattagcttaaatattatttattgtgcgtcgaaattcggttcccctttcacaattactattattttggtgcggtccaccttcggaataatggctattatctcattcaatttatgtaattacttggaatggactgagctacgaatgccaaaggccatccggtaaaatcataggtgtctcgacacgggactataaataatttttaagaaaaaatatagatctggaatttagagattgatagaatttgaaattcataaacagggctgcaaaaaatatgcacgaaaatgaccaaaatatgcacataaatatgcaaataaaattgccaaatatgaatcaaatatgcacaaaaatcgaaaatatgcaccaaatatgcacaaaaaaactaatttaggggtgcaaaataaataaaaaaatttattcctcataaattttatcggttgtttttgtaattgatcatcaaaaaatttctcaatgttttcggcagtgaagctcactgttggacccactcgcgcattcattcagatttggatttaattttaagcataatcaaatttttttcctcaaagacattcaaatcggaaaatatttgacgaaaagtggcaaaatatgcaaaaaaaatctgaaaatat

SEQ ID NO: 12435 - DNA, 2461 bp, Heterodera glycines
  unsure (1)..(2461): unsure at all n locations
acgctgccgctgcgacaccncggaggtgcacgccgcccgtccaagcttggaagacggcgtaaaagaacaaaaggaaatgactcagatggcataaacacttgtccatttttctattgttgatattctgatggactacccaagaataaacgaaagtgaactcgcttttcccatcccttcggggataattgtcagtgggccgtcctcttcgggcaagacccagctggtccttcgtctgttacggcatgccagcttgatgtttgacccgccgcccaaggcaataggtatgtgcaaagggggtttctgtgcagtggactgttgctatttagtatgggcatacggtgagtactcgacgcagattcccgatctggagcggcagggagttgtcccccacgcaggtgccccgtctgacgagatgctgaaaaagctgccaaagccttgtctgattgtttacgatgacttgatgggtgacattgaggccaagaagttggccgatctgtacaccaaaaagtcacaccataacaatttttccgtgattttcctcacgcaaaacctgttcgataaatcaatgcgggtgccaaggtccaacgcccagtacatcttcctgatgcgggctcccaacgacatgcttagcattcgtaatttggccagccagatgttccctcgcgagcagggattcctgatggatgcctaccgacaggcatgtgccctaccgtacggctacctgttggtgactctccacgcgaacagagacaacattatacgcctaaggacaaacattttcccagacgacgaggagagaatcatttttgcccccaaaaatggttaagcgggaacagaagatcggtgagcgggttgtgcacaactacgactatttgaagaagttgggaaagacaacgtcggagaagaagcgccgtcatttgttgaacagtgccggttgtgaggaactgttaacgcttgtcgagatttgtctcaacgttttgaacgggagtttctgtctgagcaggaaacaaaagcagagacttgcgccatttgcaaaagacatcagacagttggcacgtgtgcgaagcgagaggggtgcgcgaaaactagtgcagcagtcaggcggatcactttttgcccctttgttggcccccattctgattgaggctgcccgatacctgctttcgcgcagcaataatggccaataaacttattctgctgccgtacgagcactacaaggggctggttgcagcgagggagacaaagaatgacgacgacattgctgagcggacaaacttgggctttgtcaaacgacaggtgaccgctgcagtacagaagcggaagggaaacgtcagcgaacggaacgcaatgtacaaccagcacctgcgccggtacctgaagatgcgcaaggaacataaggagcggcccgtccgagtacagctcagcaacggcgctcaactgctaaataaaacagtggagacgggtgtgcaggtacggcctggtccggacgaaccgaaggacaagtccgtgatggttaccgacgaagatgaagaggaagagattgaagtgccaaagtttttaaccccaacaagcccgacgcagggaagcagccgatcacccaggaccaataagaaagcagcaaaacagcaaaaattgatcgagaagaaggaccacctgttggccatcattatgtctgatccgcagagattcggcgcaacagaccgtggaaaaatcattaacccaaagacgggccgagagttcattgactcggacctggcctggtcaattgaacgcctggtggaccctcgcccggagaatgccccttcgccaagcggaaccaaagagttgaagaggaaactcgcacagaatccgcttgccagtagcctactcaatcgactgtttgttgggtctgggttcgtcggacaagtcaaacaaacgagaggatttattccctcaaaatggacaaaaaaataaacaaaatatacaccgacccggccaatccgggcgggtatgcgggggcgagtgctctgtacgcggcggtgaaggagaagcacccgaagttgaagcgtgccgagtttgaggactttttgcaaaggaacaccacctacacgctgttcaagccaaagagggagaagttccgacgcctacgcactgtgcctacgggtttcatgaccggtaagttgtaccggggcttattgcgcacaattcagggttcagatgttcaggcggacttggcagatttccaggcactttcgtgcaagaacagcggctaccgttacttgctgttggtggtggatgttctatcgaggcgaatgttcggcgcgcccgtaaagagtaagcgccctgtggacatgaaaagggcgtttgaagagctatttgagcaaatgccaagggtgccagacacaatgtacaccgatcgagggctggagtttgtggcaaaaccgttgaaggagttttacgcggagaagggcattcaaaagtt

SEQ ID NO: 12436 - DNA, 4108 bp, Heterodera glycines
  unsure (1)..(4108): unsure at all n locations
tgcaaaaaaaaaaaaaaaaattttttttttatttcaccgattttttttttcttatttttgcatctggccagctttttgttgtgcgccaaaaagtgccaaatatgtgaaaatgacnncaataaaacaggatttttctggttttggttttcggaaatgggggaattcgtaaaaatttggcatattttgttatttttggggttcatttttgtacacctggtcctctctcaagcgaaaaacgcgtggccgatcattgccaatttgcgcttttggcgtcaccgtgccaatttcgatgaagccgaagcccgacttgcgcagcccgtcaatggcctccccattcttgtcaaagccggcggccaaactgaatttttattttatttatttaattatttgaattggaatttttaaaataattattttccgacagaaaaagttttacagaaatcgaaaatcgtttttgaaaaagaatttttttacaataaatttctcgccctccaccacaatcgacaaattcgtaaaaaaaaaaaaaaaatgaaaataggggtcatttgcaaatttgttgtgtgttttttccggattttattggctgaatttgatgatcgaattttgttttttttccgccattaaacaactaaaattagaatgaatttttttttaaataaatattattaaaggcccacccgattgggttgttcaactgtttgccgaacatttgacatgccaactcggggtactccttgcgactctccacaaaatcgtcgaggaaacccaatctgaccgccttgacgccgagaatgtgcgcactttcgggagcaaaccaacggtggaccatcggaacaacctcaaaaaatgggggaaaagttgaaaaaaattagcaaacttaattttgatttaaaaaatcccgaataagcgtgttaaaaaatggtgctgttttatattgaacccttcattcagaaggagcagttcttctcaaaattattacggcgaattaaaaaactttttcaaaaaatgcctgcaaaaaaatggaggagagggtaaaaaaaacagggaaaaaaactctcgtaaatttttaaattttcaaaaaaatccgaataatcgtgttaaaaaaaactttgtactatattttatattgaaaacatatgcaaatcttcattcatacggagcaggtcgtttatcgccaccccggaaaatgcgtacaaaatttttttgaaaattttctaactattttttccccaatttttgactcccttccttccgagagagtcatttttcgaataaaaatgccccgtttttttgttttgctcacccattccctgtgtaagcgctcgtcgccccgcaatattttgtacatgtaatagccaatgccaccggagaggagcactgaaatggtcaacgacgtgcgcgtgtacaccaaccgtctcggcttgggcaatttgagtcccgacactttgtcgtagggtacagaggagggggaggcggttttctgagaaatggcacacgaattaagggacaatcattgaaatcggagggctcataattgaacaaaaaaaaaaatcggatttgggcggaaaacacgaaaaattttagtcttggccataaaatttgttttagccagtgtgatgctttgaaaatcaggtggctcgggtgaaaaaccaaggcattttagctgatttatggacaaaagatttggccaaaaatgatatgtgacaacaatttggaagcattttaagggtttcattttgaaagtttgtagtccatgcttggcattttttaaaaaattcaaacgaaatttgtcaaaaaaaaagtttaaaaaatgtagagattttttaattcaatcgaaacccccaacgaattgaaattttctcgcgttttttttctcagggtttttggttaaatttaaccgttaaaaaaaatgtgcaaaccgaaaacatcagtgcgacagttggcgattgttgttgttgttgatatttttggcggcgtcgacctgggctcttaaactgaggaaaaattgacggtgtgtaaaaaagcaaagctgattttaagaaaaatggagcatatattgggggtattgaactaacacatgatctatggaaatctattgaattctaaagaaaaagaaagtatgtgatatattgcgtttatatagcatcggaagacatattttgtgctagaaaaagcagagcgtcgcggtggaaacgtcgccgggacataatgacgtcgcaaaaataaattaaaaaatttcaagaaaactcaaaagtattttagctttttgaaaatctaagtgttaataaaaaataaatttgctgaatttccggaaaaaacccaaaacttgaaaatttttttttaatttccttgataatttttttttcattttttctaaaattaaaaaaaaaattttgcggcgacgttttgtcctgctccggtttttgggccatttaacaaagaaaatggcaaaaaaaaagttttttgtacctccgggagagtgaattcgaatgtgcgcactgtgccacacttttgtcggtcctcacaatgcaaacggagttgaataagcggaacaaatttggtggttggggaacaatcagtgtcagagacaagctgagaatgaatgcatcagagtaaatgaaaattttcataattttagggttgcaaaatggaaaattttaaatcaaaaattcacatttgacaaaaatttattgcattcaaacaaaaaaaaaggttaagattttcagtgaaacctttgtggtgtagtcaaaactgcggaccaccaaatcggacattcacaaaaaatgggaaaaaataaatttcaaaaatgaaaaaatatttaaaaaacacaacaattaaaaatgtattaaaaaagaaagcaatgaaaattaaaatattaatcataagtaatttattcgtaataaaaaggggaaataaataaaacagagaataaatataaatgtaaaattaacaattggtggtcattcgtttttaatgttcataaaatatggcgcacgagaaatgacaacaataaaaaaagaagagatttttgggagaaaaaacaaaaaaaatggaagtgagaattgtggcaaaatgacaataattatgcgcaaatttaaatgaataaattatcacattcatttcaacaaaaacaatgaaaacaaaagggggaagagaattaattggcaaattaaataatttggtgtaaaaaagtaatcacttcttgggtcattccaattattttcatcataaatccgcgtccaacacatcctcaaaattttcatggtccaaaaatggcatttggtactgttggcaaattaacagggacatgtaaaaagtattagcgaaaatttacaaaaaaataaaataaaataaaaatttttcggtgggttaaccccatgttaatgtttttgctaatttgtgtgcgagactaaaatatcaaaaacattggtcatatagatccgaattggaggcagtaaggctcgactaaaacgccaaaaaatttttttttttattgttagtcacgaaaaaattttttgagtctgaattcgagaaaatcttggttgggctacctatacggctagggcaataattctaacaataagcgcatagcggggggggggggggggaaatacccaatttagcagcactgaattttggcacaaaaaaagaagatcaagcatccattcgcttaaaattttgtaccgaaatcagtttaatgcgatattcagtgccatcgccaccggcgccgttcaccaatgcgtccagtgcgcagctgctactgttggcatggttggatgaggacgagttgttggagcaggacttcacactcttttggtcatcgccgactccagcaacaattgaactgcttgccaccgcggacgacccgtcggacgctgctttcagcgaaatggcgtcgtcaacaaatttgaacggagactgcagcacataaatgaatttgaaattattaaaattaatcactattattgggaagaattagaggcgtaattattgagtcctattgaaaaaaaaaattttttttaaagaaattatggccgaaaaaagtctaataattgtaatgtccttaaatattttttatgaaattgtgttaaacaggctcaaacggaat

SEQ ID NO: 12437 - DNA, 792 bp, Heterodera glycines
cccaaatgtcgtggtccccaaaagtcgggtccccaaatgtcgggttccaaagtgtcagggtcccaaatgtccctaagtgtcgggtccccaaatgtcgggatccccaaaagtcaggtccccaaatgtcgggtccccaaaagtcgggtccccaaatgtcgggttccaaagtgtcgggtcccaaatgtcgggatccccaaaagtcgggtccccaaatgtcgggtttcaaagtgtcgggtccccaaatgtcgggttctaaagtgtcgggtcccaaatgtcgggatccccaaaagtcaggtccccaaatgtcgggtccccaaaagtcgggtccccaaatgtcgggttccaaagtgtcgggtcccaaatgtccctaagtgtcgggtccccaaatgtcgggtcccaaatgtcgggatccccaaaagtcgggtccccaaatgtcgggtttcaaagtgtcgggtccccaaatgtcgggctctaaagtgtcgggtcccaaatgtcgggatccccaaaagtcaggtccccaaatgtcgggtccccaaaagtcgggtccccaaatgtcgggttccaaagtgtcgggtcccaaatgtcgggatccccaaagtgtcgggtccccaaaagtcgggtcccaaatgtcggaatccccaaaagtccggtccccaaatgtcgggtttcaaagtgtcgggtccccaaatgtcgggttctaaagtgtcgggtcccaaatgtcgggatccccaaaagtcgagcccccaaatgtcgggatccaaagagtcgggtccccaaaagtcgggtcccaaa

SEQ ID NO: 12438 - DNA, 3162 bp, Heterodera glycines
gtcccaaatgtcgggatccccaaaagtcgggtctcccgaatgtcgggtttcaaagtgtcgggtccccaaatgtcgggttctaaagtgtcggtccccaaatgtcgggatccccaaaagtcaggtctgcaaatgtcgggtccccaaaagttcatattaaacattttctatgcgtaaattctttctctatttatcgaatttacatatagtttttccttttataaagcggtaaagtgtatcgatcccccccccccatctccgattcgcccttctgctgatcctttctgcattaaaatacacacattaataaaatgtacaaaaatgaatacctaatcacttttaagcgaattcgctatttctccgatacatttaaatgaataaattaattctggacggaatcccaattttcattcgattctcaatcgtcaaacagttattttacgttcttccaaattaattgattcttaacttttgacacgttatttaaaaaatgagaagggtttaattaataacgcttacatttttaggtttttacctattttttcctgagcttcatatggtcttaaacgcacgaaaaacatatgttttttcggttgttgttaagctagttttagttattagcaactattttctagctttttattttctgcacctaaaaaactaaaaaaaatttcgaagaaaactattttaactattttggcgttttgcccagcattaaaaacgaaaaatacacccctaggaatcgacctaaaaaatttttcaaaaaatacatccctatgaatcgaccagaaatttttcaaaaatgcacccctaagaaatgaaaaatttctcaaaattcatcttcaaaatttagttatttacttgacaagaatttttgatttaaaaattatttatctcaaaaccagagtggccaagtttttttttttcaagataagacaaaatggctcaaaaactaagactcggaccccaaaaataagatttttttcaaaaactaatagtagaaggaaacgcaataaaaacatgaaaaatcgacttgaacaataaaataaaaaccagggcctgtcaactgaaaattttcaaaatcaacattttgccgacaaaaaatcatcatttgggatcaaaaaatcagggtaatcgttcacatcattggtcccataaaaaaaggcaaaaaaaaaggtgtttttttttattctaagaagtgctcgggggttatcgagggcgctgatcactagggatcggattcttagttttttaactattttttctgcggctttaactcgacgagaaatgcacgaaaaacacattctttttcgaaaatttttcgtttttagtgccactattcatcactaggaatcactattttggagcttcgccactaaaaaaaactatttcggaagttagccactaaaataattttttgccactattttggcgtttcgtcattatttttgccactattttggcattttttggaaaatttcccaaaaaatgcaataaaaacgaaaaatacaccccaagaatcgacctaaaaaattttcaaaaatacacccctaagaatcgacctaaaaattttcaaaaatacatccctaagaattggaaaaatttcacaaaaattcttcccccaattttttttttcttgttcaatattttctaagaaaatattttgtaactgcaatcagtgaataaaatctttttccttaattttaaattattttcaaattaaaaaacagctatttaaaaaattacacccctaaatttggaactttttcaccactatttttgtcactattttggaatttttttctcactatttagttaattattttgggattttttatcactaaaaatccgatccctactgatcactaatctgacatcagattgtcatataaatcatctaatctatgatttttcatcaagtgatttctcgtcagaaaatagtttgaatttttttttaaagtaacagcgagcgagtggaattgcagacccattcgaagagatcttaactcaattttggtatggcatttatgcctccgcaataattttggcgcgtagctttagcaattccacacgcaagttgttgattttaaaaaaaaaattcaaactttggcctcaaaacggaaaagtaccgaaatttgttaattagcaactattttctagttttttaaaaaattttagagcctaaatgcataattttttttactaattcgatgtcttctctcctcactcattgaatttgttagatttttcttttgattgacatgccgcctcctctctatctgtccccaataattgaagtcattcgttgccaaatctgcgcccattcccaattcgttcagagggatgctcaattggtccctcgtgaccaattgttggcgcatatcgctgcgcacattaattacggaccaacttctgtattaatccataattaaaagaagggagcaaaggcttacttattcttatttataggagaagaatgaacgtcttaaacaaatatgccaacgggagtacgaacattgcatttgcattgactttgctgaacgacttggccatttgtctggcgaggacggccatcggcaccatgaacaacagcaggcgaacatgacggtgagcacaaaaggaagggcagtgagtttgggcaaaaacttaaaaagatgatttgtttattcccgtggtgtgttttagcgagttttgttttgtttttttccatcgggtcaacaatttccgtccctttgattttcagttccctgctgcccctcctcctcctcactttgcgtcttccatccccaatatccgttctctctcgtccaattcgtcgtcctgtctccctccgtcttcctttgccgatgctttgccttctctcgccccgtcttcgtcatcttccaaatctgtgtcctcttcatccatcagcggagcggcggcgaacaatgggccaacggacaaagccatcggaccaagcggggcaaacgccatcaaattggagagagtggtgaatttcgttggggaatcggaaagacaaaaacgaacgaaaattttgaatatacgcctttaaaggtgccatcggattgcttatcggtggcagagaaagtggacgacaatcgaaggatggacaacaatgaggagaaggccactaacttctacaacaacattcaactcatggaaatg

SEQ ID NO: 12439 - DNA, 548 bp, Heterodera glycines
cccgacatttgcccctgtgtccaaaaatgggttcagaatttaaaattgcccccgcttttggacatatgcgcaaatttggggtaacccactacgccccccccccccgtatcaatgcccccctccctgaaaatttttatttttctaaatttcttagaaagaaatgattatacttttatgcagcacatccgtccgctgttccaaatgcaagtgccgctttcacgggaaatgcgttaagatccgtccgcaggaggcaaaacgcattccgtactggcaatgtccaaaatgccaactggaagagaatggggcggaagaggtgagcaaattgggaagtcgggggaacttatggtaattagggaatggatggacaaaattttacttttcaggaagaggacgaagacattcagcagatgtattgcagttgccttatgccggacaacaaagaaacgtgattttaaaaacactagtaatttgtttttggtgttcattcgtctgtttatttcaaaacggtaaatggcctgcgacggatgcaacgaatggttccacccgaa

SEQ ID NO: 12440 - DNA, 4110 bp, Heterodera glycines
taagcatggcgaaggttgacttttcattgacattttgtaaaaaaaataaaaatttaaatccgaaaaatgatttttggctaatcacagatcatctcctcgtttgtctcctccgattctgacgactgttcttcgtccccgccaattgctcttcagttggaccgtccgtcgtccgcgcaacgcttctacagtaatctgttgacaatgagctacagtaagcacaagcggcggaatggcaaccatagaggttggaaaattccagaaaatattgaaaaacattgaaattttaacattttctgctgaagcttcgcgtgacaagcgcttttggcgacgaagccaacggcgacgaagaggcttagaagtgattgactttgagacggacaaaagctcagtgacatcaagcataaaatcagcagaaagtgggggctatttcaaaaaaattatttaaataagaaaataattttttaatttggtattttattttctttgcattgaaatttttcgtcaatgaaaattattagcagctaaagctcaagtgcaaaataataataaataagattacggaatttaccggcaccgggctctggcggcctggtaaaagcccgtcgggcgccttagcccaattcatctcttcaaaataacaaaaaaaaatgaaaaagaattatgtaaaataaatttttaattatttaaaattgatatccttcaatgtctcaattgttttccaaatattcgtcatgatttaaacaattaagactaaactcacaaattagttttttaatgataccatttaaatcctctttcagctgacaagataacggttagataattttgccgaaaaaatacacattttatggatttatgaagccaaaaacttaatgctttcatctgtattttaagaatccgccggaattgttgacaaaaacaaaacagttactgcggcacaacaaaaggaagtgccgactttgttgtccggcgggtggggaaaatccggcaaaaactccaaggaacactttggctacaacggcacgagcagtgcccgaagaaatgcactttctgcggaatgtccaacagattttgcatcatcatttttggatttattggacatggttttggcaattaattcaaatccaaaatgccattttatttttcaagcgttcgcttggccaggtgttcatcgacctcgattttctcgattccagcgcgggctccgacttttttgccgtcggaattagtggaaatgtttttagggacccgccagtgccggtaaaataacccataaaattgcaaaatttttgctctccagttttactcaatcggcaaacaaattaatttgaaatttcctttaattccccgttttaattgctttttcgtctccatcagatgacaaatgtcaacactgatttggtcgaagacattgtccaaattaattaatttatctcagatatttttttgttaataagtaaaaataataattattatagtgcaataaaattccaaaattagattcatcattcattcattcgatgatatgacgaagaaaagctcaagaaatccaattaaagcaagattaattattttaaaattcaaagaaatattaatttattaatttttataaatttaaattattaaaaatatatattaaaattttacaacaattatatgcgtggtgagaccaagcaaattatttaaaatttatttatttaaataacaaataatagaataattttgcgctaaaataaatattcattgctcatcgttttgcaaaacaaacattagttttctttgaattttaaaataattaatcttgctttaattggatctcttgagcttttcttagtcatagcatcgaatgaatgatgaatctggtttggaattttattgcactttaataatattattagggatgcaaaaaatatgcacgaaaagtagccaaaatatgcgcataaatatgcaaataaagtcgtgaaatatgcaccaaatatgcacaaaaatcgcaaaatatgcacaaaaaaacttaaaaattaggggtgcaaattcaataaaaaaattttttttttttactagtgacttgccaatgagctgctacatttcttttataaaattctctttagcaaatattgacattttttaaatcaaaaattttctcatgaaaaaaaatttgggggaagaatttttgagaaaatttccaattcttagtggtgtgtttttaaaaattttcggtcgattcctaggggtgtattttccgtttttattgcatttttgttaacaaattttccaaaaatggcgaaatatgcataaatatgcacaaaaagccaaaatatgcaaatatgcacaaaaaatctcgaaatatgcaaaaatatgcaaataaaagtcccgacttttatacgcaaacacaaaaaagaaagtgtttttcctattatttagagcatggagaaaccaggaaaaaaaatgcatttgcataaaatttgcaccctaattattatttttactaatattaacaaaaaaaatattttaaataaataaattaattattcgaataatttttctgggactgaaacggcccttcccccaaaactcaaacacacatacttttgtcactccggctcaccacggttttattactttttcgtctccatcagcagatgacaaatgtcaacactgatttggtcgaagacattgtccaaatgaggccgaacagtgcgaaaaaattggcggaggatgaggacaaaagtttgctgagagatgttgacgaattggagacggatcagcaacagcgggagaacaatcgcaggacaaaggcaccaccgccgccaatgcttcgcttccccggcgtcggattaaacggatatcagcgcaaagctgtggaaatgattatctccgaaatgagcgcaaatgcggcattgcagcaggcatttcggtactcaattggaattccgattcaaaattcgacaactttaagtgttttttttgcatgtaaaatttaaaaaacccatcaaattttggcagtttaattaattttttaaatttaaattcttgagtaattttaaatttttgagactaaaagtgaaaaatcatttaattcgggaaatacaaacaaatttgatatttgtatttgtgaatttctgaaattaatcttttctcaacgagaaaaaataattttcaaataaaaaatagaaattttggaaaaaactattagacaatcgaattttttcaaaatttttctgtctttaggagtcctttgaaattttcttttttttgtgtgagatagcacaaatatgaataaaaaatagaatatagagaaaaatatgatcaacagaaaatataaaaataaaaacccatccttgatgcttcttctaaccaagctaaaattattattcacttggtttttagactaaattaaatgtgccaaaatagaaatacaaacaaatcagtccttatttgttagcgcaaaaatgatgaaagttcggctgggaccaaactcggcaatgtttggccaaatgttgcgcaccacttgtgggccggacgaagtgtgcctaagcgattccattcccgaattgggcgagaaatacccggaccaacagttggaaattgaggcaaattagttgggagtaaatgcaaaatgccaaatttggtaattcacagattgcacctgtgcaagcgcccaacataaaatttgccaaaggtattttatcagggttgttgcaaacacgaaatgatcaacccccgggtatttactctttttgtgagaatgatttaattgaatagaaatcaattttatattaaacatgaaaagcagaggccaaaaaacagacgaaaaaagtaattaaaggaaaatgcccaaatttaatagaaaataaaaacgaaaattatttacccgaaaagtgggaccaaactctactccccaaaatttcgaaggacgaagaaatgcctatttatagtatttgtcacgaaatgccatcacagattcagtgactgtgcaccttgttggcaatgccaccatttttctgtcccaaagcggcaaatccatcggccgaattccgttcgaatcggacgtcgaattgggcatggcactgaacaacagcagcagcaaaagccaatccgcaacgacaaaat

SEQ ID NO: 12441 - DNA, 1264 bp, Heterodera glycines
aaaaagagatagccattttctgagatatctattcttagttatggagccattttccaccgaccatttgtagggctcaaccgtatatagtaatgcgttttcggggaaaacctcatgtggaaggctgtagaaaaaagagatagccatttttctgagaatatctattcttagttatggagccattttccaaccgaccatttgtagggctcaaccgtatatagtaatgcgttttcggggaaaacctcatgtggaaggctgtagaaaaaagagatagccatttttctgagaatatctattcttagttatggagccattttccaaccgaccatttgtagggctcaaccgtatatagtaatgcgttttcggggaaaacctcatgtggaaggctgtagaaaaaagagatagccatttttctgagaatatctattcttagttatggagccattttccaaccgaccatttgtagggctcaaccgtatatagtaatgcgttttcggggaaaacctcatgtggaaggctgtagaaaaaagagatagccatttttctgagaatatctattcttagttatggagccattttccaaccgaccatttgtagggctcaaccgtatatagtaatgcgttttcggggaaaacctcatgtggaaggctgtagaaaaaagagatagccatttttctgagaatatctattcttagttatggagccattttccaaccgaccatttgtagggctcaaccgtatatagtaatgcgttttcggggaaaacctcatgtggaaggctgtagaaaaaagagatagccatttttctgagaatatctattcttagttatggagccattttccaaccgaccatttgtagggctcaaccgtatatagtaatgcgttttcggggaaaacctcatgtggaaggctgtagaaaaaagagatagccatttttctgagaatatctattcttagttatggagccattttccaaccgaccatttgtagggctcaaccgtatatagtaatgcgttttcggggaaaacctcatgtggaaggctgtagaaaaaagagatagccatttttctgagaatatctattcttagttatggagccattttccaaccgaccatttgtagggctcaaccgtatatagtaatgcgttttcggggaaaacctcatgtggaaggctgtagaaaaaagagatagccatttttctgagaatatctattcttagttatggagccattttccaccgaccatttgtagggctcaaccgtatata

SEQ ID NO: 12442 - DNA, 2108 bp, Heterodera glycines
ctcaagcggcggtttctccaccagcaccgacacatccacaatgttgattcgtgtctcgcacttgacataacgctgatatttgatggaaaaccatgtgcccaaactgagcacccgaaaactaaaacgatcgctgtgcaaatgcatcgatggaatgtccgattgggactgacttctttcggttggcctgacaatactcatcgaagcgacattctccaggcagaaatgtcaaaaggaccaaatcactgccattataagcccacaacaaagcaatcgatcgcctcaccaaaggatcaagctgcgcctttttcttcgttgccggcataaagcgccaaaaaaccaaatttaaaggttaaaataatcaaaaaattaataaataaaagactattaaacttaattaaaagagagaaaagtttgctttgcccaccattccttcaatataaaatatttttattcacaatcattaaaatattaattaaacaattgcatagaaagtatgtaaaaatgaaaagaaaagagattaaagcaataaaggagaaaaaatgataaaataaggcaagataattcaaatgttgtgaaattctaagttaaattaaaaaaaaagaaaagtatggcaaatttgtaagtaagttaacaaaaagaatggaaagtcgatggcagattagttatagaaacactgggtgataaatttcaaaaaaatgcgaaattcacatggataagtagcgtacggtccacaattgattagggtctcgtaaatcacatgaaaaagtttgtagaacaaattgcaagccgtttccctcgtgagtttcggaggcactgccgagacattttaaaccaattttgacaagaccatttgcctcgtgctgattctgtccttgcaacggagttggaagacgccaattgaccgaagcgacctaaaatcattgggtattaatctcaggcatttgataatttcacaaaccttacaatccccattgaacgggacgcccgaagaagcattgaccgtgagacaaaatttgaaggcgttgtgtctgagttttccacttaatggactgtacatccattcttgattgcctccgtcacataaacaagagagcttcgtcccgtatttattaccaaaaaccataccatgacattggtagagccctggcgactgattccatttgaactttcccaaagtgtccaaacacattccttgttgaatgatttgtacacggcgctccccggaatttttaagcggtttgagttccgggtaaacttctttcaaataccatgaaaagtttttgcaatttaatctttctttaatgcgtaggcgctcggaaatgctaaaaaaatcaaaaattcggagataaattttcattggtttaaacgcactctccgaagtttacgtatctggcagaaggaacagtttggaaataaaactccttgtaatcatccaaccaaacttcagcagctcttcgcgtatttctgaaaaataaaaaagcgaaaattaaaagttaaaacacaaaaacttttggaaaatacggccgcttcccccggggaacgtgtaagggtgctgcttgcgaaagacatggccaaccctaaaataggtaaaccggaattaacgaaaaaaaatcggatgagaattaaagaaagtgagtgaaaatttttgaaaaattttccacgattttcaggaaaaattatttatggggtttttaatcttaaattttgacataaaaatcggcatctgtagtttgcagtcgaaatgattaaattggcgattccatttattggttacaatgaaaaacagcaattaaagattatattgctcaaacaataaatttaaattggtgccccccccccattttgcggattgccaacctgctgcatggatgaatttcaaggcttcctccacattgccaaatgcgaaaagacatttcttaaattaggtattaaaatgaatgcaaacttttaaataaaccaccaaggttttctccaccccaaacatccattttctaaattgaaatgcttaataattatttttattttgtgtgtctcacagtatcgtaacgtcctaaggcatcgaaccattttttgttaattgagaataatcccccagcacataacaggag

SEQ ID NO: 12443 - DNA, 1220 bp, Heterodera glycines
ttcctttattggttttttccggtttttttccccggaatattttttttctcttcccaatgcctcccatctgaacaccaaattccaaccaaatcctccgcgtaaatctgagctggccgagacataattgaagttgtccatgtctaaaataactcaaaaccgttaaccaagcaatttctaatcacttataacgtcaatcacaggtgcaacgacagctttgtcattctgtaaaaaaggaaatcaaaagccgggtcggtaacagtacttcgaccagacgttgaagcaccggttccaaccatccgacgttacactcacaatgactgtctaaatgggaattaataatatatgaaagaaaaaacaaacccaaaaaagtgaggacaggagcactggcgataatggaaccatgaactcgagaacgaataagcccttaacggacagaattaacaaagccaaaaaggagcacaaaacccaccctctcgctttctgtttcggataattcgcattttgtcaataccaaataaatctctgccaatagtggctaaaatgcttactcatatgttgattttttcgttccaaatgcaaaccatcgaaggagtaatcatcgacaagaataatttctttaagtaaatgcgatggagtgcgaatgaaaatggaccaaattgtacgcaacaatgtggaccttgcctcgttgtggaaagttattataatcgatgtgggtggaagaacatgggaaaactgagcatagtttgagtctgatttgcaacttaataatgtacaaaataagactgttctttttgcacagcaaaacatctttggatttcttaccttcgttcgcgagtgtctggcaaatgcctagaaaagactcataaatagagtatttttagtggtgaaaaagtcaaaaatagggacctaaataggggcgaaaaattcgcgtaggggcgaaaaagtttctaatgtagggatgaaatttattaaaattgctgttttttctatgtaataaggcaaacaattttattcatggattggcagttagaaatgaagtacatttcgaaattttcgggatttaagggtcgattcttaggggtgtatttttccgtaattttttttgggtcgattcttagaggtgtatttttttgaaaatttttaggtcgattcttagggggtgtatttttccgaattttttttggtcgattcttaagggtgtatttttcgtttttattgca

SEQ ID NO: 12444 - DNA, 1758 bp, Heterodera glycines
  unsure (1)..(1758): unsure at all n locations
acaggcaccgttgcactcaaaagtccactaaattttcaaatttatccaaaaaatttattntaaattattttacattgaaaatattttttataagataagcttttatttttgtgaaaaaagtaatttttagaaattaatttttttttttttttttggattttttacccacttggacccgatacccggacccggttgaaaaatttggacatgggtccggctcggcttttctggacccagcaatatccgggccagttttttcctaaaaataccgggacccggcctaccccggccaaccctaaaaactcctccctcacccatccctttgagtcgtcgaattttgaatccaaaattatcaaagttttgtccccatttatttcatcggctttcgcttttggccggccatcctttgccctttcttccgcttttttcagcattttctccaaattttgatccagtgtttttcgtattattcggtccacacttttatttatttggtattgataatccgtgtctatggccaattgtaaaatcatttcattaattggcatttgtttttcatctttttctttttcatcggcgtcctttttggcattaaaatttattattctcttttcattcaacaaatttagtttaaaatgagagttaatcaagtgaattaatttaagttcatcataattactaattgttgagttcaaataaaactgccaaattatggccagacaattcaccgcataaattattggcccttcgatttcaaaatgtctatttttaaacacgaattttggctttactgttggaattccggcatactctcctatcaaatattcatacaaaatgtccaaatatttgcgatatttttggcattttgtctgttcataatgtgctttaaattgctctccaattttgtcacattgccaattcttttccataaagtgcaaaatgccaatgtgtgcctcatatttttgcattgaaaattcactgattttgttttcgttatggcccttcataaattcaattagcatgccttcgtcgacctatcaaattggaatttagccaaaataattgtcctaattaattattttgtgtggtaaactcaccgattgaattgcacttgaaactggaactaaaagcagataacaaaagatggtaaaagaaattgaaggaaaaaaataaagcattttctataaaaggattgccttgtcaaataaatgtttaacaacccaagttagaaatatgttttttaattggactaaagtaagaagaaaaaaacaaataatgatatttgttaaagagagacataaaataaaataaaataaaaattatagccaaaatatcgataaaaataaaatttatttaaaatatgtatttatatttttgatgataagtgtataaagcaaaaaaaaatcaatgatagtttattggcattttttttacaatatgctaaattttatctatccttttttacaaaatattacccctcttatgcttttttgtttgtgttggacacagggctgcatgcaactggatttgcaattacggaaatccgtaatccgtaattacggcgattttctcagttacggaaatccgtaatccgtaattacggnggtccaaaaaccccgtaatttcccgtaatccgcaatccgtaatccgtaatttttaaaaatcaatttttctcagaatttagaaaaaaatttttaaatagtgattaataaaatcaaaaactgatttcttgnattgagttcttcatttttttattaa

SEQ ID NO: 12445 - DNA, 2917 bp, Heterodera glycines
  unsure (1)..(2917): unsure at all n locations
aatagtattagtgaatttaactgctgtttttttctggtattacaatttatattttaactcaaatttgtcaaacaaattaaaaatttaaattaaaaaacttattctttttgttaattatccattgtaagattgaaaatataaattattattaatgttattttaaatttttttcaaaaattaaataaattcattataaatatttattattttttcctttctaacaattttataatttttattaatttttaatttttaaatttttatctcttataagctaacatattctacgaatttttcaaaaaaaaaactggaaaaattattcatatatcctagtaattataaatttatttaattttttgatgctcacaaaaattcgaacaaatattctcagttacggaaatccgtaatccgtaattacgggggtccaaaaaccccgtaatttcccgtaatccgcaatccgtaatccgtaatttttaaaaatcaatttttgtcagaattttagaaaaaaatttttaaatagtgattaataaaaatcaaaaaactgattttcttgatggagtttcttcattttttatttaaattttacaaataatttataattttgtgtctgattaaatcattctttttgaatttatgggttgatttttgaaaattttttgaaagtctgatcattataatcgaatttatgtatatgtatataattatttcaacattttaatagccagaaaaaaattacggaggggggggggggggaatccgaagaattttttttggtaaaatttatttagtgttatttaaaaaagttcagcgctggacagcaaaaacaggaattgtaaccatttttagccaaaaaaagactaatttttgccattttgtagtcaaaatttaaaaaaataaggtaaaatcgagtaaatcgtggtccggcggtgccgataggtgccgccgggcaaatttnntttaaaaattttaatgattttattaagaaaaatctacaaaaaaaaattaaaagtcccaatttttcatgtaaaaatttttaatttttcatttcgggcgggggaaggggggaattcctcccctcacctggctaaggttttatgaattttcataaaatgcgtgaaaaataggtgtgacaaaaaagtgatgcctctattttctaggcgaactacccaaatagccttaacaacaacaaataaaaaattataaatctattttaattcttaaataaatcgaaatacgggtagccctttaaataaaaaatagaaaattttgttttttataaaaataatcgtacaagaaatcgtctcgaaaaaataatccaaaagtcaaattacggatcaaaattacggaaaaatcccaaaaatccgtaacccgtaatccgtaactcccaaaaccccgtaatttccgtaatccgtaatccgtaattgcgtgcagccatggttggacacgaaagaattttgggctgaaatttaataatttaaaatggaattttggtccacccgtatactgtttaaaactttaaatatttacctattttttaaatttgatgtaggcaaaggaatttgttgccattaaaattttcaaatcaattatgaaaattttattttagcttagaattataccgatcggccttttttgctttttcaaaaccctttttacggcgaattttttcaaaaaaatttgggctacaagggggggggggggggggggggtcgcggcgtgccggtaggcgccgccgggctttgtgtgtgcttgttaacatatttacaccaaaaaaaatgacaaaagttttgcgattttgactcaattttttaagagaaaaaggatttttatgtgccggcgggaatcacaccttaattaaggaattttaggagaattcaaatttaaaaaaataataattttataacttttatgaatttatggtaaaaaattgtgactataaaatgattttgaaaattttttgataaaattttaagaatgattgaaatattttttagaatttgttagtaaaaattacgtgtatcatgtttagcggtttgtctttttgtgtctttggggtgtttaatgtttcgtatttcttcgtattccgcattttgaaacgtttataaagttgtcaaaatctttccaatttcaagctagactcttcttgaaaagctagtattaaattgaatttattacataaatgtacagcaatcagcaataaaaataattgccaaaaatgccttaggctaatcaacgaatgtaaatggtaaatgccggagaaatcaattatcgaaattttcatggtaataaattgtcgagagaaccactgctatttaaaactattgaaaatctgaaaagcttaattatatttgacaattaaatgaaataaaaaatatttaaaatttattttttcgcattttttgcctttttgtcccagcttcaatattaaatgaaaaattaattcaccccgatttctttttcgaattgctgagaataattaaaagtgttatttcatcatttcccaatgttttttaaaggaattaatttctgacattttcaaatgatttttgccaaaaaataaatgccgaaattatattcgtagatgtatttggaagcaaatgtgagactataaaaatgaaaaataaaacagccaaaagcattcaaattttctattcttaatcattgaaattttatgaacactaatattttcatattttaggcattgaaacttcatattttcgaattttttcgattttaatcattcttaactctaaaagcattcaaatttttctaatttttaatgcttgaaatctctctcatcattatttcttccttgcatctatgtcatcgtccccccgattgtaccatatatttaaataagaacctctattgagcattcaaaatttcaactttttcgatttttaacatcgcaatctct

SEQ ID NO: 12446 - DNA, 2293 bp, Heterodera glycines
gacacaagtaccattgcccacccctccagtcgccacatgtcaccacacccctcaaataagttttgggttatacgaccacaatttggcaggttgccaactaaattgttcatgctatgccacactacactaaaatgagtcgccgtatgaccaacattttatgccatccacggtcagtcattagcgcttaaatgaccaccagcgggcactcagatagcccatgcgggcgcttaggtgacacgtgcgagcgctcaggtggcctggcatcccttccctccccaaaggccacgacagttgatgtccgtccctccaatacgatttgactttaataattatttaattaattaattttatatttcatttatttttaaatttttatctattattttaattttattttaatttatttaatttacctaattttaatttaatttattttattttaaatttaatttgaattaaatttaattttttaattaaatttaattttttaattaatttattattattattatttatatttttgtgtggtattagagagagcaagaaaaaagagagaaaagaaagaaagagagtgagagagagaaagaaaaaagagagagagtgagagagagataagagagagtgagagagagagaaaagaaagaaagagagtgagagagagaaagaaaagagagagagagaaagaaaagaaagaaagagagtgagagagagaaaaaaagagagagagagaaagaaaagagagagagagaaaagagagatataagagagagaaagaaaaaagaaagagagtgagagagagagagtgagataagagagaatgagagagagagagaaagaaaagagagagagagagaaaagagagatataagagagagaaagaaaaaagagagagagtgagagagagataagagagagagtgagagagagaaagaaaaaagagagagagagagaaaagagagatataagagagagagagaaagaaaaaagaaagatagtgagagagacagaagagatatagagagaatgaatattagcttttttattcaattattttttaaattataaaaatttttttttttaatttatttattttaatttataatttattttattttaatttaatttattttttaatctttttttatttattttttttatttcaattaatttgaactttaacttttatttaattttaatcctattttaatctaatttcatttattaatttaatataattttagttttatcaactttaattctaattcatttaactcgaattttatttttagcgctcaaatttaacaagtgggctcacaaaaggcccctgcgtgcgctcagatggcacgcgcgagcgctcaaatggtccctacgtgcgctcaaatagcatacgcgagcgtttaaatggcacacacgcgggcgctcaggtggcatgcgtcccttccctataaggcatgacagctgacgcctatcctctgcctccctttccttctctaataggatttgacctcgggttttatccttcagatgttttttcaattatttacctcttctgggattggatatatttattataggtgttttttaaaggtttaaatttggtactgaaatgtccctttccagtgggactgaaatggcggggctgaaaattaagggccaaaatctggtggggtaactactgttatcaaaattcttttaaaataataggcatactgtaagcaaattatgtatcacttgcgaattttccggtcattaaaattagagagcggaccggaccgggcccggcaaaccggtccggcgatttttgagaattccggtctctaattaataaaaacacctgacaatgaccagaacaccatgtgcattcatgttctccaacagttgaagcaactttgaaccggccaaatgctcaccatcatcatcttcaattattgggtcgcaataaatttgtaaactgtacaaagaggtggggggggggggttcacaggcaaatggggaaataggaaaattgtaaatttgaaataattttttaacaaaattcattaacaaacccaaagtttttcctccggcgcctatcggcaccgctagacccttcactgttgcccaaaaaacttttgaaaaagcgcgtcgcaaaaaatctagctgttgaaaagcaaaaaaagtcgtcgatttacatgtccttttgaccccgtcgcaaaattttcgaattatgacctccaatagcagcgggtttgcttttatccacccacaacttatagctagacgcaatcacacaccacaatcatgcaacgagatc

SEQ ID NO: 12447 - DNA, 2982 bp, Heterodera glycines
ccgtgccacactgatgcacaccctccagagaatggcatttgaaataaaaagaaaatatgtaaacttcggataactgtttttatgataaaacaaacatttaacatgccttaaaactaattaatgggttaatgagaaaatgactaattttgtctatagcctaaggacaaataaagaagaaaaaacttttggtgggaggagagaagaaattgctaaaattttcaaaactttggactttttcaggaaggtgatatcacagaattcgaatatgatcttccgtatgagaaatttgacataattgagcgcatttttgacacccaaatgaccacaatttgtctgtttttccttgacaaattccttgaagacaatgagaaaaacagaaaacaaattggaatggtacagacattatacaataaatactaatattaataatattaaattgccaatttcatttaattttttaattttttgggatttagataatgagaaatttgcaaaaagaacggaaagtgttggacctcgaaagatatatgcggaaaagagagcaattcgagcagattttaaaaagcaacaaaaggcaaattgagaaaaaacttccgtttttagaagaattcctggcaaaaaagccaaattcctttgaaaaaatctatgccgacaaaggcaaaacaaagacatacacaaatgaacaatatttgaagggacttaaagcaattgaggacgaattaaacaaatttgaattcgtttggtggcataatgaggagaaaagatggacaattagtaaaaaaattaaacaaaaataataataataataatattttctatttttaaaaatatgcgacaatcaaaatatttacgagttcaaagggctcatttaaatgcctttctttttaaattttatttataaatgaaaaatttttttatcacagaaacagaagcggaaaatgtcgcctctaattattaaattatcttgtcactttttgcaggtgatcgtccggcaatccgacaaattgtgtgggtggtccgacacgcggaaaaaagaaatggcggaacggaagacgaaacgctgacagagaaaggcgaagagcaggcgaaagaactgggcaaatggtaagaaatgactatttaatttgaaaaatagaattttaatttcaaaagtttggccactttttggacatttaattttatgtggccactttcacaaaatttaaattccaacaaaagtcaagtatctcgctttttaaaaattaaagccagaagactttgctgttttcaaaataaaaatttcaaagtctcaaaattaacaaaaattcaaattggttttcctgatcagcgagtgatcagcccaaatttacaaaaaactatgcccgttcctcgcgttaggttcaaaacagtgcccatcaccaaagtgttcgcgtcgccattccaacggacaatgcaaaccgccgcttctctgctgggcgaaggccatcgcgcgttcgttcacattgagcccggacttagcgaagtgtgaaaatattttaatacatttgataaaatccgaattttcagttcgagaagccatgcgatttgaaaattggacataaaaaactgacggagctgcacaaagacaaagcctttccgcacacaaacccaaactattggcctatgtacagcgaaaagtgagcaaatcgaattaattaattattatttaaatggaaatgtttttaaatttcattgcttttctaattaattttaattatattttatttgcctttttagagcactcaagctgattaaggcggaacgagaagagagtaagcggaaggaagaaagcgactgccattttgtggtggagcaaacactgcgacgcattttgacggaaaacaaaaatggtacgaaaattaatgcatttttttgactcggataatttgtcaccggccaaaacagtactcagcagggattaacaaacattgctttaactcagccacccatttgaccaatttggcccatttaattgttttttatggaactatttgggtaataagccaattaattgccaattaggacaatcgtttaattatactttttttggactttgcttttgttcagccgaacatattgtgctggtctcccaccgtgacgtcattggccacgtcaacgaattgttgggtggcaattgggccgtcgtcgacaccgctaccgtaaacaaatatgtacagtatgcgaatgggaaggaccaacagaaggaggatgacgatattctgagcaaatttgttattgagcacacgggagtgcacgtgcactaaaaatagcaagcgaatcaccagcagacaggggtaggggtggttccgtattctggcaaatttatggaaatttttgacaaaatacggaatttgaatcactagggatagaatttttgaccttttccccacctcctagagaaaagaaaatggaaaatttttggctatacaatgcgacgaaaatataaaacagaacagacaatttcagaacaaaaattcttacctcaattgtcaaattcatttttatcaatacgatttttgtacaaaaagttatttaattttaaaattttgctaattactggatttagcatttaattgatgctcctttttgtaaaccaatttttcctcagaaattcgaagtcattttcgctattttcggggctttttcgaagcctatatgtgctgacaattttttgtcaacaattccatccctagtcatttttatttattcattcattttttatttgtttggacaaattttctgttggataaaatgcgattgctgttttaagttattttttatatttaaaaatattttttcaattttttataattatttttcctcaaaaatattaaaagggggagagaagcgaattttttaattttttacaatttagtaaggaataaccccaaaaatcacaaaaattagttttaatatgcttttccatttccaatcattcgttcatttttcggcactctcaaaaat

SEQ ID NO: 12448 - DNA, 2489 bp, Heterodera glycines
  unsure (1)..(2489): unsure at all n locations
gatggcaactttgtcaaaaaatgaggtcactttccgtcgggcgtcgcattttgcgattttaaattttattgtaaaataggctcaagtgactttcgatgnggatgagttggattngtcgccatatattcacgaaaagtctctgcttcccaacacggcatttactctttatgccatgacggtgaccaaatggctaaaactgtcctaattacgctaattgctttaatgcctttaagaagcatatcggcagtttgcaccttggtcattacacatcgactgtggttaatctgacaagcactgagcagcaatggctaagctttaacgatgagtcatgcattccgtgtgccaccgccccatcgcccacagtgagaatttctccccattcattagggaatcattttgaagattttgtttatctttttcagagcaaagaggcatatcttctgtactacaaactgaccaactcaactaactcacaggccaagtgatataatattatcattattatttatacctgtgtactgttaccaaacattttcaaataaatatttttgtattattttaaaattaaaaagataaaatatcggactaaattggaaatactgactgtaaaattgcagtaacaaaagcgagggcgaaagaaacgacgctgacgacgacgacgacgatcaaactgagatagaacagtttaacagagaactcaatgaaatttgtcaaatgttgcgtgaacattaccgtaatgaagttccgaaaattggccgactttgcgcccaaatgagcgaaggaactcgccaagcgttggccatccaacaacaagtcccaaatcccgacgaagtgcaacaacaccgggagaacaatgctagggacaacaaaaacaagaattcgtccaacaaaggcatttcttcgagcaaaggcaacaactgtgacaatgccaatgtcaagtgtgaatcggtgagcaacaccaaacaattgggatcactaatttttcttagctcggattatcaatgccataagttaaaaagctcaaaacaaaatactgggcatgaaaaattaaaaattggagaattgccccattttttagggtttgcatcagaacgcgtggtggcaacaacaatttcatgaaattgagcaagcacttgataatgatgctgatgatgaaggcatttcgtctggcgagtgcagcgacaacggaaccaatgaaaatgataacaaaagtgacgacgatatcgaaagtgatgccgaaagtgacgacaaaccctatgaatgtgattgcgaaagtgctgaccacccaatggagtgtccgttgctggccgctcgtcgtgcgcttcgtcgtctcaaattgccgaccattcttgacatttgtgccgcaaccgaagcagaagtgcgacaatacggcacaaaattaagtgacattgtcaaacaaatcgccaaattacgcgttcaaaacggcggagcactgacaagcgaattggaattgcggagcagacagaaacaagcacaaaatctgctgcaacaaattggaaatttaatgccacaattggtcgttgaagaggaggaagtggcagaaattctcaaattcgtcgaacaaagcgccgatcgcttttccattggatttcgggacagaaagcagcaaaagcaattcaaaaaagcaattcgacagccaaaaaaggtgtgcagcaatttgaaattagcgagaagtttcttccttttatctctagtcgaatatttttggtattttgttatttaaaaagttacaaaaaaaattgctgagaaatttccaatgagtgaatggttggtttgcttaagctgcaaatttatatcccttcgttcaaacaaataattattcggctaccaccaccaacaggctttcgaggttctgttaaagcacaatttggacagtttggtggagccattttataaggactgttacaaaaaactgtattctattgacgatgaaacacgggaacaatcagaattgttcgtgaggcttttggccgaaattgcttttgtgcacgtcgtgggattaaggttacagctggaaatggtcagtagagaaggcatggtttaacaaaataataataataataatgcattttggcagtgatttttggatattttttatgggatgttagactagatcagctgatagaaattataaattacatcatagaaactaaaaatatttgaaaactcattaaacaactttcttattacttataatttgtgcacttttcaattatttataaaatttaaagatatatttaatgaatttaagtcataaaaatttgacaaaacatgctttcgtaggttttctggtccctttttcaacttgggtccgttaattattcttttatgccaaaatccaacagataattaattcctcctgtattgttcaggtggaaactgaatggacgcatattgtgcacgcgatgttgcagatgcgtaaattaataaatgcagctcagtatttggtggaagaggcacaagcgaaa

SEQ ID NO: 12449 - DNA, 868 bp, Heterodera glycines
gattaatcaaaaaaagatcaattttacccaaacacttggaatgtatttgatttgcgttgtatgggcgaaaaatgataaagaatgagatttttgggaatttttatgcaaaaacacacttgatttttccaatttttaacacatattttagcacatattttggcatttttggggtttttagcacatatttcagcattttttagcacatattttattacatatttcaggatttttagcacataaaaatcccatccctagtcatttcgctttaattaataaaaatgtacaaaacaattctctaaatgggcttaattttgccgggacttaagtcccgctctgctacaatttaaattaagtattcatagactatatatatttaaaataatgaaactccctttttttggcagtttaattaaagtatgtttaaatgcggtgtgtgtacttattctaatgttatacagtatacgtatctcccgtcggacattttctttgatggccttggcaacaaagttcgctcaaccgttaaacaaaccttggctgaacagagtacaaaaaatgcagaagtggcggaagcatttgcgttgctcaaaaagctcaaaaaacaccgcactcaaatggacagctgcgaaagtgtcggcacaaccgacgcggaaggggcagaacaaaagcagaacgtaagcaagctaatgattaatttgtaagaagaaaaaatactctcagaagtattgctaatacaatataaacgagctggggaagttaataactttagcactagaaacaatttttattttggaacttaaaaaaatattggttttaacaaaatttaaaaattcaattattgtaaaatggggtaggtcggtaggtcacggtc

SEQ ID NO: 12450 - DNA, 1178 bp, Heterodera glycines
  unsure (1)..(1178): unsure at all n locations
tttgaggcatcgcgcgggcataaatttttgtgaaaatggaaagtgggaatgatggtgggattataaaattaccatatgtaaaaatgcgtaatcaactatttgcctanatatacaagcaaaaaaataaccttatgagggggctgtccattctcatcccttctcggaaaattttccagaccctaagaattttccttcaaaagccctgatttcaagccattttggcattgcagatcacccaccatgaagggatgatctgactgatcaagtcagtgtaaaaacttacctccgggaaagaaaacggaaatttgacatttcttttaacccttttacaaaaaatccaattcttaccagtacatttttactcccgcatttggtgagaaaattggagatgagtcccggaaaaatcccacggaaagaacggtgcaaggcaaatttgcttgcgagagagagagagagagatatgtacagttactgtactgaaactataagagaaaacccagacgaaattcaaacttataaaaaggccggttataattctaattcagtgaatggtattatcttttaacagttttaacatcactgattgtgaacatggcgaagacgacatttcaaagttggcagaaaaactggcgaatgctcaaattgatgagaaacagaaattgaaaaatgcagcggaattggcaaagaaagcagcgatttccgcgcagaatttgggtctgccggttgttgaacacataaacagatatatcgacgcaattaatcgtgcacaaaaggtgaaaaacggcaagataacatgctcgagtcctgtaaacagcggggggggggggggagggctaactgaccgccggaacaccgatttcgtcctccaccctcattcactcctccgattttgttttaagaatcttagttttccgttttgccaaatttttgtaaattttttcttgtcttttattgaaatgtttatataaaaagaatttctgtttttaaaaaattaaaaattcttaagtccttgtaaatggtgctaggtcgtttcctaaaaaccgccaaggggttggaaaacaaaaaaatgtgagacatataaattcgtaacttgtctcaacttcaaccaaattattatttcatgatatcattcaatagcacaaggtgttctctacaagaatattaattttaaatttttt

SEQ ID NO: 12451 - DNA, 2404 bp, Heterodera glycines
  unsure (1)..(2404): unsure at all n locations
gtcgctctttttccaccagcgaagtccatttctgatccaatcgttcttccatctccattcggaaagcagctgtttcatctgcgtgaatgcggcaattgtcaaagaggcggcatctatatgaacaatctttaaaaaatgaacaaatgtttattataaataataataataaataagcattacagtatatcattcctcaggtggtggggatgccgatgatgatgacgatgacgaaatagtccgttttaacgatgcgagagcagtttgcacaactgccatctctacattgccgtggcgcagaatcggatcggccatgatgttatgcacattttcttgctgcttcagcaaatcgaacgattcacgcagaacggatggcgaaaacgacgaagtcgtgtcgaacggataaggcgaaaagtgctaaaatgataatcactaaaaataattaaatttaattattttcacttcactggccgcccatttctctaacatttcagttcgagttaagtaaacggcaaaaaatgaacaatatggtctttcttgtgcctgtcatcaccctctaataattaatgatgtttcagcggctcatccccacacccccctccctcccatcactgttcagattcaactgtacgagtgacgcctattaatcatagatatccggtcgaccggctaaagactcgcgaaatgaacacagtggggatattctcactaaataatttattaacaaataaaatttaaagaaagagaaatatttcaaaaattttattgattgttgatcactcaaaaaattcatctctcatgcattgttcagctttttcttcataggggcaatgagatcggttacgcgacaattggcccacgcgcattcttcacagagctcaaagctgaccgcgaaacggtcatctcccaagcgcgcaactttctgttggttatggaacagtcggtctcagtcgtcttaaaaattttatttcacaaaatttaaaattattttcatttttaccttcgcacaaatatgtcgctagcatgaactttccttttgccagtttccatagctcccggtcctccaccttgcgcttttttgtagtgtccgtctttggtggctccgcttctgaattaggctggttaatttctttttgctcagggacagagatggtaacggatttcttcattttgacgaaaatgaatttgggttttggccggttgtttcaatttcgctaaaatgggcggtgtcaaatttgaatttaatgggcatgactaaaattttagagtataaatttgtgtcctattttgcaaattgagcattcttcttgaatggtgcttgtcactgtcttttgctctaaactgctcaattgtcaacccaagtcgctgcgcgatcggttaaatcatccaaatgatcggagccttgtcctaaagcatcttattggccgaaaagtgcgcacaacctacaacgatcggaacggaatgaccaaaacatttttcgtcggcggcatttcgagtaaaggggcggcatttattccagcatatggacagctgcgcgctccatttaacatcaatattaccgcgcatttttatgcacgccaccgcataaggcttcacttcccctatttgccatgcataattgaacgatttttgggagaaggaggggaggaccgccactacccgatggagttgcttgaacttgctgatgatgatgatgatgacaacaataacaagagtgaacattgtttgggccgccttttcactgaaattgggtcatcataaaattcatcgtcaactcagacactgtgcctatccattgatgaagagatgacagaaaacaatgggcgtagtgagtgcagccaaaattcatcattatattggtgattttttaaattgtttcttttatcgactaattttgcaattttccttttaattcaccattgtgtattcattaattgccgcgttctaaaaagtatttccttcccactaattatgctttttcccacccaaaaacgacatcttcttatcgattataatgctttatcagaaataaaattgttacaaagtgtgaccaaaattcaaaagtttgaagtttggaccaacaattcccttgcccacaaatggtcgataacacttttgcataggcatagagacaacccgaccgccctccctgatgttcggtcgtaaaaaattaggataggtgacgatgatcggttcataatctcctctcttcgcatagttgatcacttcctatttgaaccgttcatagcacagtccctggttattgatcacgtcatagttgagcgtcatcacacggactttaagcacgtactccggttcaacatcgggtcccgctccctttcgcagacaaagnccatagctcttaggagagttataacaatttttttaaaatgctanaaatttacct

SEQ ID NO: 12452 - DNA, 1533 bp, Heterodera glycines
tttaccttgctaatgcctcgtccaaaataaatggctcctcacggtgctgttcgtaccacacatcaaattgtcgcctctttccaggcatcatcccgttggccaaatagtcgtcaggcgtagggtagatctgactgccgtagttctccggtctattggccaaatgggggaagaagggtttgtcctcgacgttaaggccgtaggattgaatcagggctgccagtgagcatggcatcaaattgaacgagtcacggaagactacatttgggttgcgcctcttctgcttccgcaccttcatttcatacattttgtttccctgaaattttgaatataaggtaaaatttaaaaaatttatacccgtcgcaacatctcgggattaaagtcaatcttgaacagctcgcggaagacgagcaccatgtcaaagcggccaccaaagtgcgaataggcgtgtgtcatatttttttggaagttgaagttgaaacaccagccaattcgcgaaagcctccagcgggttgtcagcaaccatttggtgatcaacgttagtgtccgcaaagaggcgctggcagaaagcgacggtccagtgaggcccgcagattaggcagcctgccaagcgctccatataagcacagctctgataaaaatcaatttggtggacgaaaacgaaacacgaaaacgaaactcaaaaagggccgaaaatatacaacgaaacgaaaacgaaacgcaatttcgtccatccctgctactgatcacgaatctgatgtttaaacgataaacgtaagtcagatccgtgatcaccatcaaaaattaacctagaaaaaatttcaaggaagcggctgacaaaactcggaagtacccaaaatctggcaataagtttcttaaatttcaaaaaaaaattttcattttagcctttgtttcactttggtagttattaaatttattgctagaatctacgctatcgttgccaagaaaatatcctaaataagaagactttcctaaagcacgtttttttaaagtttcgcatatatttatttgtctctaatcaaaaaagggccgtgaattagttttgcaataatgttataaattttagcaaagaaaattaagaaaaataaaatgttcagaagaatcatgcccattcgaaaaaattgctcactttagaatatttctttctgttttgttgtttcttaatttattgccagaatctcctaataagttgccaaggttatgcatcctgttctgtgagtgcttccctagctaaattgagattttgttaccgggattcacaaagtttttaatgttctgctcatattcgaacatttttccgtttcacttctataagccaacatacttttgttgaatccatgcaaaatgacatcattttcaattttttaacaatgtgaacacgataaaaaatttatttttattattcggtgccgctacatatcgtttaaggttcttgttgtaacgccaatttaaaaaagcgaaattgccagcgctttacctaacgcgtaagatattaatattgtttaacaaccaaaa

SEQ ID NO: 12453 - DNA, 1360 bp, Heterodera glycines
aaaaatgcgaaatgaaaaaaaaagcgaaatgcgaaaagccaaaatatgcgaaaatgcgaaatgcgaaaagcgaaattttttctacaaatttttaatagttaaaatcataaagcaaaaatcattttttaaaattttataaaaatttaaaaatcaataaaacgcttttttgaggcgcgctttttccaaaaaaactttttgggaagagggggcaggcggcgccggcaggcgccgccgggaaaatttttgaaatttgattaaaatttgttgacagattttcaccaaaaaatcatcaaattttgtgatttttgtatcatttttctaatgagaaataagagttttggcgcgccgctgagaacagtttttcatcaaattaccaaattttgcgattttgggccattttctaagaaaaataggagttttgggggcgcggcggtgccgataggcgcacccggggaaaaaaattggaaattttgatcatttataaacagtttttcactgaaaattagccaatttataggtaaaattttgaaaaattttatgggaatttaatccaattcttaggggtgtaaaagtcgcatttcgcgccaaaaagcgaaatgcgaaaagcgaaatgcgaaacgccaaaaaatgcgaataatgcgaaaggcgaaatgcgaaaagcgaaacctcggcccatccctgatacataattcaaaaacctaattaaaaaactgaaaaattgccattagttttttaatatgttttcctcccttccagctctcaacaatggtccataagcgagaatgtcttttcaagtacattaatttaaatgatttttgaaattaaaaaaaaaaataattttttaataaattttaccccgccctaaattttttttatagaattattgtgatcggcgacatcagcaccggcaaaacatcgctgatccagcgattcattcacaacagcatgtcaggaaattataagcccacccttggggttgattttgccaccaagtaaaatcaatatgaaattttaaaattcaaattttcaaattttgaattatgttttttcagacttgttcagtttgaggatacgttagtccgactgcagttttgggacatttctgataagttttttgccccgaatcatgtcgaagcttaagctaaccctattaaaaaataaataaaaataccgcaatttttattccgtcacccttttaatgattaaaaattgggcagctgggtttttttttaaatattttttgatatagtatgccaatatttttcaggccaggaacgttttgcaaacatgacccgagtgtactacagggattcgcacggtgccatttgtggtcagttggtgtaaagagaacaacaaatat

SEQ ID NO: 12454 - DNA, 1968 bp, Heterodera glycines
tattttaatacatattttttcggaaatcggtaaaatgcgttattcatcgggttattcattctattgttgtttaagcttaattttcgatcacattttatggaaccataatttcaaaaattttcccttgttcatgttttcatattgccttctccaattcaagacaaatttgaaaaacgcagacaatttgaacctggcttcagtaaaagtgcagtatgactttgtctgataaattattagttagtaataacaatttttttaattttcatattttagtccttcacttatattaaaaatattaatggaaaaaattttattaatataaataaatgaatattaattagagtagagcgggaccgggaattttgggcaaaaccgggaccgggacttgccgggacctgagaagccgggaccgggacctcggttttttttcgggaccgggaaccgggaccaaccgggaatttttaaaaattcaaaaaaattcaaaaatttttaaaaaaattcaaatttaaattttttttcaactgaaaataataaattaaatttttattttgtttttttatttaataaaatccaaaagttaaagctaaatttaatttttcactcagacccccattcttaccagtgctcgtttttcccggttgccctaccgggaccgggacctgagcttttcaaaatccgggaccgggacctctgaggaccgggaattcccggcccggtcccggcgcactctaatttaaaccccttaataaatcaaatttaaaacaattgttccaggtttacgactgcaaaagaagcgacacattgacaggggtgccataaaaataaaaaattttttttttccaaaatttcttgtccccaggcctatcgatggaagaaagacctggattcaaagttgatcttggacaatgggcagccaatccccgccattttggtggccaacaaagtaattgggagcgcaaattttgtattaaaattttgggaaaaaaatcgacgaattaagtgcgacttggaaaattcgctaaacacagaaatgttggacgattatgcaagacaaggcgcattcagagctgggttggtaaatgaatgaacggataaggcaaaaaagggaaattatttaaataattgcagatttaaactgagtgccaaaacgggcgaggggattgagtcggcgatggacttccttttacggtatatatttgaataaaccgtagtactgtattgtacaaaaaagaaagataggccaactgtatgattaccgtattctaagggattatgacagataaattaatttatgaaattaaattatgtctctacagaagtgttgtcagcgcggaacgtgatggcctttatttcatgccaatggtaaacaaacaaattaattttacattttttttttacaataaaatgcttttttattttaataatagagcaccgtgaggctggctctattattcaagggggaggctttaatggagggggggggggctcttcgaattaataaagtaaataattatgccaaaatatgttccaccatatttcagctacaaagggaccaaaatttgcaccgtttgtcagcccaagaattggagcagaaaaagaaacggatgagccggaaaaattatttccaaaacgcttgttgttgaataaatacataatatgtaatttatttggcttttttttgtaatataaataaattttgtttttacgaaaattcaatgggcgggcgtaaaaaataggggggcggcggtgccggtggtggcgtttgttccgcttcaatcgaagcaccgccgccgccaccgccagcgacggcagcggtgttccgtctgttcagcagttcccaatggggcatgcgaagctgctgctggaaacgatggtgtccttgaaaagtacgtgaggaatagaataataaacacaggactttggcttggggctgggaacttgagaattcttttttttttgaagggggcg

SEQ ID NO: 12455 - DNA, 2231 bp, Heterodera glycines
caactgctcctgcgacttgcactcgcccaggtcaatgctggccaatcggtgccacgttttgccaacaaagtccacgtaatcaccgtcatcattacaaccggcaccaatttgggccggcgcggaaacagtgtgacaacgttcggcatttccattgccgtctccgcttttctcaatggcatttgccgccaaggcactttttgcagggatatcattggtgacgaaaaacgacgatgaagcagacgaacaggactgctggtcagcaacagcatttgctgttgatgccgaagcagaaaacgaactaaattgagcgattactcacggagatttcgattaaaaatttaaaaaatgggagacaaaaatctttaggttcccaattcgataaaaatggtattctcattagcacactaattactttgttgtcgattgtacgtgtttgccagttggtacgcgaatcgacgccccctttttgacagcgccacgagccctcgggccgttcgtaccagtctcgatcgaatgattgtgcattttgcgatcgaaaacggcacgccggtccaccacataaatggcacgatatgggcatttgctataaatgtggtgtgaaaagtttaaacattgtcagcgaaggggggggggacgggacgaaatctcgccgccggaatctcgccggccgaaatctcgccgagataaaatctcgccgccaaaatctcgtcggctgaaatctcgccgcagaaatttcaaaaaaaaaaaaattcaaacttagaaatttttcaaggaaaaaattttagaaaatttttttataagaaaattccaaaaaaaactatttgctaagtttttttgaaaatttttcaaaaaaaacagtaaattttcataaaatttcaaaaaaaaattgctgaaaaatttttcaacaatttttttatttaaattttcttataaaaaaatttttctaagaattttttccttgaaaaatttctaagtttgaaattttttttttgaaatttctgcggcgagatttcggccggcgagatttcggcggcgatattttgtctcggcgagatttcggccggcgagattccggcggcgagatttcggcggcgagattttggggtgcacccattttattaaactgtcgtattcgacgccttatataaaatgccatccctcctcttccactttctttcattcgctcacttttccttcccttttgctacgcaaattctgttttgaatatacggttttcgtttcatagctaaattccttaatacaacagcctttgtcgtgttgttgttactgtaggacaaattctggtaatcaaaggttcgctctttgctattcgaatttgtcaatgattaagctttgtcatcacattttttcgacgaaaacattttcccatgagcacaatttaacttattacggtgggggtcggtttagtctggccggtttagtctggccgttttagtctggccgttttagtctggccgttttagtcagagggtcggtttagtcagagggtcgttttagtctggcaagctgtttttgtcctacattgatccaattctgatttgtttctcgaaaattctttaaaattaacaccataacagattatcaatgtgttaacaacaaaaaaataacaaaacattgaaaaatgaatacgggcatatttaacaacgagaaaattgatgatattatcaggattaacattggcatggtaattctgatcattttggtgagcagggttaatgttgttgatggtattgtaaccctgtaagagtcgaagaattcgtatcaacggcacgatattttcgcgttttttgaggagggacttcaccagcgatgcatcgtgcgatgtctgcatcaattgactcatatcgaattgtgttgatgaagcggaaaacagttggatataaacaagcaaaagcccgttgaatgaaaaaaaaattagggtttactttgcctgaagctataaaaaggcggtgccaaactgaaggtttcgctttgtttttattttctaattgggatattcatttatattgtagctaaacatagatattttaagtttttccttatttataattgacaaaaaacatttgtaagaattatgggcgaaaacggcttgccagactaaaacgaccctctgactaaaccggccagactaaaccgaccctctgactaaaccggccagactaaaacggccagactaaaccggccagactaaactgacccagtccgtcttt

SEQ ID NO: 12456 - DNA, 3827 bp, Heterodera glycines
  unsure (1)..(3827): unsure at all n locations
cggtgtcttccttttgcctaatgtttgtgcttctcccctctttttttctgatgggtgcgattagcttctgcttcttctccatgctgctggtgatcagcagcagttgttgctgcttgtgctgctcgcggttgccgcctgaggcgcgcaaaaatccctcgcggcccgcggacggtcgcccctcggccgaaccatcagcgaaagaaagggggaacaaattgtgagcaaaaatacaatcatcacactgctgccggtagagatcgacagacatttatcatccagaacgaagcgaccagcacaatgttttcgtcccaatttcttccaagttcttttaaaatgtcaaattttggttttaccccttttaaaatttgtgaaaaatgaaaataacaaagtggtcaaactatcaaccaacaaacaagtttaatttcgaattaaattatatgtatggtcggtccaaagaaatgctgtcttttttggcatcactatcatcattggcacttttcaactctggacacaaaaatacggagaaatgcaaattttaaacctatgggttttacagtgaacaggaaaataaatttcaatttttacacaatgatttgtcaattaaatagacattcgttacagtacaatacaatatgatacataatacgttttcacactatagcatggatttgaattgacaacggacatttaaaacaacaaaacgcaatattagttaagcgaaatgattgctccctccgcccgtccttcctaagtgaccacttccgctttgaatgtcaccgcgtcttccttcgcgtcgtaaatgccattgtccgggtccatcaaatccttaatgattgcgcaattgctcacttaacaattcttttgccgtgttcacctcaaatttggcgaaatctgaccacccccaattcgatttggccaagtcaaacaagtcgaagtcgtccaatttgcccttctgtttaacgcattcgttgcagttttggcacgaaacgatgctcagccgaaaggcagcccaacggcaaaacgaacggaatgactgaagacacaaaaaccaaattcataatcagcttccaattggatcgcacttacgaatcttcagggaggaacagttcagaaacaggccgatgtttgctccgttgttttgaatcgcaatttgccatggcattccgttgatgtacccaatcgtgtcacttttcacttccttcggcccatttccttgcgaaaacgctttgaagtcggtcatccgaaacaaaaattggccacgacgtcggacgccctttttggtgtgcgagtgaatgatccgtttggcaatttgcaggaaaatcactgcgccgatgccaatgccaacgcttttcatcaaaaacgaggaccatccttccgaagttgagcccagtttcatgtccatctgttccagctttgccaaaatgttcttctccagctcgtcaaatgctttctgatgatcaaaagttttcgtctcttcgaactgaaaaaagagaaaactccatcgtaatgtgaaattgttgacagcagtaaaacgataaaaactcaccgcaaattgacgctcgaacagcaaaaaaaggaagaggaggacggaaatagtcgccaaagcacccaaaacaaccaaaccaatgatttccttcttgacaaggtcttttttgctcaatgaaacgccgcttttgcataaatttgcggtgcgatttggagagcctttgaaaataaaacaaaaaatgaaaatgaaaattggatgttatttttgctgattttttacatgtttcattgggcgaccgttgcatttccgtcggcgcttcttctccaattaaattggtcatacacaaaacgaataattgtcaaataaaccaattttttctaaaactgattttgtgatgctcaaatggaattaaagaacaaataaaatgacattttttgttaatgagcctgccttttatagagaaattattttgaaaattttttcaacttaggaggggaaaaaaagtaaaattttaagaagcctttttccggggttaaaaaatgcgctgatcatgaatctgaactcagatttttaaaaatctttaattttgaatttttatcaagtacttgattttttactcattttgggtcaaaaagcctcatttttacaaaaattattcaaaacacgctatttggcntgatggaacgggtaaatgtgatcacggaatggtcacggaaaaggaaataaaataattcacccanatnttaatcaaaaaatgaaaaaacacaaacannaagtgtaaaaatcgcttttaccaattaaaaatgaattatgccaanaattatacagcaaaaataaaagaataaaaaacttttattatttnttatgttcagaaaatgctcaaaagatctctttttctactcccacgaaaaagaacaatcttttgcgaagtgttgctgtgaattccggaatttgctttggtcgttctatgttcagtccttcatgcgttgacacctgaaaccccaatatttaaagaacaatttgcatgcttatttcgtgctgagacgaagcacgaaaagtgcagcgattaaaattaaaagcaaaataattattttaattaaattaataatttattactaaatattcgccagataattaaattatataattatatgcgtagtgaaccgaagtttaaaaattaaattttcttatattgttttctttgttgcctggcatatcagactttgaagaaagaagcctttataattttggctacaaaagcggatctcgaaattgtggtttttcagtttataaataaaattaacgcataatttgaaaagttatttgctgttatttagaaatttaaataattgaccattgaataatgtagcttcagtccatcataattaatataaaattttcttatctagcgaatatttgaaataataaattatatattaaattcaattaacataattacacctcataattaactgtcgttagcatttcaaaaatttcacaatgcttcggggccatttcactgaacactttgcacaaactctgcacgaaccaagcgccgtttgcactgttccgccacgacacataatggggggtggtcgaatggaccaccaaaaagtcagcatttgtgggatcttttctgttttcaaaatatataaattaaattaacagaggcgtataattagtgcttaattatgataatttgtcaaaactcaaggcatcaaacagggaataaatggtacctattaattaattgtctatgtaacaactaatttattgtctataagtaattgtaatttaaaagtccctactgaaatatttccttggatgtcaaatttgctgaacattcgccctcatttcgcagatgtaacggaatttggatagatgccgccaaactgttccgtggtgaactgttgcgcgagaacatgctcagtgggccccttttgctgttgttggacgccgccgcttttgaagagaccgcgccgtcggcacagtccgtgccaattggcaacgcacggagcactccaaagtctttgatttctaagggggagcggggggggggaggggtaattaacaacaattatgggggtcatttggcaaagaattttggtaattcacttaatagagtaatagaaatgaatttagtcgagaccgaccagggctgactaattcatagtttttgattaatttttgtttcggatagatagagagagttttgcacagctggtcaaggctaaaaattacgcttttcaaattaaaaaatatggctattagttgcgcttgtaatttccaaaactaaattgtttttattaacccatttttcaatatttagatattaattttc

SEQ ID NO: 12457 - DNA, 1258 bp, Heterodera glycines
ctcttcccaaaatcatttcgtcccccaaattggcagtgtccactggcggcggaaacggtgccattatttgctcagtttcatcaatgggcggcgccgggcaaacattcggtgccgaattatttgacccatttgtcgccgccaattgtttctgctgctgtttgttgtgttggtgaagtgcggcaacaaaattgtgcagtagaaattgcattctgtaatttgaaaattaaaaaaataataaatttaatttcaaaagcattgaaaataaaaaatcaattgcatacggtaacacaaaggaatatggttggatattacggtaaattatttatttattatttaaaaaattattgaatttatctgtcaacaattgcagtttgttgaaatcggcttactgtttgaagtcggcgcattcgtaaaaaatgctaaaataaaaaaatgaaaaataaaaaaaaatagttaattacttgaacagtttgaattgctgtgacaacaataatgccacgcaaaaatgatcaaatgctgacggatcatccaacaaaatcgtcaccactttttccactttgatcgctgcttgggattcattctgaaaccaaaaacaaaaaactgagaaataaaattaaattcacaattaaaatatttaaagacgcaaacattccagggttttatattataacaaataaataaaataatattaatattttattatctttaattactttaagaagtgatctgaaattcaaagtatcattaaatatttttttgcaaattcaattttcgaaggacaagtcgaagattttatttatatttttctaaatattcggaatattttgaaaattgtttttacactaaaaaaaattaaaaataataattcttaaaaatcctattctcggtttttacaaaatttatgctttaattttatttgaagattttggttgtgctattgtttcaaacttaatttataagtagggcgaggaattacgacattttttaatcgagaatcgagaaacatggtatatttttaaaaaatcttacattattttaaatttaatttaatttttgacaatttttactgaatttccttttcaccttaacactttcccacttttgccagctgatggcgccccatcggtacaaaagcagcgacactttgtccgcttcttccattatcatttttagcgtttcgctgtaaagctgcaggaaatctcttcgcttcttctgtcttaattctctctctgtacaattttatttgaaattaatttta

SEQ ID NO: 12458 - DNA, 3465 bp, Heterodera glycines
aaattattttttgcagatgagtgtgaccgttggccgttctttgttcgcagatgtccggcctccttcgactgtcacaaattttcaattgctgatgagaaaatcattttccattttaaatttaaatgtctatttttttgttaattaatttatttttatatacaatgtctaataaaatcttcgcaacaacaaattacttcatttttcaatgtgaaaaacagcacttgttctactagtgctgcaattgacctaagtgattccgaagatgaaattggggaagaagctatcccgaaagaaagatttttggacaatcccccaaaaattgcaccggaaagggacttaggccatgtactaatgatgcaacaaaacaaaatccatatttctgccgacgaaaagtatagctggctaactgattttttcgtgccacccgcaacatttgattggccctcaaatatgagggcgggcaaaaaaagattcctctcgccaagaatctcgagcgacacccccaaatgtgttattcgccgcttttaaatggccttctgtgccggtagtaatataaaaattttaaatcgcattattgtgatgaataggtgctgtgtgctgtttgccagtgatgcaattggtcactcatcacaaagcaaagaaaacgtggtatttgtgacgcttccatatcgagactggtcgcgtctcgagagtcccgctactctccaaaaaaatcaagaaggcaaaaaaaaatattcgaaaatgtttgtggcattttttaggaatcacgaaacatgcaacaacacaataccagcaatttgtgtgaatttggccgcaacgtttttaaaaaatttcgaagggacaaagggaattgactgtgcttttaatgatttacagcggcagcaaatccaaagaaaccggtggtttataataaaaatatttttaaaaaaattaactgaaattattttataattaaataataataatttcattaaattattaatttaaaataattatttttaaaaaatattgaaaatataagataaattgaataaatatttattttgcagtgaaatgcttcgccccatgattgaaacagtcatttttttggccaaaacagcacaagcatttcgaggcaacaaagattatggaattttgtcggtacctaaacatattggtcaaattaatgctggagaaggttatgaaaattaaaaataatatatatgaataaattaattaagggctttttcgggccagtttgcaatataggtgtctgtgtggggatgaaaaattaaaaatgcacctggaaaaaggtacagggaaaaaaacgtaattaattttttaaaaactccaaggacaccaaaatgctctgtatatttcgtcaaaagtgcaaaatcaaatgatcagagccgttggaaatgtcattacagcaaaaatatctgagcaaatttcgcagtcgggtgtatttggagtgattgcggatgaaacaatggatatttccggttatgagcaattgtcaataagtgctcgaattgtgaacgagtctaatcaaattgaggaaatttttttgggatttgtcgaactcgaagatcaaacggcagttacaatttcaaagaaaataatttttcttttgcgcggtagttttagttaaaatataaaaatttaaaaaaattaattaaaggtaaatatgggcttgatttgtcaaaaattgtgggccaagcctatgatggagccagtgtgatgagcggtggtcataatggcgttcaggctattgtcagacgtgaatcagggtgggtattgtgtttatttcccctttcaaatcaacccaaattcaaaaaggcctgcggcattttatgtccattgcagtgcgcatcttttgaacttaaaactttgcgccgcattgaccgctaatcactatcacaatgtttttgactttcttggaaaattgacaaacttttttcactgctcggcaaaaagaacgaaaattctcgagcggtcaattgacgcaatttcttgttcaaaaaaacatcgcattccgactttttcggacactagttggaccgccaggcacactgtaattgaggcagtgaaagagcttttgccagcagtcattgcagcattgtgtcaaattcgcaatgaagatgcagccatgagatcggaggctgcttatttgctcgatttttttgcgcaaaatgagtttcaattttgttttatcatgattgacaaagtgatgtcagcaatgaaacccttgacacttctgttccaatccaaagaagttgatattgaaaaggtaaaatctctttttggcaaaaaaaaaaattacaaaaaatcatggccaacgcgcaatttgtctgtttaccgattcattaaacaattggattgatggtgttgggttcgggacctttgagaattgcaagaaagatgcattgctgattcggtcccaaattgtggaatcaaattatgaacgaagaaggagcggccgttttcatgtggccgagtcagattttgatgaatttgaggaaccattttttaattttttaaattcactaaggtagcaaaaaagagcttaaaaataaacaaaaaaaattttcagggaatcttttgccgaaatgttcaatgattcaacaatggaaattttaaaaagcctccagactttgcttccctggaaaatcacaaaatcaaattatggtctcttttcagccgctgccaaattttaccatgaagcaaatattttggaatgttcagaatatcaaattcaggtcatgcagtgaattgttcaaaagtgttaaatttatttagtctgaatttgaacaatggaaaaactattgctatggatttaatggaatggaaatgaatgtggccttggaacattgcgactcttcgttttttccgaatgttaaaaaactcttattagttttggctagcattccaattacttctggtaataccaaaaaaaggaaaaattaaaacaaaaactgtttagttactgctgagagatctttttcatcgctacgtcttctaaaaaattatcttcgcaataggatcaaaatagagcgtttgagttccctagcgctcgcttatattaatcgcgacatcgatttttcggttgatgatgttataaatgaatttgcaaaaaagaatcgaaaaattgattttgcacttggcaaagaacattcagcggaagagatggatgaagacgaaaacatttcgttataataaaaaatattatttggcgccatctcatctgatctggccagcgcgacaaagctgcctccgccagagttttgtcccaaattttgtcgtcttcaagaagaccatgcattattgcagcctcagtgaatgaggtacaaagcaatccattaaccaccttcagatggtctgggtcccctggaaagtggcgcataagtgaatatagcgcgaaccgttctgggtccgatgggggtactggaacaattcgaccgattggtggtctctttgttaggttat

SEQ ID NO: 12459 - DNA, 5276 bp, Heterodera glycines
  unsure (1)..(5276): unsure at all n locations
tataaattggctaattttcagtgaaaaactgtttataaatgatcaaaatttccaatttttttccccggcggcgcctatcggcaccgccgcgcccccaaaactcctattttttcttagaaaatggcccaaaatcgcaaaatttggtaatttgatgaaaaactgttctcaacggcgcgccaaaactcttatttctccttagaaaaattatataaaaatcacaaaatttgatcattttttagtgaaaatctgtcaacaaattttaatcaaattttcaaaaattttcccggtaggcaatgacggtcgacggaatgccaaggcatcgagtgcaccagggcagatgggacatggttcgtatttccgaattttggaagtgcttattgttaagggaattatgttggttaggtccaaggagccattgatgcacggaaaaaggcgcaatttaaacaattttttaggaaacaccaaattatttgttttaaacatttgccaggttatgggtttgacggccaaagcattgaatcgatcccttcaaatggcttgtcgccgacggcacaattacattttggaccaaaccaacgtgttcagggaggcgcggaagcggaaactcacccaatttcaggtgctttcttaactttttagtttaaaatatcaataatttttctgtaggacttccagcgcaaatgcgtggtgatcattcccaacgaggcggagcacgaacgacggctgatcagacaagcgcgagagacgggcggaggggggcaaatgccggcagaggcaatgctcgaaatgaaaggcaaaacaataaactattgttcaacaattagtcttaaacgttgattattaatgtaaattacaaatgagaagctaatggtctctcgtttcaggccaattctccatcccatgcaccgaaagtgaacccgtcgatgacgtcatttttgttgaaccgccaattgaacgaatcaatgaagccattgaacaggtgctgggacgtatgagtgtgacggataataacagcttaattatctcttcgaattactggcttttgctttctctttatgcagttttttctgaagttccacaaataaatgttaattctgaggagagaggatcaaaaataaaagacggtctcgtttaattgtttcgaaaggcaccatcctcaagggacggacatccgcgtttttcatgcatcattcaatgtgtgtccttttacaggtgacgcgttataaccaagagggtcgtccgtgggtgcgtaatttcggacaccagcggacacgtggaccggagtcgttgatctccgatcactcgggaatgccggcgccgcggtttttgggcgtcacccgaatagggatctgacaccaaatgttatcggatagctttgtgcggggaaacaatgccaatttcgttttctgaatttgacaaatgagcaccacggaatgctaattttggccggttttatttgtttgttcctctctatttttgatttaccgttcatttttctccatgacattaaactgaaaatgcttttctccttttacgttctctctttctcgcttctcctttgtattttcaaaactacttcatcaacagcattacccatcttttatctgaaataccttctaatcaccttttgatttattcatttgttagagacactgctgatacagtgttggacggacatccatcccaatgcataaataaatgaaaacggaaaatcattgattttttagatataaaaaatggccatacatcaggaacaggaaaatgaatgattatgttacacaaacattttgcacaataaaagatcattttcagaagcttgaaataggacagcttcgatcataaatttttttttgtcaaaaacgaaaaatcatacatcccagacagtcgactgacgaccattcgccaggtttcacctccccccattaatcgtcggatctgtccgtcagctgtctctgctgctgctgttgtgacaaagtgtttctcactgccgccatccctccgttctttcggtttttgaatgccttttgctcctgcaaatgctccaagaacaaatccatgtactttctccttccgttctcctgctgctgctgatggtgtggaggatgatggtacggcggaatgtggcggaaaatgtcgcgcaccaccagtgccaattcacaaatctgagaaacaaaagcgtggcaaagggcaaagtaaacagatcagagataggagaggttccaccacccgccacatttgagggggaatgaacgattagggcctaatctattacgaagtttttttttttgaaaatttttttctatttaaaaaaattttaaattcctgcggcgaggtttttgggtgcatctctcaatttgaatagtatttctgccttccttctcactcacatattcctggtcggaagcactgaagtttgggtagctcagtctgaaaatgagattggtcaccccaaagaaaatgcatccggcgttcacttgtgggaggcggcgttgaagcagcagagaatggcgtggagcagcaactcctccacggggccggccatcggatgcaattccatggccgacttcgcctgctgaatgcacgtcttcgcctgtccgctgttggccatttgcgaggccaaaagacaaacgtcgctcgaggcgagcagacgcaaagcaccgggcaaatgttggaaaaactgagaaacggggacaaatattggaaaaaaagaggaggggacggaacggcagactttgaaaacgccgcggagcaattggaggaggacgaagggtgagtacacacaggcgaacaccttctcgagaaacagccgcacgtagtcgggatcgccaatctccagggacacgtcgagcagccaacaaatctcgtcggaagagggcggattctgttaaagaaaaatagaaaattgagggaggnggcatccaaattaacggttcggcagaccttggcgaatttggcggacgcgctttccgtgctgcgcagtccgttcattgccgcaataccgcaccgatgcgcattctttcacagttgcaatgctcgccattcaatccgatgctgtgtttgccgattcccttttgcagtgtccattgttggtttgccgtctgttgttgctgttgtgtgtagttcggaagctgatgttgtgctggtgtcggttgcaaaatgtgcctcggggggaaagcgctggcggctgcatttgccccgggcaatgccatcagcatcagtgggggaggtggcgtggaaagcggtggctggtgagcagtgacatgatgatggtgagggtagccaatggtcgaaccaaattgggcaacagactgctgcaggtgaggctgagatgtttgtttatgatccacaactgttggtggctgtactgcttgtagttgaggagggggaagcgagagaaaacaacaggatgaaaccgatggcgcctgaccgttgtgaagcattggtgccattgagacggcagccgtttggccgtggaacagcgggacggctgtgggcgtaagctgcagatggtggctgtactgtatgaagttgttgccggtgctgaggttgtgctgctgaggatggatgacaacgttgggcccaacaaattgctgcgggggcgtcggcggcgggggaacggaaggggaaaaaacaacggcagcagaagtcgaagcggcggcagaatggacggggaagaagtgctgctgttgctgctgcgactggtgggagtggtgcagcggggagtgcatcatcagacggacgacgcactgctgcggggcaatgcgttgggtcggctggggatgggccgggggcggaagcgccgtcgttgtcgcctgctgctgctgggtgttctccaaatgggccaagtacaggtcgtcgtaccaatggtgggcaactcgaaacaaaacctgcacaacgaagggacgttgaccaataaagactatttaattcataattgaccgcccttcttcattgttagcttcccacactcaaatttgctccctcctcttgcctcggggtaaacgccgccccgctcggccgctttctccaccgccaaacatgcttcttccaacagtttggtgccacgctccttgcactgattgagcgccttttggctttccgttggcaacagcgaattcgcctcgggcagtacgctgagtgccaaaagtgccgcttcctccaccatggcggagtcgctgctttggctggccttgtccgccaatgaggcggtttcggttggggtcaaatggttacgccatgttttgcggatgatctccagcgcctgtcgtcctaattgttaaattaaaatttttttcatgtatttttaaatatttccccaccaatgtcaagcacttgggcttggatccagctgacgtgagtgctgtaagtgcgtgtactccacgatgtcgagcaagtgttgttcagcccgagcgcgtacagtgccaccaaaagcgaggcgatgtgcaaattgcggtggggaccgttgccgccggcgattccggcgccagccacgtcagcgccgttggccagcacagcgctgaagattggatgtggcaacggatttccgccagcttcttgcagcagagatttggcgaattcgaacagatggtgggcatgggactcgctggcttgactgaccagcagggactgaatcggcttgctgctaagcagaacccgactcgacgcgatttcttggtcaattgggggcgagtgattggagccgttagaatcgacaaagccaacggaagacggaaacgaagcggagaaagaacatggagaggaattggagaaggatgaacgaaatagggccgagacggactttgaggttacggaagaaaaagcattggccgagacgggcaggaaaaattcgacgttggacctgtctttgtccctggaaaaaacatcacatccctttgctaaattgccccatagagttcctcactcgtaaagtttgtgcattttcgggtccaaaaccgtctccagcacgcgcgccactcgcgcagggtcatctctgttccgcaacagcaacgacatttgcacgcttttgcgctgccgtcggatagactcgcacaaaaggggatggtccaactcggaaatgaacaaatctgaacgaagcaaaccaatgaacaccacccatcagtcatgggcggtggggacaaaacatatttctcaactttttaagtccaatgcttttatgcattacctttcttgagcatagacagcgcaaaatctatgccaaggtcttcgtccgcttgcgtacgtaaaacgtccgtttgacatggcgggaccaaatgttg

SEQ ID NO: 12460 - DNA, 887 bp, Heterodera glycines
  unsure (1)..(887): unsure at all n locations
gccggttcagttgctgctccatctncagcagttcgggtaattcgagcagttccaagtcgccaaaaaagggaatgttggagaagggactgtccggcgaggcgcccgccatcgctgcattttcaccacttctaccgcatttctgtaccaacaaaacgggggaggtcattttgcggtgctgtcgattgccatttttgcctgctgaatgtcggcactcagtcgcgtcccatcgatcaatcgctggacaatgggcgccgaccaatcgaattggcaacacgcgtggagagcgtggtaaaacgcggggaaatgttggcgggagaaaggagcgtttttctgggtcagacggtgccctttcgtatcggtgagttggccatatgaattctaacaattaaccggggcaaaacattggtgaaatgcaaattaatcattttaaattattacattttcgcatgttcccaatttgcccaaaatgttgaaaatgcgcgacacggcggccctttgatagagttggagcagcaaacggaggcgcacttgctcctcagggcacagtcgcgggttcagtgccaccaaacgccaaagggctgtcaattcctttgttaatggatgcgcattagtaaatggacataaattaaagtaaaaaacaacgtgacaaaaaaaaacattttacatgagggaacgggaatagaaacaatgaaatcaggcccatatgcagaaaaactttatttttaacgccggggtgaaaaaacaggcatttgtagcggttaaatgatatccaaaaaatatttgggataataaagtccggctgtggcgataggcgccgccgtgaaagtttttgtgatcagaaatgtgaatagttcttttgtcatcccacaaaatacanactagaaagg

SEQ ID NO: 12461 - DNA, 4016 bp, Heterodera glycines
atagtaaacgttaagctttcgattggtaccaagaaaatgggatttgaccaaataagaaaaaagttaaggctactgaaactgacaatgaaattggccattgattggacgcggaaactgaaaaaaagccgctttttcgggaataagtgtcgtacgtctgttttgttcccaaacttttgattgcatatttataattttatccatgcgaatggttgtcgcaaattattatccgtgcatttttagttggttctggcacaaaatttgaattttttgaaaaatttgatttgttttcaaaaatctgggtgcgggttcggaatgagtcgaaatagatgccataatcgaattctacgacgtagaaaactataagcgtgtgaaaaaaaatttttttaagaaagaggggggggatacaatgtacaaattaccccgatttttttaaaataaaatgtcccgataactaaactcccatcaataaaaacccctgaaaatctcaccgacaattcttcgccagtgtttcccgatggttttttcaaattcagaaatttggcgaaccgtccaatgaaaaaaggctcagcacaaaaactgtagaggcaattgtccaacaaattataaaccttacaagcgaaattaaattaaaaaacgaaaataaattcaaaaaatgccaaaaccaatgcggaaaggtcgtggccggaagcggagaagtccatcgtgtaaatgggctcaactcggtcaatttcgatggtcatatacccttgacaatggaatgaaacgcaaaagcaacgaaaagcgatcaccgtaaagcgcaattgtcagttgctccaacgcttcgcccagcgattggccccacgcgtggagctgaacgtcggccgtgtggtccaaatattcatactgacatggcacaagcggaggagggcattcatttgaagacggaggagggggaggagacaccgaacattctgtggagggagggaaaggaaatgaatgagaaaatgcgaggaaggaacccacttaaaagaaaccattaaaaccgaaagccttatttaaacatttatcgtaccattttccgttgtttttttaattttccccgcctatttttcccaccgaccctttcttccctcttcctccgcttctctcccacagttttcatttgctgatgagtgcggcgtttccatactttgcttttcgcatttgcgttcattcaacattctgttggcttaattatttttttcaaatttataatattttttaagcattggccaaaatgaaaaaacgctatttatttttaattgaatcattcacattctaagtgtcaatttgtacattaattaatagcgcgtaaatggtaaacgggacgataaattagcgggaaggaagaagagatgcattcagcttttgtttgttgtgtgtgtaaaaatgtgaagggtgctattaaatgtgtggagggggggggggggggggcggacaaatcgtattaatggatgatgatgaaatatgtaatgggattttgctgtggattaaaaatattggcattcagtacaaaataatataaaggaaagggcacgaattcattttcgatgttttttgaacatttacattcatccatattcacgccaaaaatgggttatagccaaaagtttaaagttcttgccgcagtttcaaagaatgactaatagaatgaagtgggcgataatgatcaaatatattctacaaaagaatctcctcaaaaatgatcaattgacaaagcaaatggcaattattagggaaaagcttcaattgaggacatttgggatcgaataaacaaaggacgaggtataaaatggaggaaaatccgaacggggcacaaatattgtagaacaaaagtgtaagtagaggtcgaaaaagcagagaatcgggcaaaaaaaggaacatcgaattgtgagggaaaaccgatcggaacaaagcgtcatttgattgccaaagttaggttgatcaccaaaagcggaaaagttagaaataaaatcaatttggattttaacaaaaggaaagaattttggtttaaaacgcgatcaatcctaatttagacaacctaaaaagactgaatgactgattatatgttaaaaatatcattttgaatttgcggcattaactttttcgccccaaagtgaagaaaaactgtgcctttctactgacacaactaaaattgtttttcctccccattccaaagttggtcctccaaagcatccgaaaatgtctcctcgaagtctgttccaagttctgaccctttcaattcatttcgcagcgctcgacaggcgaaaaacaaaaatcgtttgaggctcttaatttttaagaaacgaaaagtaaaaatgcgagtttattgcgttttaggtaaatttaaaaatcataaaggccgcgaaaacttatccaaatcaccttattgaagaagagaaagttgaattgccaaatgcatccgtcctcagtgaaagggtcgccgctgtagcgcggaatgtaactgcaaaaacaaaggcttacaattagcagagtgaatagaaagaggcaatcgaaagggcccacctgtaaatactgcactcggacactttgatcgcctcttcaacagtctgccaaagatggtcccggaaacggctgtagttgtgcacggtggccaccaattttccgtcaacgcacgccatgcattccttagagggaggggaatggtggacaacaaatagaatgggaagtgaggaaccctcataacggagaaagtgtctttagtatggtctcaatttgtataaattacacggacctgataagtgacagtggtgaaagcagcacttttggtctgcgaaaagtcatagtcagggtaacactggttgagcaacgccaaaatgttgaaagagcgttttgcggaaaatgaaattgggatgaaaaaagccaatttctaccgtcgagaaacggcgccgaccaaaatgacttgctgaccgccgccatcctccgcatcgttgtcggaacacccggaattgctcatctcggataagtgtctgaaaagaagaaaagcaaacaatgggacagaaagcaaagaaatgggggaaaggggaatttggaaagggaggaaaatgagcaaagtttgcaaataaaacgacctgagtcgcgaatgcggagaaatcgaaaagcaaatgtcctccggcggcgaaagcggctgcaactcgcgaccctccaccggacatttgatgcttttcttccactctttcttgtcattggtgaccattttgcatgaatatgactccaatctgaaccactgatgcgcattttcctgcaattgagttagtcaaaacctgacatccagcatcagatcctgcgcatttcgtgaaatcgccattgcgattccatcaagcttctcattgtccaataacttcatcgcgtcccgtaatttaattttgtttttaaacgggtaccgctcagaacaagtgacaatggctttccatcattttagcgcttatattttgtgaattaaaatatctgaataacatagttttttttctacatacatctgcagctagaatttgttagattgggtgacagcagtcaaacaatgtcgattaattataccgcctgtataaaatttcttcaaggccaataatttttctctgtcaaaaatttggttgtactagtgatgaattggtaaacaaattttttctcgacaatatgacattttattgatgagaaaagggaaatggcagattgtcaacacacacacatacaaatgatgtgtgcatatgctatttaatagcactttctaagaagcatacaatttgctgaagcaaaggtaactcatttcagccgaggaccgaagtatcgatcgagaaatttaaaaacaagcattttctttgtaaaataacaaaatgcggaaacatatgcaatggaaaggggaaaaagctggcaaggacaaaacggagggagagaaatatgatggatgagagtgcgaatgggatgggatgggaagggatgggatgggggatgggatgcgtcgccatactcgcgtttacgac

SEQ ID NO: 12462 - DNA, 1687 bp, Heterodera glycines
ctaaggacaaaacgccaaaaaaccccactaatttaaaaatttgccgagattttcccttgtaaaaactgaagagccgatctcgagttaaaaaagaaactttcaaataacaaaagaaaattcgatagaaaagaccaaaaaattcacttaggcaaaatttcaataaaattggtcaataggaaaaattttttttcaaggacaaagttttttctttttctctcattttgacgcactatttccatgtctctaacatataagataacacatggttcattttcttgctaataaactattttttcaaatttttatttaactttgaaatattcttaagaattttcccatcaaaatgagcacaaaatggttttgtttggtttacccttcaccaagttataagtattagaaatttagttgacacgtagttgtccaataagtccttaagatcgcaaaaaacaacaaatttctttcctaattaatcgaaatgaagcgaaccaacgcatcaaacatcactccacctcgcgccaaacgtgcaatgccacctgcactggacctggaccaaaacactgccacactcgaagagcaagaacgccaacgcaccctggtcttcattggcctcccggaaagcaacgccatccgcccatcggagcgtgttcaggaagacagggaagccgccacaaaaatcctggaccatcttgaagttgaggccgaaccaaccgccgtctttcgactcggccggttcgacccccagcgaacaacacctcgcccgctcaaggtggtcatgccgacgcccacacaccaacatgtggcactcggaggatggaagcacgagcgtgctcggctccgttcccaacagaacctgacccgtctgttcgtccgtccggcgctgtccaaagaacaactcaaagaggaatacgaagcgcgtctccgaaaacgccaacaaaacccagctccgatggcaccggcaactcagctcccacagacaaatgccccgactcccgttgtcgaagatggaccaaaccagaagaagaccagtgatgacattcccaaacaaccggaggtttttgacgaaacaatcctcgtctgttatgaagcactaaactcatttccacccaccgacaaaattgttcaccaaattcaatcgctcaaaaaacaataccctcatcttttcaacaaatagttctaccagacctccaacaatttcttcaaataaaaatatccctcaaaatttctctaaaaattttacccaaaaaaaaaaaaaaaaattttttttttcctcttttacaacccctaaaaaaacaacaacaattttccctttgttggaggtctgacttttctaatttctgcttcttcattcaaaatttcaattatcttttatcactacctttcatttcacctcatttccgccaaaagtgtaagtggcacatgcccttcttttggttatttttatttttgaataaataaataaaaagttaaaatcaatgataaaacatatagtgtctaattccgctgtctgtttttcattggtgttttgttcacttttattttcaataatttttaatgtagtgtctgacttatatagtgtctgctgtttcttcacttttcttgttttttacatttcgtttcaatactcattttttttttataatgataggcatttttattcaaaatgatgatatatgttagaggtgtattt

SEQ ID NO: 12463 - DNA, 3302 bp, Heterodera glycines
taagtttgaataagaaatattatatgatctattctacttatatttccataattttctcttatttttattatcgctaaaatttgtttttatttaagttctttcacaacaaaataaagcattttattttaattttcaatggcattttcctctaaaattttttcaattttttgtctcttccatttttaagcctattccgcttcttccaaaaacaatgtttccattttataaaaaaaatattacaaaaaacggggggtgggaaaattggaaaaagtatcaacacatacataacaacacatcagcagttttattgaattgggcgcttctgttattccatcaatcacctcaaaataattaaaaacatttccgtcgcttactcacaaccgatctgatcacaattttgaactgaaatcccgccaaaaaatttatttttcgtatttaaattatttttattaattttaaatattttaaattttaaaaataattgatcaacgacaaacaacaacacatcgaccacagaaaatgacacaacaacagcaattcctttggttcaaaattgatggtaaggaattcagcattttgtacgatttacgagtgacttgtatcctgataattaatgtattaaaaaatttaattgtttagggggtactaaaattagaggtgctgagattaaattggcggtgtttaggcgcataatttttaaaatttttaatttcttagctttaccccctgcctcgaattaaaatttttaatttctacatttttgcgtccatcccctcctccccccgccttggcgacaaacttaattttaaaattttaagaccagttttttttgttgaattttaattaaattctcggctcttaattcgtcttatttctgtccaaaaaaatttatttaattaattttttaattaatttttttctacgttttatcgccccctttttcccccacttttggcgaccgatcattagggcagattaaacataatttaaaagtgcgctgcagcacaaattcttttcacaattgcgccatcgccggtgagcagtggaaggttactgggttaattaacggaagaagaagacacaacgccacacaaattgcatttttcaaattgttttggcatcgtgttttgtgcgccaccaattccgagtgcaatttttaattaatttacatacaattaaaagtccccccctcccacgcccttctaccattagacatttttgggatggataaacaaaccatgactcgtaaattgatcagggatggtcccccaaggggggctcgctcacacataaaaatttttgagggaaaaataggtgtgattttatagaaaattattggttttttgcggacggtccaagggggctcgctccctccaaaatttttagaaaaaaaaaatgttttttttttgttgaaaaaatttagatccattcatattgttgtgggaaaatgggtttttgaaaattttctttaacggatacaccaaaaaattttcaaaattccctgtggcacctagagtagaaaaagaaaaaagtgtggctattagaagagaaaaaaagaggggtcgtcacccggggggcggtgcccttccaaaccgaacccctgggtccatcgcccctgaatttgatcagacaggaagttaggctcagctcagcgccgagctcgcgcgccgagttggactcacagctatacggtagcaggggttggcattattacagtatagtatagttttgtacgagattttttgatttccgcccagcacacagtactgttgtttcgaaacattttatgactttggcactgccgcgcggcgagtgccatccccaatttgcgctgttcgccccccaccaccaccaccacaacaccaatcatgcgcagaaatcgcttccagatttgacactgcgctttctgctgatcggactcgctgtggtcgccgcactgctcgccgttctcgccctgtgcctggtctgttgttggcgacggcgcaagaagcagcagcggcgtgtacggcccgcgcgactgcagaaaattgtgagcggaaaaaatggcaccgcccctgggggaattgggctgatcaggatccccagagcagggatttggtgatcagaaaatagttcagaatgccgagtgttaaccaaatctaaaaatatcatgttgatcacctaaacaaagggccgagatttcttggggattgaatacaaaaaatatgattttttcaaaaaaaaaagacagaaatttatacctttttagaaaagaaagttttctaaatctccaaattaaaaaaatgaagaaattgtgtgtttttatttgatttactaaaatttttaaaaacaattttttataaattttatatatttctttgttttcaacaatttttgtttttcaattttgtgtcttttccattgcacattttccatgacaactttaggaatcaaattatttgaacattttgcagaaaaatacgttgacattttgcctaccttattgcaaaaatttcaaaaattttgtaccctctatttaaaacaacctaaagactgttgctgaatttttcaaaatttcgctctctcttgaaaattctccccccttttttgaaaattgataaaaaaaatgcaattaaatttcctccaattaaaaagcaaattctttagccaaaaatcactgtggaagaagcattcagtgggctgcctgacccaagtgtcaaagtgaagcaattgttctgcgcaatggacgccacaaaaaacggtggcaccgccgcaggggaggaaaagcatgggaataaggtgccaagctaataaataaattaatcaattaattaatattaaaaaattaataattattgtttaaaagttggctaatgattcgccccttccgccaatgaatggcggcggtgattatttggacattggcacgcccccgtttagtaatgtggtcattttgaatggccaagaaggacagcagaaggcatcatttgcaatggctttatcaattcattttataatataatttttataaatttattagagctagtaattcgaaaattagaattaagtttttggtacaattctaattatactgtaaaaaatcataaaattcaaaaacggaaaattttcgagggggcctagctcgaaaatttctgaaaatttctgaaatctaaaaacatggttggatagagctcgtcgagctctacaaaaaagccgcttacaccgacctcctccggtcaaacgccggcgagttattcggccggcgctgaaatggccaaaaaaaggatgcaatttttgcgcagtttttcggaaaaactggtagg

SEQ ID NO: 12464 - DNA, 2956 bp, Heterodera glycines
  unsure (1)..(2956): unsure at all n locations
atgggattgaaacggagccggtgttgaacttgtcgttcttctattgtcaggagngnnaagnngaacctgaggaatggtctgtggatggaaaaggantggtntaantggangaantcctttganggtgntgaantggtcgatgtnnaanacatctttggcatacaccgagtgggggtcggggtggaagggaggcggcagctgaacaaatggacaatgaaatgccaaccattcaaattatgccatgccaaaactaccattccctgggcttctcccacctttacggcttccattttcctccatgggaccggctctctgcccgtcttttggtccggctgcgtgaagaacgcgtgtgccttcagctcctccgcgccgtcctctggccgtcccacgcggcggcagcccaaccgcaaagtcggctctttgtgcagcaatccccgacacaaagtgcgtgccgcctccgtgaatttgtcgctgtacttttccgtgtcttcgcgcactctccgctccacttcgtcccgcttcactttttctttacgttggcgaaacggcgcctcaaaaggcaaaaacaatcaccaaatgactaatgtcggcactttattaattacatattttataatttccgtttttacctttccttcgatcatttcgtaaatcaaacagcccaatccccaccagtccacgccgtacgaataacgttcattcttcacaatttccggcgctgcaaaaaataaaaattcccattgcattcaaaaactctcccattcctttgctttcaatggcatttttcccttttcccttgcgtgccattactttgtttttcctacccccccccatttggcttattgccactacaaatgccaattttagctccggattagcttcccccctctcctccccctctcacccatatatcccactgtgcccactcgtccctttatgggctcgttgtccttcagttcgacggctaaacccaaatcggatattcgaacatggcctaagaatagtgaagtgtatttgctgtacaatgaatgcaatacagtatccgaatttgggggtaccgtaatcgtccagcagaatattttccggctttaagtctctgtacaggattctctcccggtgcagatgctgcagtccgagagtgatctctgccgcgtagaattgggcccttctctcatcaaagcccccgggggacaaagtgtaaaggtgaaatttgaggtcgcctttaaagcgaattcgatcagaaaaggcgtccatcgtccgcgggactcagttgaccgacctccgttcatcaaagtgagtaccaaacaaagggcgtccttcgtttcgtaggcgtacgccaaactgaccacaaagggcgagttgatccgctgcagaatttgcttttcgttcagtgtcagtgactcggcgtgccttttcttcacccgcttcttctccaactttttcaaggcgtacattttacccgaggcgcgcaccttttaacggaacaattaatgaatgagtcagtcgctccaggccaaagtgccattgttttacttggcacgcgcacacttcgccgaacccgcccttgcccagaattctgtacaatctgaacgtctgtttgtccactgtcctccgttcaagccatttccactgaaagcattgaggaaaagcatcagattgtgtggcagaagggtgagggggggggcgacctgaagataacggtagaagaacactgtgccaaggaaatgtttgaaagggtcgaaggcgaggaaagaacgcacttctctgacaaagggtgatcagaaaggtattggaaagtgatgatcagaatgatcggatgagtcaatcactttgctaacggagtgaacagtccgtccgacgggtcaatggccccgtcggatgcgtcggtggcaatttttgtgcaccgtttcacgaaggaatcgctaagaaatttgccatgttgggtggacgaattgagcggaacgtttgcggcattggaagactgaagtgattgttgttggttttctggtaaatttattcgttgtgggtttgccacccaccgtcgctgtctctccgtttgtcagtccctcgccgtcccccgctgtccttccgacgttttccaatccgtcggtgaacagttcgatcaccgtcttcgccactctcctccgctggtcagggtcattgtctgaataactctcaacaatttccgcatcaatccgctcactttcaactgaccgctcgtctcgtattcttcgactcgttccaaaaacctccagcatttgcccaattcggacggttcctccgcctgctcgcagtactgcttgaaaaggaggcgcccgattggctgtttttccacgacaaacgaaaaactgagagaatttttaaaattaaatattgactgaaagaaaaacctgaggtcgatttcgctttttaagtgcatacattgcgtgtaatgactgaatgggggggggggagggaatgaatgccatgacaaaagaaaacaaaggcaaactgacggaaattggaggtaatgacgccactttttgcttttccctttgcgttgaccgcccgtcctggcctttatgtacacagtgttggccacccaaaaggggaaaagagagggaagaaattggtgagaaaagaaaaagagggagaatagaggagaggggggggagagagcgggagagagagagagagactgagaagacacgtacaatgttttcgatttccatttcccaatccagcgcagcggcaactgcgaaaagcgatcggatggatgcgcaacttcggaaaaggcttttgaagtcgattggtcagacggaaataagcaaaggagcgaaagggaattccatttacaaagggaaaaggacaaaaacagaaaaaaggggaaaatgatctttaataaaaagggaaattgacacaaaaagaaggaagaggaggggaaagaacagaaagaaagaaagagaggaagaaagag

SEQ ID NO: 12465 - DNA, 2721 bp, Heterodera glycines
aaagaacagcatgaggtcgatttcccattctaagtgcatacagtgcgtgtaatgagtgaatgggggggggggaatgaatgacatgacaaaagataacaaaggcaagctgacggaaattggaggtaatgactccactttttgctattccctttgcgttgaccgcccgtcctggccttcacgtacgcagtgttggccacccaaaaggggaaaagagagggaagaaattggtgagaaaagaaaaagagggagaatagaggagagggggggggggggagagcgggagagagagagagagactgagaagacacgtgagagagagactgagaagacacgtacaatgttttcgatttccatttcccaatccagcgcagcggcaactgcgaaaagcgatcggatggatgcgcaacttcggaaaaggcttttgaagtcgattggtcagacggaaataagcaaaggagcgaaagggaattccatttacaaagggaaaaggacaaaaacagaaaaaaggggaaaatgatctttaataaaaagggaaattgacacaaaaagaaggaagaggaggggaaagaacagaaagaaagaaagagaggaaggaagaggaaagtgatcaaattgagataaaaaaggggggagggaaagagagataaatgaagcggagagggagggaggggagagagggggagggaagggttggtgattagtgggcggtgactaattagtcggagggagggcgaggggggagggagggaattggacgaatttgtggacaaaatccaaacaaacaattgataattgcagaataaaaccatatatttttgtaatttttgtggaactttcaatcaaaaaatcaaaatcaaactgtaaaaggagcaattgaaaggaataaaataaaaggagaaaagggaaaaaataaagaaaaaaagttaagggaaaaaggagaaaaaaaggggatgaaggatgagaatgaaagagataaaaagagaagggtgagagagagagagagagagagagagagaggaaaaggagagagagagagagagagagataggagagagagggagagaaacagagggggaaagagaaaaaaaggagaaggggagagagagagagggaaaaaggaagaaaagaagagagaggggagagagagaagacagaggggagtgagaaggagagaaagggagaaaaaagagaaggggaagagagggagagcgaggaaaaagaaacggttgtgagagaaaggatttaaattctttgttagccgtggggcgaaaagccgagaaagtgaaagtgcactaatcctcttcagaagaaagggacaagaacagcagcagaaggtaaaatggcccaacagaaagaaaaacaaaagacgggtgaactgagaaaggtaaaagtgagaataaaacggagggtaattggagacaaaactcgaaaattggacggaaaatgccgaaaaatagaaaatggatatttaaatataaaaatatttgatagttttttaaatggccaatcagagaaattttaacataataatttaaaagggaagagaaaaacgaacggaaaaggaagaaaagagaaaaaaagaacatagacaaacagacagaagaacagacaaagagaaagagagagagcgatagatagggtgagagagtgggagagagaatgagagaatgagagagagagagagagagagagagagagagagagagaggagagaagggccaatcatgtttcccatcattttcttcccatgcgaagagaaatggtgggggtgagggcgctcatttcctcaaagattttatagaaagggacgaaaaagaaaaaagagacaataagaagaaaaaagaggacaaaaagaaaaaaagaattgttgggcagctgatagtgagtgggagggaaaaagagaaaagaaaagagaggaagggacgaggaacgggggacagacggttgggcaggaaaagaatgtggagaattgattggtgggcggagacaaagagagaaagtggaaaacagggggaggggaggagggtggagaaaagacaaagtggcagacaaagaggagagagagagaaggagagagaaagtggaacagagggagagagagagaaagtggaacagagggagagagagagaaagtggaacagagggagagagagagagagatagaaagtggaacagagggagagagagggagagagaaagcggaacagagggagagagagagagagaggaggcagtagaattcggaagcaaaaggacaaagtaataacggaaaagaaatatttacatgtacatattattggtgtttagagaaaaatggcaaaggggggagtgaaaaagaaagaaagagagatagaaagagagacaggggggggagagggagagaaatgccgaggaaaaaaggaggaaaggaaagcggcggcgtttggccaagagccgggattgcctcttggccattgaattggttggctctgccaatttgcctttcccacaatcaatgcctttccccccccccccctttccctttcatttccctttaagccattccgccgttgtcgcttcgatgaggctgaattaatttggttgctttcagtgaaaaagagcgacggacgatgaaaaaacacgaggaagaacgtaaaaaacggacaagcggaaggaaagagaggacaaaacggtggccataaaaagtgaaagaggaaatattggaaagggtggggagagggg

SEQ ID NO: 12466 - DNA, 1393 bp, Heterodera glycines
  unsure (1)..(1393): unsure at all n locations
aaaggataaataaagtcagggaatatgtttagcattatcaaaataaagcataaatgaccggtgatatccactagaaaatttgacaaaagcatagtctacatttgttaagacaacttccgatattatcgtttgtctcaggtagatatgttcaggtggtttaaaagaaagatttttgagagtttggggtatcttaaaattttaactaaagtgcaattcctattattgatatgtgcgcataaaactcctggaaggttttaccctattccaaaataaaagggacattgcttctgtaatcagaagaattgttgggacgttgttctaactcaaaatgccccgcgaattgggtcacaaataaattcaagcctttttctcaatgctgtggaagcgaagagttaatctcaatgaaaaggataaataaagtcagggaatatggtttagcattatcaaaataaagcataaatgaacggtgatatccactagaaaaatttgacaaaagcatagtctacatttgttaagacaacttccgatattatcgtttgtctcaggtagatatgttcaggtggtttaaaagaaagatttttgagagtttggggtatcttaaaattttaactaaagtgcaattcctattattgatatgtgcgcataaaactcctggaaggttttaccctattccaaaataaaagggacattgcttctgtaatcagaagaattgttgggacgttgttctaactcaaaatgccccgcgaattgggtcacaaataaattcaagcctttttctcaatgctgaggaagcgaagagttaatctcaatgaaaaggataaataaagtcagggaatatggtttagcattatcaaaataaagcataaatgaacggtgatatccactagaaaaatttgacaaaagcatagtctacatttgttaagacaacttccgatattatcgtttgtctcaggtagatatgttcaggtggtttaaaagaaagatttttgagagtttggggtatcttaaaattttaactaaagtgcaattcctattattgatatgtgcgcataaaactcctggaaggttttaccctattccaaaataaaagggacattgcttctgtaatcagaagaattgttgggacgttgttctaactcaaaatgccccgcgaattgggtcacaaataaattcaagcctttttctcaatgctgtggaagcgaagagttaatctcaatgaaaaggataaataaagtcagggaatatggtttagcattatcaaataaagcataaatgaacggtgatatccactagaaaaatttgacaaaagcatagtctacatttgttaangacacttcccgatatatcgnttgtctcaggtagatatgttcaggtggtttaaaagaagattttt

SEQ ID NO: 12467 - DNA, 900 bp, Heterodera glycines
agagagagagagagcgaggacgaacggaagccgatggaggagaagaggaacagagaggcacaaatgtcagacggcaacagggaaagagagagagaaagagggagggagggggaagagggaaagagagaaggggagggagagtgaaggaaagagagagagagagagagagagagaggaagaacggaagccgatggaggagaagaggaagagagaggaacaaatgtgagagggaaaagggaaagagagagagaaagagggagggagggggaagagggaaagagagaagggaagggagagttatggaaagagagagagagagaggaggaacggaagccgatggaggagaggaggaagagagaggaacaaatgtgagagggaaaagggaaagagagagagaaagagggagggagggggaagagggaaagagagaagggaagggagagttatggaaagagagagagagagaggaggaagcggaagccgatggaggagaggaggaagagagaggaacaaatgtgagagggaaaagggaaagagagagagaaagagggagggagggggaagagggaaagagagaaggggagggagagtgaaggaaagagagagagagagagagagagagaggaagaacggaagccgatggaggagacgaggaagagagaggaacaaatgtgagagggaaaagggaaagagagagagaaagaggtagggtggggtacgagggaaatatagcatgggatgtacagtgagctattcagatagagaattcgattttgacagggtttttggaaaaagaaaaggagacgttatttctgtaaatttattttacctaaaattatttcatgaaaaagttttgaatctatttttaacctacgtctttcaagcgacttttgatcataa

SEQ ID NO: 12468 - DNA, 1236 bp, Heterodera glycines
aagaagcggagaaagtggcattctcacgcgattcccccccccccctttcccatttcctcaaatattgccatttggagagcgtggaaatttgcccctccctcggcactttggcaaggcattgagtgtttttggatggtttggaattggagagaaattggatttgatgttttgtgggtataaaaaacaaacaatttgagttgtgaattgctctttcatcgctttcgcctcccttttcagcccctccgtggcaatttgcaaatttttttgggcctcaacgattggggcatttgcatgatcaatgccaccacacacagacaagtggcatcaattgagatggacaaattggaggtcaaattcacgccgaacacaaattatttggaggtggcgaatcggagaaaagaccttatggccacggtgacatcatcacaggtgaacaaaacaaagagagacttatttaccatcgaacttccaaaacaaggacactttttaaaacgcatttactaaaaggcgctgccggagaagaatttggaaaattgttctgattcggatttaaaaagattttatccaaaaataatttttagattttttggccaaacgaaaagaaataagtcggcaccgtcgggaagagagagagagagagagagagagagagagagagagagagagagagagagataggaagaaagagtgagagatggaggagaagaggaagagagagcaacatatgtgagaggaaagagagagagagagagagagagagggagggaggggaaagagagagagagagagggggagagagagagaaagagagagagagagagaggaagaacggaagccgatggaggagaagaggaagagagaggaacaaatgtgagagggaaaagggaaagagagagagaaagagggagggagggggaagagggaaagagagaaggggagggagagtgaaggaaagagagagagagagagagagagaggaagaacggaagccgatggaggagaagaggaagagagaggaacaaatgtgagagggaaaagggaaagagagagagaaagagggagggagggggaagagggaaagagagaagggaagggagagttatggaaagagagagagagagaggaggaacagaagccgatggaggagaggaggaagagagaggaacaaatgtgagagggaagagggaaagagagaaaggaagacggagggagggggaagagggaaagagagaaggg

SEQ ID NO: 12469 - DNA, 2791 bp, Heterodera glycines
tgaccgatggtctccactttgtacgctttgtgttcgccatttgcttggtcgaagtagcggaacattccattcagctgccaattaaccaatcaattaactgttaattgctttttttccacacgaatattgcccaccaattcgaccacttccatcggctgcgattcgctgcacagcgaagtgaacccaacgatatcactgtacattatcgtaacggaggcgtagaattggggctccacccgccgacccattcgaagctcatcgaccacagaccttaaaatgtttagggatttaaaagcaaaaggagggaatagcaaatgcctgcccactttggcaacaactcgagaagaatctgctcaatcttctgctgctccaactccaatttgcccgtctgttctttcaccaaattctccaaattgcctaaaatcccccagaaaatgcgcaataattaaataattcaatcgaatttcgccgcccaaccgacccgtgtactgctccatgtttttgatcatttggtccaccaaacttccggacctataacgaaaatttgtgtattttaaaatgtcttccaaatcacattttcagagttgcgtcagtgattttccgtgccatgttcgcatcgggtctaattggggaaattattcaaaaatgggttgagcaattggtcctccattattccttttggcacctttgctcgggggtgccaaaacatcgccgcatcagtgccaccaaatcggggtgtactcggtcaattgagctgaccatcgaccggggagtgttggcgcccggggcgacagtctcttcgcccggaaattcgggcacaatcggcaggcgctcttcagcttgggcactgaaaatgccgacgtcgtcttccatcggttccaaagggccggcgcctgggcaaataaataattaacggattgacagacatttgccaaatgggctaaccgtcgccggactccgttacatcgttaattctgaaaaacggttgaaaatttgaagaaattccaaaaaccaaaaacgaaacctccgccggtagagaatttcgtagagaatggcgccgaatgcgtacatatcgtgcgattggccttcttcgttggtaaattccttaattgtttttccaaaagtcataaacttttgccctttcactcatttaccatttcttcaggtttattccgcacaacggctgaacgaattgttaagcgcaattcgggggcataataatgcaattctaaaggaaggccgaaaatattttaaattatttattgtttaaaaaaacactcccccaaaatgccctcccgacaatttaaatttgccctcccccctttcgttgtccgaccttcgtttgggatcagtggctgaatgactgtgccattgccattgctcaaaatgccgttgtgtcgccatttgtacaaaagacgagaagttccaaagcctgaaaatgaatatgcgtctggccaatgcttctccgtttgctcagtttgcacctgccaatttcaaaatccaatgactgtcaattagacatcgcgtcgaagtcagcgcgccgtggtaaccgatgggggacgagtggagaaagtcgagaccctggaatatcaaattgggacaaagcggacattaaaccgaatgagaaaccccgccccagtttgccttgacaatgtctctgacgaaggcacttttgaaattgttgtccaaaatgtccctgcgtggcaccgctccgtcgccctccgcccccctctgctgttggtgtgcgctgacaatggatgccacactggcacggatgtcgttcacccgcgactcaatcgaccttaatcactgcgattactttactaatcgcatcattagcactaattgtggggtgggggacggctaaagcaaattttgtcttttgaaaaggtgcgacagaatttgcagggtttggccacttgtgctggcagttgacgaatagcaaatcggccagcgtcccgcggaagcaatgcctccaaatgacccaaacgtcggtcggccgttcgacgcataagccaatgaaagcgtttatgttgtcatggacagcctgcttcatcttaattagtaaaaccgaacaaactaattaattgatctgttaagggaccataaaaagaagctgagtgtcccttttgttgaaggacaatttctcgcgtaagcgaaaactttcgacaatgacaaaactaaaagggaaaacaaaacggtcaattaaataattaattttaattattctcacttctgttcaatggtcgcaattttgcgactgtaaatttcttcaggaacttcgtccgttctctcctcctccttttcgcgtttggccaagtgctggtgaaagctgtggattgaaatgttctaaaatattcatttgatttaaatttaaatgtcaatttttatttttgcactttcaccgtcataaaaccaattaataaatcaaaatgttcgttaaataaatgcccatttggataatgaattaatttgccatgccaccgaccgatgatccaccgtagtccatgtccacaaaagcgatcatttgttccggcacataataaggcatttgcgttgtttcaccgcgtttccttaatttgcactaattcaaaatggcatttaagtaattagcacgctactctaactcacacaacaaatttttaatatttaactaacacttttcgtatgcataagaaaatgatgaaacccatgcaaattgcgaattattcacagcaacgggagcgataattatgctttaattgggtcattaattactttttttaaataattattattttaatttaccccc

SEQ ID NO: 12470 - DNA, 1983 bp, Heterodera glycines
gagtcacaacctcgttgtagcaaagctgtggcactccctctgatgaaaatggcaaaaaaaaaaacaataataataaattctactataatatttttatttaattggaaaataataaattatttcattttaattttatgttttaccaatgtttggcagttggaatttgtcccacttgaacagctcaacgaaatgttcgcaaattggagaagccccggccgcggttgatcagtcgtattggattggaccaaataggcgctgaacggcgccacccgattcagttgggcgtccacactgatcggaccgaagggtcctacaaaaagcaaccgttcatcgattgaccaaacagaaaagcctcgttctttgccaaatttggccattttcttctccttccccctttgcttgccttggatcggtgccgtgtgaatgttcgcccgtagcaaagtgccgttgcgattgccccggacagtgcccgttttttggaaggtccgccacagcaaaagggcataagcccaaaagcattcgtaaagttggacggaaagcatcagaagagactgaaagggaaaaaagaatttatattccaaaatgagttcccttcgcaacactcacttccgtttgtgccatattttctccatttgcgcttatttcaatgccaatttgagtgccaaatgaagccaattggctaatcgggtagaattcgttgaccaacttgagatccatcggatgaattaattaatggatacatttgcaaaacatgccaaaattgtgccatggaacaaattcaacatggccgagtccatagtgccattggaaagccacggaagagccaacggagaaggcgagtaatcactgatgcaaacaatgttcacaaattcagtctgaaacatttatattcagatgcattaaactattaaatcaaaatcttttaccgtacgcattcccagggcaaagagtgcccgaagaaacggtacatagtcacttaaggaattgccgagaatggtgagcaaaactgaaaaacacaaagcttaaaacaaagggggcatcattggtgagcaaattccattccatccggaggggtacggtaatggctcaatttgtcaaaatgccattgtttttgtttgttacttcgcgcttcgtctttgagtgggcccatccgttccatcaccgtcgtcatgttcagcgtcccattggtcagctcaagccgaacaattcccaccaatttgatgcctttgtcacttagcatttggcccaccgtatcagctaagtcttgggtctgatcagtggggttaaagcattgcggacaagtgaccaaagcgacctgagaaaaacgtgatgggtcaaggaaccatttggggtgatcactcactttccgccagttggtcaattggagcaatgccaaaacattggtgaccaaattttcgggtgccattgtggacagatccaaaagattgtccgacactctgttggcccaactttcgcgccaaaagttgcactgaaaaatgtccaatgaagaagtgattcgatcagtcagcaacaaatctatggaataaaaagtgaattattaaaaaatgggaaaattggggggggggaaataccatcagagcaaatgggcccgaaaagggcggaaatgttagaactaaacaccaaatccatgctttgggaagtgcctatgccaatgccaacatcgccgagacagtccgacgagggcatatcgaaggatttgacactaaattggcaaaatggtgaaaaacagtgacaagggggggggatatattatcaggacataatcaaaaaaaattcagcaaattggagaatgctgatcagttcatatctgtccactgatcagtcagtgacccgtgccagcaataattgaaaagggatggacaatgtcatgttgtcatatccacttccgataacttatgacgttttgttcgtttacgacgtgaccaactcacaatcatttgaccatttgaccgattgggtggg

SEQ ID NO: 12471 - DNA, 2532 bp, Heterodera glycines
ttgttcagcaatgtttttgttgggaagaagggaattatttgaagtcgacgcaacttgaggagaaaaggcaaggtcgacctgatgaattgcacctttgactgtgtgacgacgcgtttgggaacgcaaaagaacggagagggcattgcctgaaaaaggggaagacaaatggccatcccatgtaaaaagcggtagttgaaccaactcgagacaaagcgacgtccgcactttggtgtcaacccaaagagagagcacaaatttgagacatcaaatggtccacgaagctgcagcatgtcttcagctccactgctcaacacaacgccggcacggcccatccgagtgatttccaacagacgccgtgcattagtgaaaaactcaaagagtgaggcgatataaacaacggtgccaattatactcgagttcgactggatccaggccaagatttcccccaagttcaaagtccaggtcatttttcggcaacctgggttttagtccataaaacccaggtccaggttcaacctggaatttaggtccaggtctaattctaaattataatttagggaactaaaccatttagaaaatttatccgtctttcaactataaaacaaaaaagatctcaaactaataaacaagtgagtaaaatttttaatctggtcaagagatgaataaatcttttggcagaatatggcattaaaaaggcacctgtcgtcgatgctccgaactgataagtgcgttgccataacaaagctcaaaagtgagaccggcggcgatgcaactttgcacaattttttgtttaaatagccacgacagacggcccttttccatcgccgtggcatccaatgagacgaggtcaacgaagtcaccctttcttaacggaacatggaattagatttggtctaattgtaagcctaggagtacctttgcaatgtcatcaaaatctgttcatcggggacacgaaccgcaataatatcgtaaagctttacttttttattgtgttggagatggtgaatagaatccgcatcaattgaaaccgtcaaacgactgaaaatattaaatacaaaaataaatattgaagaattctgtgaaaaatgcctaaactgacgaaatcgcttcccattaactgcaaaagccgatagatccaacttggactcgtctacaagaaacggatcaggcacaatttcactttcgctggtcctttcgttgccatcgccactctttcgatcgtgcaactttttctgtttcttacgttttctcttcttcgatacgacttcgtcctcttcgtctgacttaattaagtaatttgtcttattggtgtttcagtaattcaacaaaattacccaaattatgtccgattccttgccgaattttcctatgtcaacattaattgcaacagattcgtatcccattcgaactgctcgtcgcactgtggcaagtgttcgctcggaatttcctctgtggcgaatatttaattcggcaaattgattttttcgaagcatcaaaattaaaatagaagaaaataaagcggaagcgaaatctagaaactggtaaaaaaaaaaatttacgggagcgggagtccgaaactttccgggaacggaactggaactcccgtaaaaaatgctataaatttttaacggtagacccggcgggagtaattcaaatttaatgaaacaaaaaaaaattccattctcgagtgtttcaaattagtggaaatcaaattttctaaacttggtattttccggatgacgcttccttcttgctcaaaagatggtgctgccagtctcagtccaatgtcattcaaagaaccaaatgcttgtccaatgttggaacggatgcattaccagcgaatcactggaaggttttcgttttggacaacacagcttcatttgttagttttttagattttgtgatgcatgtattttcgttaaagaccgccagttcagtgctcacagaatggttttggctgcccatagtccgtattttgattcaattttgcgtcacaacaaaattgcgaaagagaaggtaaagagcgtttgttaattggaatcctttgttatttgttattcccttcagattatagtcaattgtcaagatccgactgtgttcgatcgcattctcaattatatgtatagcggctcagtgacaattgacagagccattgttgtggaattgttaaaattggcgaataatttgctagtgggttttgcaaaattagattcccattttaaagtttttttagatgatccgcttgaaaaattactgtgctgattatctgatgcgttacattgatgttgcaaattgcttggcaattcgtgatttggcctcccgttacaatttgccgcgcttgcaaaagcatgccaacgaattcttcgactcaaatataaatgggttgttcggtctattgtgtgttaagagcaaaagccgtttcagatgtcttttggaaaatgctgatgtgcttggctgggaacccatcaaattggtcgaattgcttgaaatgacgcggcatgcgagcaacgtccgtgccgatgtctaccttaa

SEQ ID NO: 12472 - DNA, 1757 bp, Heterodera glycines
agatccatttgaacgcgtcctccaatcccactgattccttacagcaaattaaaacagcgcccctttctcggcaaatccaaggcaaaaaacgacgacttattggtactcatttcttcattattttaaaccattattttccaaaggcatgaaattataccgaaaatcggttgcatcggcttcccgccagggcggactgccaccacgacgacgcggtcgcccaccaaaagaacgtcctcaaccccatttggctgccggaattgacgaggagccaaattccatcttttttgaattcccggacgaagatggggaaccgaatgtgccagcagtggtaatggaaaatttgtaaataatacagcatttctttcaaggtttttgacgaggaggacgaattcgatccggaaaatatcgaatttatcgaagaaggggaggcggagggaatgggcagtgagcagaacgacgctgcaacgaaagacgaggtacgtcttcagtggcatttagggacgcgagagtacggctccattttcacccttcgagaactttccatttcccacagagagccgtttccctcgcggcctctcataatcagttcctcaactgccctcactgttcctttcaaactcgtcgtggtccgcttcatttgaagcgccatgaagcagtcgttcattcgaggaacgttctctacgtttgcaacggtgtacaacacgacctaccgacatttaagtcttcttcaatatttagtttgtcagttcgaatgtcgttggaaccgcgagttctacgagcacatgcgtcggttgcactttcctgggcccccttacagctgcgactcgtgcacttacgacgttgaccgactcactgtgctgctgactcatcgtttaacgcacagttattgcgcaattaccatagcataaaacattcaatttaagcggacgaaaagccattcaaatgttcggagtgcacattccgaacgcggaacagagccaatttggtcgttcaccatcgtctccacacaggcgaaaagcccttccaatgcgaaatttgtggaaagtgaaggcattacacaatttcgatttgttaaaccattctttgacagacgttttgtcttaaaacgaactttggaacaccattcaatcgcacactccgaagaacgcccttttgcatgcgatcagtgcaatttcaccaccaaataccaatcccatctgatctcccatcgccgaatacagtctctttttgtttgttactagtcaccctctctttctctgaatcgattgttctaactttggactgttaacttttcttgttcagctccggggaacttttccgctgtgaggtgcccgactgtgactattcgtctcctaagaagagtcaattggctgctcatctccgcactcacatgggcgtcaaatcgcataaagtctttcttttacaaatcaaaaacgcttattatttgggttttagtgtcgcatttgccatcgctctttcgttgaaaaatcacatttggttcgccacgagcgcattcatttggaggaaaagccatttaaatgccagaactgcgagtacacctcgtcaagacgggacaaactgaaggagcacattctcaaataccacaaccaatcgcagtcgaacacgcgacttctgaagcgacgttatcgaagggcgcggcaacttcagcaattggcagcaaagggaaaggtggtgggaaaatggacattttacttaacacgaaatacattgggaaaaacttaattgagaatctccgt

SEQ ID NO: 12473 - DNA, 2522 bp, Heterodera glycines
  unsure (1)..(2522): unsure at all n locations
ggtggaacagtgcgctttccaatgtgggagaggctgataaaacaaagggcgcaatccacacaatatgcagtcgacaacaacgaattcgagttttattgaagaatgatgagtgggagcaaattgaagagctggttggggtattgaaatgtgctgaagaagcaacaaaaaggttcactgccgagccaatttcgtttgtccttcctcaagcaagagcattacatgatgagttgtacgaaatgaaaattgtcaacaggactgtggagacaatcagaacaacactttattttgcggttgagcggcgcttttttgagctagcgaacaagaagtaaaaaaattatacttggttttcattaatgtttggtcttagggaatatgctctggctacttttttggatgtgcggttcaaagacaaagtgctgactgaaaattccgcaacttttcgcgccagagtcactgtctggatcaaaaatgaattgaaagaattggacattgataatgacttcgaggaactacaacaaaatgaatttgtccgtcctgtaatttcaccccagcccgaaaatctgccagccaaacgacgaatgtcattttttgaacgtcttaaaaatattacaggcgcgaacacaagtgaacagggtgatttttcgtctcttaaaattaattttataatgaatttaaggtctccaaacatcgcaagacgatgacattgaaaaagaaattaaagaatttctctcagtggaaattgcgaacccagaagcaaacccgcttgatgaatggaagaaaatagctccccgattttcaatccttgccaaatttgcagaaaaatatctttcagcacccgccaccagtgtcccaagtgaacaaacattcaaagtcgcccgtgatgtttttgattatcgccgttccaaattatcacccgaaacggcagaacaacttatttttttgaacaagtctcttccccagatgaactacaattattgaaactattttttgtgcattttattaaacttgttatataatttctatatagttgatgaaatttgtgggtttttttcccaaattaacatgtaaaaattaaaatttataccaacccggacccgggcccggcaatttgaaaacccgggttgaccgggctaaccgggttgaccgggttttgagaggccgggcccggaacccggttgattctggaaaaatcagcccggcccggcccggcatttttggaaattccggtctctaataaaaacccatcaaaaagggcattataaaaaaaaccaccaaatgaaaattttcaacaaaaaacgactcataactttgttgaagccaaacttacaaaatttttagttacaactttttgtaaaaattttttctagattttttaattacataagattgaagagaatacatagagccatcgaccaataccaagattgattaatttgataaagtttaagctaaattatgagtcattctttagcaaataaatttaaataataatttaatttaaatatttcaatcattgatacttttttaggctcggctcagcacgattttgaccactttttgtacatattttttggcagccctagaaataaataatggaacataaaaaggggaaaaaatatttggcgttttattttatgttccagctttaactgccgaaagatttttaaaaaatatattacaaaatgccagacataaaaaagcaaagcaaaacgtttgaaatttagtggcctaaaatgaaaagctattcgaaaaagtaacaaaatgaattcaaatcattattgagaaaataatttaaaaaaccaaacttgtaatgaaaataaaatatattggagatgattttttgagaaaattttcatttattaaggggtgtattttcagaaattttcgggccgattcttagggaaggtatttttggtttttattgcatttttgttaacaaatttcgacaaaacgccaataggcaaaaataggttctttcaaaaattctttaggcttttaggtctaaaaataaaagcttaggaaatagacactaataactcgaaaggtagctttaggctttatgtcttaaaaatccccaaaaataggctctaagaaatggaaaatgcaattttatctcaataatattttaatcctcatttaattcatctcaaattgtttcttccaggggggaaaaaaaaattgtctctttttcccccccccctccggttttctcgtcgctcttttttggcttttctcctttcgtttgccgctcctttttccttttttcccttttctctttttcggttgttctttttcccttccttcctttgtgtttcttccctttttgccttgttccttgctttcctccctttttcttccctctttcggcgtcgttttggtgcccttcttttctcgcntcttttcttcctttttgcttctcttcctttttccttgcctttttcttttgccctttttcaaagaaaagtncttccgtttttgctttgttctggcttttgtctcntccttnttctttgttccctttg

SEQ ID NO: 12474 - DNA, 3093 bp, Heterodera glycines
  unsure (1)..(3093): unsure at all n locations
cgtcaacgaacgactgtacgagcggatgaatgagcaggcgaacgtgctgaaggacctgcagtttctgatcacattgatcaatccctttctgtacgggtttggacggagcggcggcagcggcgccaaactgcgcggaaaagcggcggttggacagcatcggcaaaagggacggaatgcctgcggcggtgcggacggctaattaccagctgataattactgcaggcagaaagcgttcaaatgaataagcacaactttatttttgcctttatttttttagacggataaatatttaaaaatatgtctttcacagagagacaatttttcacaaattaacacaatgatgactatatgtacaacaccttggttccaaaacatcataacctattgattaattagctaattagcgcacatttccatggtcaaaccagcgcatttacaatcatgtgaatgagtttaaatatgaagacattcacaatgagaaaatgcactagtccaaacaaaggagattattanagaataaaagaggtaaataaatacataaattattcagggagcaaaagagaattttgtgctaattttgatttttgcaaagaatggctttggcatctatcatttgtgcttttatatgccatgatgtctctgcccatctctgctgttgccattttgtttctcttctctcagattaattgccattcatctgtccatttgattttacttgggttaatttgagcggctaaatgccctcctgctagtgaatggggacgggcggcattttctttgctcgcacaatggcactttgggaaaggtaacttaatcttcaaccaaaaaatgaaaaacaaaaatgaatgggtttgatttattttctctttaggccgaaagtgatcatttaaaagtgaatttttataaaaattaagcatatgtctaaataaatgaaccggataaaataattggcaattccttagaataagaatcagctaagcttataaaatctattgagaaatatttttttatattataaaattggtaatttaggcaaaatctgttaataaatctcacaaaatttttctcaattttatttacctttcttcttaatcactttttcacatttaaacgccacttttgttcatattgttctcataaatgcaaagaaagaaattttagtcaagtagacaaaatgaaaacatttaaagttaacctttttattttttcattaaaaatttctttattaaaaactaggtacctacctaaaattatctctttctaacaaattcaattaggtaatccagaaatgtttttatattccataaacaaaatgcataaatgaccttacctaattggttccgcgattgggtggtaattaattcttccatcgtatgtttgtatttgttcgtcttttacttttcttcttttggccatcccttcccttttaatttcgtccttttaaccatttcaattgaaatcccattcgtctttcatatcagctgctgaccgaagaatggagttcaaaacgctcgagaaattttctcattcagggattttgagcagtatttgtttcgggatcatttaatggacaaattgcacattttgaaatggcattcatgccgtcgtccatctgctgctgaatacctctgctgctgagtggcgctgtttcccccccccccccggcgcccaccaaataaatatttgtaatgcaattaaattttccccattaatttctgtcctttttatagcattttccccgccttcggtgaattcaattatcctttatcagtgcatatgccaattttcggactcaattacctcattcagttcactaattgaattcactttcacatttttatttacaatttcacaaaacaaagacaataattgaaatcaaattcattgacacaccaatcgaagtgctaatttaatttttaaatcggctttggccgggtgatagcatacttacttttaacagaggcacattaacacatcgcattaactcattgtccgatcaatttagaaatatgtttatttcaaatatcctgcaatcaaattcactttttacaaccaaaaaatggattaaaacatttgttatttcattagtctttcgaatccatcattataaaaattttttaagacaaattcatataaatacatttgaacaatcacattttaaatatatcacatttaaataaagctaactatttattgttttcgtttttataaattctctactttttagtgtgtgggatgtgccaaaaaggacaatggcatgcgtttggtgccaaatttatccgagcaataattttggaaggccaattttccgaacattgttttaaaatttttgtaaaagcacaaacagtgtaaatggagcagatgagcaaacaaagtctgctgctgctgctcttttgcgtggtcatcggcacaaaaaaaaggaaaatgaaaattttacccatttgaaattttagatttttacggcacaaatgaaattcaaataaaagcattttaagacactgctgcaattttactttttacttcttcccgtctagcaaataaaaactgccgaaccctttcaaacaaatctctttccattttttcaattttctaattttacaactcattaatttttcttagcgctcagaacaaacatcaattttcgcttgtgctttatccatttgactgtgaatggcaataatccatcgcccgtggcaaaatcaaaaaaaaaaaaaagatgccatccgcgcatttccccaggctttagaaagcattccaaatttatgaaaatccaaatagaaggtaaaaacataaaaattttatttgtattagagaaggtcgggaccgggtccgagctgggaattccctaaaatttccggtctcgacctaatttgtaacgatgattttcgcagttagaaataaatcaaaaaaatttttttttcatattttatatgtaaaaagcaaattgcctaatattagcataaatatagaattggcacaaagttaaaagctaaaaaaagctggccaataactcaaacactgcaacatcgagcacacacaaaaacaaatcccctaatgaatcgcaaccataattacatctcataatggcactca

SEQ ID NO: 12475 - DNA, 3718 bp, Heterodera glycines
  unsure (1)..(3718): unsure at all n locations
ataattacatctcataatggcactcattaatatatgcgcatctgtgaatcacttcccatttcctccacctgacgacatntaatnttcagtactatttccatgtgcttatgattcaagcggattatcaggcacttagcgctcattttagagctaatttaggcattggcggaagaaaactcgctaattaataacaaatataaattattatttatttatttttcttttacgttttggatttgaaaaggaattcttatgcttttcaactttcaattaaaacaattttttttcaaattctctctctcactttttcactttttgtttttttatttgagtcttaattggtgataacaacaaatcattttaatcgttccctgttaatggtatgaataatcagtctgaacaagtgcatcatctccttatccgtcgtcccaatgcatctcttcccccttcctttccccctcccttccgttttcatcatccgccattatccgtccccccgggggcgtcttcttccgttagtgctcatcccttccaaagccgtgccaatgtttaccaaatccattagacattatttgcgcaagggcctctccatatcagcaaattcatttgcgttaaatgctccgaaaatccaaagcgaaaaaataagtcaaacaatttgaaggtttaaaattttctttaaaaaatattaaaaatgtataaaaatagttaaaagcatttatggaaatgattgatccttgattgccattttcctctatttatctgctaattagatttattaaaatttttataacaaatattttcccaccatttagagcgagtttttaaattcaaataaaaaaatgaacggcacaattattcggcaccaaattgaaaaggaggacgtggaaagtgagcgcgagttggtcgactttgtggagattgtgtacctttcgttgagcgtttgcattggcactttgctcaattcggtggccgtcgttcgcctcgtccgttactcaaagtcagtgacacggctcattaacgacaaattacacccaaatttaaaatggctaaatctgtttaaaaaaaaacattttttaccgacagaagtccctcgtcccaggccaagcaccattgcctggtccgacccctgcacatgaacccgttcgccatgttcaaattcaacttggccatcaccgactttgccattctgttcattcacgcacttggcaaggcgagtaaatattggaaatgcattttaatgccaaaaataaatgaaataaaacgatctaaccaagtccaaacctaacatttaccgagccatcgcttaaaataatgtttcttgatattctatgtactgtaatacagtaatcctccttcagatggtttggcttctctcataccggtggctgttcggcgacttcggctgtcgtctgtatcagtttctgtccgcatttgcctactattccaattcgaatgtcatcgtcgcaattggactggacaggcttaaggtaggatttatcggagtaaaattccttgctattttcaagaaattcacccattgcttttcctaaatttgccatttttctaactgttaaaaatcattgaaaaattgaattttttaaaccactaggccaatttgtacaaattgcttttcctttccaggttgtctattctgaccaaatgcaatgcgtttcctcctgcactcgccgcgtgcgcatttttctgctcatcgcgtggcttttggccgcactctgtgcactgccccagctgtttttctggaccaattttgagctgggcctcggctggtcccaatgcaccaccatttggcaggtccaaacttcgtcagcccgttcattttcattgctttttctaagcgggcatccgaccactaattcagtcgggactaatgcaacattttggtcctgacttggcttgtcccaacagtgccgtcagtccagtctctaatgttcctccgtttttccacgaacttgtgccttgagacattaattcctgagattaccaaaaggcatgagggataatgccagtctcgaactgatgccaatctcgagtggtcgtccatgtcaattcccagtctttcattttccatgtttggcattccattcttactcaatcattttttacagattgctgagtacactcagacgaccaatttaatttcgagaatgaattcacaacgacaatctcggacattcaacagcagaaggaagaccattcgtggagtgcccatgccaacactcagctcctctacgaattgttgcaccaggtagacggacggacaaatggtaaattaagtgaaaaattaaagcatcgaacagagcgttgaaatgaccatagaaacattggcattggcatttactacaattttgtagtagtcccattttttaatgttaagagattaggctaatctactcctctctcctcattttttatgttcaatttcaattggcggggcggggggggggggaaaatgcggcgaattggaaaaatgcgcagttgtcgattagcaactattcgatgtgggatcaatgcatcgattcgcatactttcctatcggcccgcacttttctgtccggtcgatggaatcaattagtgcggggcattagcagaggcaaatcgatgcatcggattaatggattggctgtgaacggaaaattgagcgtattggaaaattgggaatggacgcggcttaataaatcgaatatcgaacggaggcgacgggggggcggaggggggagagagcaacggaccaaacggtggggggggggaagaggcgagagtcccccctccggggagccctggcctaaaaagaaaattaattagcaaatttaagcgccgaaaagcagtctattaatgggaatcaattcgaatacactagcagaaaaggggttttttatagtcattttaaatggaattgggccaaaattaggcagccgaaacgaaactcccccccccgttctctttcaccttttacctgctgcatttaacaaaggcatctgtgtgcaagaaagaagcggaatgtgagataaagtgggataacggacttggtagaacccctaaaggatttgaaagggccgtgggttcgagtcccactggcggcgggcgagttaccctttatgttctacaaaccagcaaaaggttgtctgtcgcatttatggtgccggccaaattgagcccggttactatagacccctcccctttttcaggtgattgtgttcatcattcctctgatttccttgtccgcctcctatttgctgatcgttgtccgcgtccttcgctattcgcttcgtcctccgcccaactccaacctttgctccttcaacggcttaaaatgcgcggcccaatgggcggccgacgatggccaacagacggactgcgaagggacgggcgaaggcggcggacgatggcacagggccagcaaccggcggggccgaagaagtgccaaaacgaggcaagaaagagtcaaatggcaatgatgcccgagggggaggggagggaaactatgccaatcacactgattcaattaatcgttaaatttgccattagcgggacgggggttggagaaatacgccgcatttcaaagagagcggcggagttcggacttgacgggacagaatggatggaaccactgggaaagaccggaaattccggcacaaggcacaataanattaatttgaattcaatttnnggaaataattnnagaattattgcgacgattgca

SEQ ID NO: 12476 - DNA, 4308 bp, Heterodera glycines
gccaatgctgattttgaaaatttcagttggcagccctggtttttacgctaataaaccattgttttaagtctatttttcatgtttttattgcgtttccttcgcgctactattagttttagaaaaaatcttatttttggtgtcaaaatcttagtttttcatccattttgtcttattttgaaaaaatttaagctctatcagctaagcaaattcataattaaaaaaattaaaattaaatattcaaaaattatgatcttcccgtggtttctagggctggaaatttaaaacaaatgatttttttgctgaccataatgaccttaaactgacttaaaagtgttctacatttagtttgaagcttctacatgcattttttgtgactttttggctatttattcttgacttttttgaatttttcgtgattttttggcgttttttatgacttttttagtcgactttttggagatttttcatgacttaaattcccagctcaatagtttcaaactttatttcaggcgcagttaacccttaccgttgaattgtttaaaaatggattttgattctattatgtaaggctaatttttgaaaactttctttatattttttgtgccttattaacgttcttatgaatttttagtggtctttatggctaggcccgtttttgtgccttattaacgtttttatgaatttttagtggtctttatggctaaatttcatgcttttttaaaattttgtgtttttttacataatgccaaaaaatatgaaaaagttctttttttctgaaaccaaatgaaactgaaattatatatcgaatgtaccagtgttttttgggtgcttctagaaaaattaaaaagccttaaagtctcattatgttattttatggtcgggtagactgcagtagatcttacaccccttttttcttggtgttggctgttctacataaaccaacacgtgaatcagaattttttttctgcttgctgttacttatccccccttccccctttaaagcttaatacccattttaatggctgggattgattttgggaatttgacttgttacatggctgtggcgcggaacaaaggaatcggttggcaaatatacaaaaaacatttttgaaaattattaaatgttttagaaattgttgagaatgattactctttgcatgccacgccgtaagttctgtctcccattttccatttttgcatttgtccgaatgtcttttgttttcagttcgtgcgtttcctttggacaattcgctcggatgatgggtttcggggccaagcagcagctgaacgtcaattacgggaacagtgtcgtgaatttcaagcacatcctcggacgcactttcaatgacaaagtcgtgcagacatttcgtcagcacattccctgcggacttatggggaagttcaccgatgaccaaattgagataaaagtgtgccaaagcgtcacaaatcattttgtaattaggaaatgtgttttcttaggtcactcatttgggcacgacgcgagtgctttccccggaacaggtggtcgcctgtctgttgacacatttgcgggttcagctcagccgttctctcgggacggatgccactgaatgcgtcattaatgtgagatctttcttttcggtaccaaaaaggatgggcggataggaatagttttgggtgttaaaaatgctcttcaataacccaacagtttgttctccttcaggtcccgtttttctacgaggaaaaccaacgccgcgctttgctgaatgcgggtcgaattgctggcctttcacttcgtctgatcactgacccggccgcgttggcctattgttacggcatgtataacggggcaaagtgagtgagggacaggccatcaccaaaaaagttggagtgggacctggcaacttttttatcggcattaattcttttttggctttgataaacataagaaaatgaaatttaaaacttaccttgtattatataaatttgattatttttccaacttttccaattgtaaaaccctctttttaacacgcatttttcattctcctctttcagtcttcctccacctgaacagcccgctcggcttgttgcgtttgtcgatgtcggccattcgtctgttcaagccagtcttattgcattcagcgccggcaaagcggaggtcagcaggcgaatgttttaaactccttaattatttccattttaggtgctcgccgcctctttcgatttgaccgttgggggcgtccatttcgatgcgttgttgcgcgactatttcaatgaggactttggcaaacgcttcaaaatcgacgcgaggaaaaccccgcgggcgtggctccgtttgttggatgaatgcgaaaaggcattgacaatgaaaggcacaaacgaattagaactttcagatcaaaaagcaaatgtcggcaaacagtcagcccattccctttgcaatcgaatgctttgtgaaagacaccgacgtcaacggagtgatgcaaaggtgggtggtgggacagtacctgagttgttttaggatgtatgaaagtccatgggacgcgtaagcgttttccccctctgctgaattttgaaacaaaaattgtcatcaaataattacaaattagggaccaattcgaacaattggcggagaaactcttccaaaaagtgcaggcactgctccaacagctcattagtgacgcgaatgtgaaggtaaacaaaaacagtcaattaaaaataacaagtttttaggtcggcgatattttcgacgtcgaattggtcggggggtcgtcgcgaattccgcgcatcaaacaaattgtggcaggtagtaaatttggaaaatcattaaaaggatgaataaaagtcggctattttaagagtttttcaagaaggtgccaaaaacgacaatgaatcaggacgatgctttggtgagtggccttggactcaaaaaacgaacggaacttctcttaggcccgcggatgtgctcttcgttcggccatgctttacccggcttatcaggtgaagaaattcgttgtgatcgaccgctacgaaatgccaatcgacccatcggcactttcggacgaagagaagttaaaagaggagatcaaagccgaagtgagtccaatttttttttctcgtacatttggctgttcagcaagaaatgcaaacggccgacctacgcgacaaacaacgatcggatgcgaagaacgctttggaggagtattgcttcaaaacccagcacaaaatggaggatgaacagctggccaagggcaaagtgagcgacgaggagcggcacaaatgtatcgaaaagtgcaactccgttttggaatggttggacaacgaatcggagacattgcagaggaaggtgaacttcgagacaaactgaactctgtctttgatgagctcatgtctttaatttagcaaatcgaatgtcgtcacaatgagttggaggagttttgtcggccgatcctcgccaaattatacgctgtcgtcgagcacacaaacaaaaatgggcagaccgacaaaatggacagcagcggtgggacggactcaaaaatcatcaggaaaccgaaaacatttccattctttcagcttcccctcagcagccgccgcctcttgccgaagacaaaaaaagaacgacggaacagaaaaatgctgggggaggagccatttaaaagggtggacaaatgcttttgacttaaatattgttttaatttattttaaatgactcattttgagatgattgtatttgaattaaatattaaatattctactcatagattgccaaaatcacaaacggccaagagttagcgattgggacaatcaattaatcatttacactcaatatcaaaataatcaatttaatcacttggagctgtggtggcaggggaatcaacatctggttcctgtaaaaatctaaattttaatatgaaatatacctaattggtctctctctaaacattcatcgtagaaaatcaaaaaaattaaaattacaaaattaaactgaaaattagtgaaatccctcccatccgtgccgactaatgaatttttagtgtttacaaaaaccattgcgaatggaaggaaagggccgttgccattgcgttgcgttttttccaattcgagtgccccgcgcccctctcgacaatgtttgttcttggtttgaaacagtcccccccccccccccccctccccctttataaatccttttttccgtcctttcgccccatttctttgcttcgtccgttcccttcccaccgatccctttgatttttgggtgccaatggacagcgttgtgagtgtttgtcctcaaattgtgccaatgtctattttttgttaggcaattca

SEQ ID NO: 12477 - DNA, 1113 bp, Heterodera glycines
atcaaaaaaatggccaagaaaaaactgaagacattgaaatggtgggcagtgggcggactcagaaaaaggtattggaagtgagcattcccctggaaaaggtcgacattcattcatcggcatccatggaaagaataatcccaccgggggattccgaaaaaggccgagagaaggcggaagagaccgagcagtcgaaggggtagtcgtcctcacttcactcccaccaatggtcagtgatcagtgagtatttgttgggaccgatcagtcgccagatttttgcatcatttcgcatttccatttggactttttaattatgattacacccccccccccccccaaggcaaaacattgttttttcatcgcttggccaaattggcgtttttgtgtccacaacaaaagtaaaagcaaatgcttttttaaacaaattctgagaaatctgtgaaggtgttttggattgtcgttgtgtacacaatttttggcgcttatttattcatttggttggaagtgccgaaagatttggaggagaagcgaaaggtcagtgaaatgcatcgaaatgagcgataaaaaatgatcaaaaaaggcgtacgaatatcatttggtggtcagagacacacttttgtttaagtgagtcattaatattgtaaaatgggaaaaattgggagaaaaaaatgaaaaataaataaattaatttgtcccattgccaaattaatatttaactatttcatggtagaatagagcaaattcacaagggaagggtcttggagaagacgcagcattggaagagggccattttggagtttgaacggcacttggactttcagccgccccaattggacacttcgtggactctgtggatgtccattttgtattgtgcaacaatttacacaactgttggtcagaaatttgacaataaaaaaacatgccaaagaacagtcgcccgaatacggtcttagggtacggtaacatcgcgtgcgcaacaacgggcggaagggtggcgaccatcgtttacgccatttgtggcattccgctcagtgagttttaaactattaatcggtttggatgaatttaaaaaataaagaaaaccttttcaaaggaattgaaataattttaaattaa

SEQ ID NO: 12478 - DNA, 3154 bp, Heterodera glycines
  unsure (1)..(3154): unsure at all n locations
tttaaaataaatatttaaaaggaaagagattatgtcaaaatggcaaattgcgattatgagccaatttttgttaggggctttgaaaaattctgaccccaatttgaggatttttttgcaaccttataaggaggaggccagattaacagtatgtcaatttttatgaaaattttgcgcactcccgaaaattataattcttttatttgtgcacgcgaatttacggcacgccaacaaacagacgaataaactgtgccggaatggctcaagactgaccaattggcgcagcgaggacagtgtgacgcggacacgcttcaacaactccgtgctgtagacgaagaaactgtgccggaatggctcaaggctgaccagttgacgcagcgaggacagtgtgacgcggacacgcttcaacaactccgtgctgtgcaccaattcgtccaacggcggttcatcagtttcagcatcgtcagagtcctgtgccaatcgaaattgttaaaaaatgttcaaatttcaagaaaaaatcttagaaatttcaaactaaaaatttttcaagaaaaaaatcttgtaaaatttttctaaattttttcatcgaaatttctttataaaatatacccctaagaaattaaaaattttctcaaaaattcatcctctaattttaccatcgaatacctggtcaatttagaacttttaagtcaagtccaataaagatcgacaaagacagggagggaaagacagagatagagagagagggtgtgagagacagagagacaaaaagagagagagacaaacagacaaagagagagagagcgagagtgagaaagaaggagagagagagagagagaaaaagagagacataaaaagatacagagagagagacaaagagagaggaacagatagggagagggggagatagagagtgggaggagataacagagagagattgagtgaaaagtgattagagcactatgggtcatgtcgctgacagcagcgacagatcttatcgatcgccagctgtttttgttttttcccacgctttttgctagtgatagtccaattaagttttttcctctgtgccccgccagtagtatatagtcccaaaaggttgcgggttggttgcgggtgtttcccgcacgagcccgtgcctatgggaaggcgcagccctttgaatttgccgccccataaaaaatccacgatgggggggtgtttcaaaaccaaaacctatggaccactttgaagttgccgcctgaccaaatccgatttcccaaattgttgcgggtgtttttttcccgcgccgcgcagcgccgcgggaaggtcatcaatcatccacctgtcaccaaagtgacaggtgaaggaaattcttttgccaattaattcctttttgattccaaacctttttggggtattttctcaaatcctgagattttttatatgatttttatcctgaattttgaaaatttgccaatgtgtgtttttttatttttacatttcctccacgccctccctccccgcgccacgatgcgccgcgcaaattaatcaataatggaattgtagaagtgcaaatttaattaataattgcagcaaattaatgaattttacagtaaaattaattattaaattcaatttaaatataaaattgaaaaatgaataataaattaggattgaaaaaaaaactttttcaaaagtaggtcatctgcaagaatttcgggaccgtctcaataaataaacatttttatcgtctcattaaattcttttgagccattttcaaataggggagaatatgatgatacatttcctcaatttcagaattgtttttagttcccgtaattacgactttaccggtccagaaaattaacgctgtcatgcttttaccccgcttgaaatttaaaccgcaaaatatttccggttcataaaatgcacgacgattttttcgaaactcgttcagttcaatttcacgtccgaatttaaaggtcgaaacaatattttcaaccgtgtgtccggtgtaagaagcccccggacaccccgagcccttaattatttctataaaatttttaatagcattttcacagtctatcagacttttcgtccccagacatatcattttcccggattcccataataatgccgtggctttgatgggagctgtgcattttataactgcggcattgaattttctagggttatacttaaattcgcattcggtgatcgtcagagagtttagtttaattccggtaccgagattagcgagagcaattatatttacgattatcggtttttgcattttttgatacaatgtaccaatcaaatggtcctttcacttctttatataccccttctataaatagcaaccaaaaaataaaattaaattgaaaaaatgaactgtccacataaaattaagtgttgtcattactgcccctgtcattacgagatttgtaagagatgtaaaagccacagtcttttgcatttcggtacatcattttttgataatttctggctatgccccaaatgcgcgaaacatgttctctatgaaaatataaataggtcaaataaataagaggaattaaaaatgtttcgcggtccgttcacactaattctctcgggggctaccgggagtggtaagacccgttggttattacggtttttaaaacatcataagaatttaattgaaccaccgcctaagaaaattctttattgttacggtgagatgaatgatagcattttaggattaatcggggagggtgttgagacttttaatgggattccggacatgaataagattaaagaacaggaaaaacccctcttactgatacttgacgatttaatgcttaacatgcagaatactttcctcgatttactctttaccaggggctcccataattggaacgtaagcgtaatttttgtaacccagagtctctacggtcgggacattaaaacggcaagagcgaacgcccattatctggttttaatgcgcaacccttcaggacaattacaagtgaggactctagggtcacaactgttcccaaaaagactgaattatttcatggatgcatatcatgatgcgaccaataatcaatttagctatctcatgattaacatgcacccaaattctgatgaggaattcaaaagatgtagcaaaatttttccagatgnagactctggaaat

SEQ ID NO: 12479 - DNA, 4412 bp, Heterodera glycines
ccattggccatcccgtgtacggtcgcggtcgtcattttcagaaccgttcggcttatcaccgacgagttggacgacggcacggtcactttgctggcggaacgacccgcgcgccggcactacgcgcatacattgggtcaacgaccaacaaaaccatgcagtggcagtgaacaggatctgacggttttttatttatcttggggcgggggtctcttcggaaatgattcaccataatttactggtttaacatacattttttttattcaaaaaaaaggtaaagtctctatcataaaaatttattatttagtcataaaagccatgctctttttccaaacaatttgaattcatattgtatgttagggttttttaatcgacgaccattttttcgcggtggcaaaaacttttatctttgttttttacgtttttttgtgaaatttttctaaacagatttgccatattaaattttatgatgtcaattatgctttcagaattccgaaaaattttgtgtaaaaatcttttgttttgatcgtcgtttttgcgtcaggttgagcatcatctattccgttcgtctacggtggcgcccgtccaaactgttgctgtctgttgttgaccgattcgctggtggcggtggacagtgccaacggcattcatctgttcgatgtgcgcaccggaaaccactgttgtgtgagcaattccggaaacattcaaaagcactgttattttttgtcttttttatgaaattaatctccttagagtaggggtttttttactaacagaagccgtccagtccgtatggaaaaaatctgaaaatttgattcaaatttgttgacccattttgttcaaaaacgagcacattttagggtcaaattttatttggttaaactttttgaagctggtggggaaaattctgcaaatttaacaaattttctattgcaaaaaattgacaaattccctcttttatgcatcaccactcctttctttcaaccctttacggagaacgttacatcatgtttttgagaccgtctctgtgcgtggtctggggggggggggggggagagcaggggaggataaaaaaaatttgcaaaaatttttcagcgattttttgggaaaatttttacaaaaattaaataatttcatcataaatcatccctcctgaatgacaagttggacttcaacacagcattagaattgtgacccccatttgctatagacaaatgtggtgaccaatttcatcgctggcggcgtcggtggctcatgcgccgtcatcaccggccatccgttcgacacggtcaaagtgcgactgcagacaatgccaaagccggcgcccggacagccgccactgttcaccggtgcgctcgactgtgtgcgccaaaccgtggcacgggagggattttttgtgaggttttttcaaaattaaaaaatttgattttcatgtccgcttcatgcgcaaatggacagtgattcggagtgggttttttcactatatcatatcaaacccttaaaatcaagcccttttaatctggaaacaggcgcaatttggtcaaaaagtccactcttcaaattgttgtgaggtttaaacaactgacgggctgtgaaaattcggatttggtggaaatttcacgaaaaaaaatcaggaaaaattcggagagcatagttttaatggttttagggatccaaattacgaatttgacacctcattttcagcaattcatagctcaaaacgccaattaaaggcttaatataaagaatttcctttttttttggcatttcattagtgaagtttgcacaccctttaatttgccaaaaaatttatccaaatttcaaaatcatgtccctttcctcaggcactttacaaaggcatggccgccccgctcgtcggcgtttcaccactctttgccgttttctttggcggcactgcactgggcaaatggctgctgcagaacgagccgggccagcagttggacttcaagcagaatttcacggccggtgccattgccgtcgtggtcaccactgctgtgatggtgccaggttgatcattgccatttttggatcaaattttcaaaaaattaatggtaaaaatgatgatccggcggtgcagataggcgccgctggcgctgttgaaattttcatgaagcataataaaaatatgcaaaattgacaagaatttttccgcttttttctttggcgtttttcgggttataaaataaaattttataataaaattaataccggcttaaggcccagagccctgggaaatttatggttctttatcagtacatttttggaaaaaatgccattaatttccattccaaaattaatgccaattcatcatttttaggcgagcgaatcaaatgcattctccaagtgcagtccatggacggcagtgccggcacaacgcccaaatacaccgggccggtggacgtggtgcgcaagctgtacagagagggtggcattcgcagcatttaccggggcacggccgccacactgctcaggggttggtgtggggtaaagggagtaaaattcacacccaaaattggtcaaaattcattttttggcggatttggcattgctttatggcccataaatttacggaaatttcaaaaaaaaattttttgcatatattccggccagcggcgcctacattgctgtgtacgaattgcttaaagacaaattttcgggcggaaaacggcacgagctgacgcccatggcaacgttagtccgggaaattggggagggggtgtttgtaattcaatttcaatttgcccggaggcatttttgcaaatccaaagcaaaaaatacatgaacacaccgagtcaaaaaacgagacatgtgtcaataaagagagagtgcagagaaaaaaacatctctctttttggcgtactatttctttatctgtgttaatagagaaaaactgaatttacttcatgctgtttaaaattttttctacttgttaaatctgcttcaaattttgcatagagacagagaaaaaaattctgcatcgttttctctgtttgtttatagcttaaatgttgttctaaaaagttattaaaaaaataaaatttcgaagccatatatcttttttcgaactcttctaattgtttagcatttgcttacaaaaagcttctcctcatcaagggctttcgaatgatatcaagtttttccaatttggttgggaaaaaccttcaaaaataattcccaaaattcgtcattttaaaaaaaaaacaaaaaaaaaaaactcatgttgcacaacggactcgaaccaccaccctttgtccctttactatcttacaaaaaccacttcgccacacatgcaaatctttttagaactgagaggccaaaattgaaacggtgtgtgaaaaaaggggaggaaaccaactcgtacaccgtcccgacttacactgtgtcagcctaacttttatcaaagttgacctttcacaatttttttgatgaggggcacgatgatgatgacgacatccaaatttgttgcccttttcagtctgctggcggacggttttgccggcatcgccaattggtccgtgtgcattccggccgacgtgatgaagtccagcaggttggagacggcgcccgagggcaaatacccaagaaagtttttaattttttttcttttttctggcacggcattaattttcatttaaaattttttaaaaattgatcaaattgtcataattaaagtcacgccagggtaaaaactgtaggacacgtcgtcgcaaaatgcccgccgcgagagggcccctcctccctcacattttcctggccgggctttaatcatagcgaaggacatcgcaaaagtgcaacgaggaaaagaaaaatttaaagccgatctataagggcttgcttccttggcattctgtttcaattttccacctctctcacagaagtcatccgtgatgtgtgttccgcgaaatgttgcgcgaggaggggcaccgtgcgctgttccgcggcttcgtgcccgtcatgttgtgcgtgttccacgccaacgcggcctgcttctccgggcttgagcagacgctgtgggcgtttcgccaagcgggcgtttgaaaaaaacaaacaatctctttgtgtttactgtatttttcgatattaatttcattgttttgtcgctgggtgtgtctgtctctccgcctttcgtccgtctctctctctcccattttatttgccttaccacacaacaacaataaatcaataattaaatgtaattaacttgcgaaaatgtattttgattaaacccgtttaagtttcttctggtctcgttgaatcgcttctttagccctcagcaagtgacggtcaatgtaaccatcgcgcaattcgttcaggcggcccctcgtgcgtcttccgagtggcagcgctctccactcgtcactcgttttggcaatctggtaaaattctattagttt

SEQ ID NO: 12480 - DNA, 4226 bp, Heterodera glycines
ttaatcgcatttggacacacaaaagcggcaccaaattaatggcatttcccttccgttcgaattttcctgtgcaatttatttattattttattttttgttccgtctttcacagttttgacactttctcattttctatcgcctattttgccttttccattgactgccccaattttaaaaatctcgcaaaatattcgcttattttcacttctcttgccttcaattttattaatttatttttgtgatcttcaaaaggtgattggattataatgcatgatattatttattattattattattgttattatattaattgactttgtggtaatattgtgtttactatacctaataaaaataatcacttaattatgctaaacgcgtgttgtatatgtattcatttaatgacggataaaatgaccgttattattttcatttaattaacaaatattttcaactccatcgaccatgcgaattggggggaaggacatcaaaaacagctttcgcccagataaaaaacaaataattaagaaaacaataaaatctttccccaaatttttctatactggtcatgataagttctgttgtcccgcactttcagactcaatcatacggaatatattgaatttttggagaagcaaaaattggtctcgtccagtcagggtcatattgacccatgtgaccagtgatcggcgccgatgctgcgtgccatgttccgtcgcgtgcggcgacagtgcgctcgccgttggcactcgatgatcccactctcgtggctgtgccggctcccggcgaatggcgaccacaacaaaatgccgccgctgctttacccctgtattgatggtgttattagaaaaaaaaaattgaatatctaaaaaactgaggtttagggttaatagtatggatttacatatcgattttacgccgcaaaagggccgattaaatatatgctaattcggactccaactaattaatttgctaattccctccggcaaaatttgaaaaaaatttaacagctgacataagcagcagaagttgcaccaccaccactaccatttttggcctctttgtggtgtccgcactgctcgcgttgccctcctttgtgctggcgttgttcctcaccggactcgccgaccatttcttcgagacgccctttgcacagttccgttggtcggaagcggacgtgcgggcacaggtagcaaaggaagagtgtacggtagcgagtgtaatatacggtagaaaggcaaggaacggtaggggtaaatggactcaaaaagtgccaaatttaccggaataaatgggctacaaattttttttatggcatttgcaccaattttttctttgttgttttgggtcgtccgtgaactcttgggctcgtcccattcgtccgtcgcaaatttgttggccactgatctgcaaccgctggtgccgatcaatccctggccaacactattcccccgtccgttaattgagccaaactgtcggcacaacattctcagccggcacaactctgtgctgatcattgtcaaaagtgcgcccgatcggcggaaggtgagacaattaatgctaattaattatatcattagtggaaatgcgggctcaccaaggctgatttgtgtcataaaggacaatgcttatccattttacttactttcaagcatcgtgacgcggtccgagctacgtacggtgcgctgaaacggtaccctccggcgtcggaggcgccgccagcagtgcccgctcctgcggttggcaccggcggtgacacttttttccgcttgcgtaccatttttgtgctcggccgtccggcggcggacgacgcagcgcaaatgaacgcgttggaaagcgaggcggccgcgcatggtgacttattggtcggcgactttatggacacctatttcaacaacacgttgaaggtggttttagactggcgcgaaagaccggcgaatgcgacgccaatttaggcgctaaattcaaattgtctctctttctcatcccacctctctattcggcccactatctctttttactaatccaatctcaaaagcacttttaaatattttttctaaatttataaaaaattcctccctaaaaagtttgtccattctgtgcgctttgctcgtcactattgtgcgctgcccaattcggtgccttttgtgcttttgttggacgacgactttctgttgttcccgtggaatttaatcaccgaattgcaaaagtgccacaaaaataaataaacaattattttggcatttttatttttttaaattgtttttggcatgtcccaaatgaacgcctttacatgggctggcgctttgacacttcgccattccgttcacgactgttcaaatggagggtcggagtcaataatcaactaacttattaaaataatttgaatacagtataccaaaaaattgaaccctaaaaaacgtttgaaatttcaatttaattacaaagataaaataaagcaggctcgtcaccagtagaagccggaatcttgaaaaatacagaaaaaggatttgaaaaagctggattgaaaagcagcggaaaaaagtcctaaatttctgagaaaaactgaaatttaaataaattcgggctctaattaattaattaatcttcaattaaggtgtcgctggacgagtttccattcgccgcctttcccccgtacatcgccgctggcgcagtgctcttaacgggccaaacaattgccgaattttacgcagccattccgcacgtgcgactgtttcgcctcgacgacatttttgcgggtgggaaatttttcgtcaatagtttttgaaaacaattttttaaaattttacccattttattccgtttttatttttttgatttattatttcgacatcccatacaattgttctattgctgatttccctttccttttaggcattctctcccatttgttggccattacgcctcaacacaatgccaattttgccttctatcgccaatcatttgccgacgattcattggcattggcatcttcagaaacactcaccacattgatcgctgtgcatgactatttgcccgaagaaatgcgcgagacgtacggaaaggcagtgaaacagcaaaatcagcagaaattgaagctgctctgaccatttatttaggtgttagggcaactcgtacaatttttaatggatttggccataacttttttaggtaaacaaaattattcaaacttgatatcattcgaatgctctccaagtttagaagcgatcattaagtagaagctgagagatttcctttgtacgagtttccattgacccatttattatgattattacatacaataataaatgattagcacgaatttgccaattcgcctccaagtcgttgggagtgccgcttaagtcaaagcaattttgacctaaaccattgtcaatatggcttcataacacttaaaatcgcatcagtaagaaatttagagaaataaataaaatgctggaacattgattgatgagattaaaattttctttgaaccaactttgagttgttctcacaaatatttgaagaaaaaataatggaaaaagattaaaagtaaaatgccgttctgtgcgtacaaatagcgcagtcggttaagcgattgtcccagtgctaagacaaaaggagttcgaacccatcaaaccgcacgctaatataataattattatattttttgccgaattttatgccgcgattcaaggaacggtaggggtaaatggactcaaaaagtgccaaatttaccggactaattagacaaaaaaattttattgcttttgcactaatttttttattgtttttgtaatttttcattttcatcaatttaaaaaaaatgaaaaaaatattttacaaactcagaaaatgccaaaattggcggggtaatgggcttaaatttctatgacatttgagcaattgactgaccgattggttacactttgacatttttaaaaaatttgtttggcagccgttgttgtggcttccaatgctttttggtgactattttttaattcgatattaggtttgcgtcgtcgtccatttgtccgttttatctattttttggatggacaatctcgcggagtaattaaaattcgggtcttttcccgagtgggtatgtccgagatttcttatacttaattaataacattgggacactcaaaagcgggaccaaaattaatggcatttcccttccgttcgaattttcctgtgcaatttatttattattttattttttcttccgt

SEQ ID NO: 12481 - DNA, 3390 bp, Heterodera glycines
  unsure (1)..(3390): unsure at all n locations
ttttataaatttattattttaatgattctgaaaaaatataataaagtccacnntaataaggatntgctgtgcnaagaatancctcgaagtaaaatatttattcatttttgtaaattgtaaatattataattaaaaaatgttcaataactgatgaatataataattatatgaatntagagaatcgaataattaaatttaattattttatcgatcactgagttttttgttcgactcagcacggttcaaagtacgtaaatggcatccaaatacatatgtcaacactgtcgaaaattcaaataaagtgccaatgaacaaatttaagggacaaaaaatgcccccgtcccaaaaattggcatttcgccttttcattttacaaatttttcggcgactttttgtcatccaaaattagagaagcgcttcaattcattagtatgaaatattgtcatacgctgcaaaaacagcaaataaacgaagcttttggcgacaattcatcaacacggcacggcactcggagatattgaaaaggataaacggcaatgtttaaaacagcaaatagatgaagcaaagttaaaggggaggcgcgaacgccgtcccccgcactcaaaaatttagctgtgggcctatcccagttcgggaccgccctgcgggtcagccccgaccgaaagtgcaatggtggagcctcgccacaggagccctgccttggtgatcgcaggaactccccagccaggtaagtttaaagagcggcagcaagtccaaggaaaggaacgatgcaaggatgagggggagatggggtggaaaaagggcgagagatggacagaaaaagggatgaatgggtactctctcccaatgactactcgtctcttttcccaatgatacgtgtgctatttccttcccatgctcgtctgtcacttggctaaaatattatgcactcttttgcaggctgtctttttcttttccttagaaagaacaacagcagcagttagagatgatgatgcacaggatggcaaaaagagggaagagaccatgagagaaagaaagcaaagaaatgagagatgcaaagagagagtattggacaaagaaaaagagtaacgaaaagagcgcagcagaggaccgttgtgcctttcctcttttagatttctattttttaatttaattgaatcaaaactttaaaattcaattttttctttttgctccacaaaagcttatcggatatttaaaattctataaattgtactgcagaccaataccgacctatcagaagccccgggttaatcttttcgttacagaaaaaagaattttgagtaattttgagcccagattctccagtatctatataaaaaaattctcttatataacaatttcaatttttaatcacgattaaccaacaaaaatgaacaaaataaatacacaaaaaatcgcaaaattcataaaaaaattccggaagagttccgtccgggctgttgttgtggctgcggcaccctttttggcctccatttgcttcagctgtcccatcagtgccgtgttcagtgccatcgccgcctccgtcgccactgcgaccatttcgcccacagagtcaatctccagcgagccgcccctggcctttttgagcagtgagaccatgccaatttgtgccgacgctttgtcattgtcatccgaggtggcattctgacgaaagagggaaaatgaaattactagtgaaatatatgaacgagcggggaagcctttgagggaaaaactatggggcgggccggctttgaaccggcatctctggctttccggaccagtgttctgccagctgaactaccgaccctgccctctccagctccccactttgctcgatcatataggatcaattgttgcctcaattgatccattaatcttcctctcggggaagcttcttcttctctatctcactagcatttaaaaagatagtttaaccaaagaagaaagatatttttagaattcgagccactttacaaaaaaaaaattagaaatcaatcataaaacttgaaaacattgctatcaaaatttcgatgattttaatgaataaataaaaggaaaagtgaccaaaatgattttaaaattgtttacaaatttttaaacatttttatttgtcatgtgtaatgaaaaataaccatcaatcctcgatcagtcaacgatatcgacgtcggcatcttgatcactttcttcattcgttttgtcttcctccgcttgctcccgttgttcctcctcccgcttaattagttggattaaaattttaaatccccttccatcaactcaccagcttcaattcgtcgagtctgccggtgtccagcagccaattcaagacgaaatgatgctccagctgttgtcgcatttgttcagagtccggcatcgtcttccaaagttgctcaagtcgcccccacacggaatgcagtgcctcatctcctgaaaaatcacaagttttaaaattgaacccccaaaaatgatatggtcccaccctgctcatccaaaaggcccaaaaatccgtgttggtgcgcaaacggaacaaagtggtgaagcagcaaatgggcttttgtcttttttgaaagaagcgttcgcaccattggttgttcgtcgagaaatgccttgaactggtaaactgccgtctccagtccatccaaatcacctggagacaatggctgggccttaaattaaaaaaattatttccacaaaaaaataaaaccaattactttggtgaaaatttggattttccccaaatgtaccattgtttggcaaattgttttcgcccattccgtttcgaaaagggcctccatttgatcggcatggacgaggattttgcggatgctgttccccgtcaagtcgcgctttctgaacgcttccctccttgtccctattcgtctgaagaattgctgagctatttcggcattttctcccgcttccaactccttgatcagagcatttccgaggccttggaagacgtggaatggggccaacagcatctgctcaaaattgatggacggcagaagaggtgcacaaacaatgcccatcgtcagagcccgagcctctgccgttgctttgtcgccgccttgggtcagctgttcgaattgaccggcctgtctctccagttcttgcacagagcgaagttggcattttgctgaactgatcagacgttctctgcggcagtcacacactggggatgggaatgctgtcattgccgaaccgcaatggccaatgatcgcccacagaaaacacaggtcaccgccaagaaacctggaaatttttcacaaaataaaaaaaacaaattttttttcaccatttcactttgcgcccgtcaattgcatcgatttgtccaatttgtttccacaacgatccgcagaaattcttcaaattttttcgagaatcttttgc

SEQ ID NO: 12482 - DNA, 1299 bp, Heterodera glycines
cgcgatccgcgatcgcggcaaattgaatccgcgatgcgcgatccgcgaccgcgggatttttctgtccgcgctccagccctgatgcatgcctaatttgaggctttttgcattcatcacatctctaacgataaaattttgagaaacaaaaacgattacctaatatgaaatttcaggaaaaatattacctacctatcttattttttgtttgtttgcttttttgaactaatgcgccgttcgattgaggacaaagagaacgacatgccaatgactgcgagcagtgccagcaacagaagcgcggccggattttcgcatggtgccattgttcgcattcagctcaccaattttctgtgtaaaattttaaattaaattaaatttatttttgcaaaattatttaatatatattgtttattgacaattattaagtccagtaaatttaaataaacaaataaattttattttgacgtatgattaaatggattatcatatgcagataaaaactgaactgatcagcgattgtttttaatacataattaaaaatgttatttatttattttccatgtttttcattagttatttagtcagtttaatttaaactttgaataaatgtttgggttttaagttctttaaattaaagttatttattttaattaattttaaataaggaattgcttaattctattttaattctttttaaaattaaaatcatttattttaattaattttaaattaggtaatttattaattctattttatttttttatttaattcattttaattttgaatgtttactttccgtagagataaaagtcctgcgcccacgcggccataaccaccagaaaaaacacagcagtaaagaagttgaacagcaccacatgttggccatcattcaagtcaaaatattgcctaaaattcgaaattggcgcagaaattacccatttttggctgtttggacgtcaaaatcattacaactcgtgtaactcttacattgtttttagattttttgaaaaaatttttgcataaaatttcgtttggaaaataaaaaattcgtgttgctattgagccaaagacctaggggataaaatagagttcactaatcatgaatttgatctcagattttcacttttttatgctttcatctattatataatttttgcatcaattttttagttctgccgaatttaggtttagcgttagaatttcatcaaaataaacttttaattcggaatatacgcacctaaaaaacacttgttcataacgaaaaattttttgcattttctgaaattgacaattcagcagacg

SEQ ID NO: 12483 - DNA, 1077 bp, Heterodera glycines
cttcagatccgccatcagtacatccgtttcgatccttctttccgtcagctgccgcagaacaaaatgcgaatcgaaccttccggcgtaatgtgcaaaagcgaccgtctcaaattgtttggaggccataatccagtcgataaatcctccaatggggtcctccatatttgctgccgaccaagtcagcatcctcggttcctcacaaatttgacattttccttcccctccgacgcatttgctgcacgtcaatgctgcgctgacgagatttggccggtgctctcctccctccaaggtcgtctcaaggtcataagccacaattctgtacgctttctgttgtcgaactttcaattttctgatgtaacatccccgctttgggtggtaaactttgcaacgccaacagaatttctccccacatgtgtgtttgttccttgtgttgtgtgtctctccacatttttcgcactttttgaactctttgcatgccatccttttgtgtccttcgaagcatgactcgttgtagaattttcggttacataccgcgcaataaatttccgcacattcatccacacaagggaacccaaaccccatcctacaacatttcttgcagcgttccttacattcgattcgatgtctttcctggcgattgtaggtcacttcgcagctgacgcaaaagtatcgaatacagaagaattgggtcacagatttaatcccatcccagtggtctccctctcttataacacacacttcgtttttgcagatttgttcccctttgtaaattattttaagacccgatttctaaaaaagaacaatataaataattttgtgggatttaataccgtttcaaaagcaacaatgcgaaacatttccgggaattccttgtcccaaaatttctggatgatatcaaggtgttgtagcccgaaagttttttcctccctgtttatccctgccttttccatcaattcgaatgccatttctcgttgcttcttcacagttttcactagatagcggaatttgtcttccgttatcccctttccaatcaaccggtaattgcgagagaattcaagggcgtaaaaaaggcctaaa

SEQ ID NO: 12484 - DNA, 3226 bp, Heterodera glycines
  unsure (1)..(3226): unsure at all n locations
aaaacgaagcgcatagagtccngaaagatgaaaatntgattgacaggtgagagggataacggtacgctagagtcaaattgnaatttggtcggcgacgaaatggaaaaggaagccgtcacattatttcactgctgcgtatttttttggctggcaccaatttttttggttggcacaaatttttttgactgggactgagtttatgatatgcttatatttttaaatttaattcgaagaaataattaatcatctcacgaaatccatatacaatatttattctaaaccgtatatttatttcttagcaaatatcttttcctttacgctagacatacgcccaatgactgtcaatcccgctgggtttacactaaatgattgtcctttccaataggctcacacccaacgacttcccttcccattgggcatacgcccaatggctgtcctttccaacgggcttacgcccaacgacttcagaattgacttactttgctttaacgatttattgaaataaatgtatcatttacaaaataattagaaatgtttcttcgctttgtagtaccgttaaaaaataagatgttgattgttataaagatcattttgcagaatttaaaaaaaatttcatttccattcggtatattttttcgaattatttttctaataataatttctcgttgtctccttttggcaaacaaaatttttcgcgcctttttgaggttgttctttcgggcaaggttcgcatttgttggtctggacatttctaaaacaaaaaaaaaggcaactcaaattgtaaaaaaaattaatttgggagcgttggtgacctcctttttatgggggcgagaacgattgcgtcggcttttcgatcagacacttgtcttgactaattcttgatcgtaaaatatacctttaatctgatcaccctccatgtctacaatgcgataagatggcggatttgatgatagtacgtttgaaattgcaaaaagttcttccgtgaaatttggataatacccttttccaaactttcctttgtcttttgtgatccgtacaatattcccgattttaaatttaggttttattattttctcttttttattgccatatatgttgttcaaaatttcactagcatttgtaaaattaacaaatgatggcttgacccctagtgtcctattcacactattgtttatatttgttattattttgtctattacatcgacccatcggagagtgttcttttgtgtaaaatatttataaagtcgttcttttattgtacgattcgccctctctactacccctgcatgtaaatctggactatacattacatgcttaagtatttgtttttcttcaaaatattttttcatttttcccgcttgaaactctaagccgctgtcgctatatatttttacgttatgctttttcaactggtcaaatatgcacaaatcacattgccaatctgtatgaagcccgctgggtatcgtcttgagtcttggaaatattttcttgattggtttatgaattgtataggttctttgtttttcaagaaacgtattaacgtcctctaatgttatattttggtctacttttcttgcttcttctaaaaccttcaaaattcccgcatagctagctagggattttagattgaaataaacttttgataatatttgatccattattttggttgtaagaaattgtttattggtatttataatcaactttcagactcttcacctttcatatgttttcttcccaaaccatcattgttcgaccatatgatgtcacaaaattttcacggtttcctcatttttcttattttttcacttttttaactttattatgacatttttttcacctgtttaacacatgttatgacattttttcacctgttctgatgccttttttcacctgctatgacaatgtttttcacacaattttgacttatttttgaacttcttatggctcttttcccgggtatgacctttttttcttatgatttttccctattttgccgattccccttgccactaaattttacctgttattatttttgatcatatgtggtcataattttttcactcatttcaatcattttacaattagtttattagtaaaaaacaattatgattccctccttttcaatcaatttaaacatcacaaatatacggctagaagggaaaaatgaagggaaatggttagtgccacggggtctaaagaggaaggaaaggggttatcgcagataaatttacaccgagatttgcggccatatactactcacgtctctcagctgccgcggtcgttgcattggttgaattgcctgaaaaagcatccggaaatatgagaaacgcacgaaaaacaagacccaacattaccggaacgttttctggtggatgatacggcacgtttggcggcggatcggcaaattgtggtacggcgtattcacgttgaatttgccgaacatgaattccttgaagaaacacccagagactgagaaaaagcaaccacaatttgatccaaattgatgtcacatttcgcggtggatggtgaatttgcggcatgtctctcagcggcaacggttgaggcatcggttggacacgaattacctgaaaaaatacattcggaatcaaattaccggaaaatttagtggccaattactgagcggaatttgggggagggggcagcaactaacgccgttttcaactgcatagaagaaaggatgaaaagtggtagcgtaggggaattgaaattgaatatgaaaaatctgaaataacggatgcggaagggggaggagaggggatgaggggtgtggggatttggggcgcccaatttggtgcggaatttttcagggacattcgaactgctcacgggtgccacgcatgcccattcgccaagccctcgtgttccaactgagcacgggtgtcgcttttctttgttttttcgtgcatatttttttactctttttctctaattctctcctctctcctatgtgaatgcgcatctctctgcccaggggggtcggaattaataaattttagctttatcgtattttttgttccaaaataatttttaataccatatttagacagttttgaaagttattctttacaatagagaatacgaagaaattttgaaaacttacaccctcaatttggaaaatttatgtccatattttggccattttttgtccatatttcgcgatttttggtccatattttgcgattttatatttcattacatggaccgt

SEQ ID NO: 12485 - DNA, 2134 bp, Heterodera glycines
tgttgaagcagtcgccgcttcgtcttctgctgttgtcgctgctgctccttcagttgctcatcagcgtcgcggcgagcgcgacgctcgcgtcgccattggtcatgatgcaacgcctgctgttgcagttgtacctgtacaaaaaaaaatccgcttaaaatttttaatgatttttgccccattttacctcagcatccatatttatgtattttgcgtcgcccatttgattggcgcccaattttttaagtgcccatttgattggcacccaattttaagtgcccatttgattggcttttaagtgcccatttgattggcacccaattttttaagtgcccatttgattggcacccaattttttaagtgcccatttgattggcacccaattttttaagtgcccatttgattggcacccaattttttaagtgcccatttgattggcacccaattttaagtgcccatttgattggcttttaagtgcccatttgattggcatcatgaaaaagctgatcaattctaaacagagtttcaaattgtgctcttatttctctgaatttttctcattataacaaatctcttttaaaaggtttaaatattttgaccgagtttttatgtcgaagttttgatttcttatgcgattattttgagaacaaaaaacctggcaactctatttagtgatcgattttttattataatttcaatatcattttatcacaatttaacgctgtttttcagcattggataaagttttttgtatcaagaaaaactcggatggaattatgcttaaattgaccgaaaaaagtcaattaatattatttgtgaaaatttttgagtagacaatttttctgatcaatttaggaatgtgatgaaaagtcctgaattttccggggtaaaaaatcgtcttttgcgaaatttttctaattcaatttttaaaatatattttcgcatttccaacaataaattttcgacaaaggcaccaatttacattagtttattattttttcacataactttgatgcttttggtctgtgttttgcacattttttgcgccaaaacatcgccatttagccgtccctaatggcgctcataagctgaataatttgcaaaattgcgtaaaattacttctataccaaaaaaagtgcgaaaattacttctataccaattgggcgtttttcagcctattaggaaatttcaaaaaaatttttttgccttctgtgggattcgagacttctcgagtggagactctagaactctcgagcataactcgtcgccattagagttttgacgggcccggtggggcgccggcaggcttttttaccgggcgccaggtcccgttttttgcaccaaaacccggtcccggtcattttgaccgggataaaatgggcttacattttgcattactgatcagaccactaaacaaaatttgctgattggaacagaaaaatttatgagggaggtctaagtacaaattctatcatgcttattgttagcattctttattgatgaaatactaattttcggttgttctttttaatttaactgttaacttctaaaatatgctctaagtgatccgtgattgtaaaaaaaatttttgaatgttgtgaggacggcgccggcggcggttcaatgggcggtggatgaaaatttatatgcgaatgtcgacattgtgctttttggcgataataatggcattgggtgggtaaaacaaacatttgaatattatttttgaatcattaatgatggattggaattcatttgatttgatgctctgttatctatttgaaataaattacttacacttgccgatttttatttaaattttatagatttttacttgaatttttccttaaatttcaaagtttttttgctataatggttaaacagtaattttctgttgctctatatttcgatatggtttaatttggcttacttttatataattttaagcgaatttaattgaattttcaatggcatcgcccgtcggaaaaaagaaaaaaattttcctccgcgcagataattgcttaattacatctgccacaattggtgaaaatcagcagaaatcgttgggttcatcatttgagacagcatttggaaaacatcaaatgaaaatggaaaagcgaaatttgcggaaaatgtgaga

SEQ ID NO: 12486 - DNA, 1472 bp, Heterodera glycines
gaattttatcatcctgatcacatgacagcgtcaaagagagattcctttatgagttggtgagagatcgagaaccgttctgcacacttccaattgcgtgaacaactcatcatgtactgtatgaatgatgtggcaattctgctcgaaagtgtgcgttcaatttcaccaaatcattgctgaaaatacgagaggagctggacccgtttaaaatatcatccacggcagctggtcttgcgttggccaccctccgccgctgctttgttgcaatgaacaagcttgttaatgcgccagaaggtggctacataagggggcggcgagcatctgctgaatcggcacgatacattcgttattatgaaatgacacattcgggagtacatgttcggtctacccaatggtcaattggtgaggctaacgtcgaagacactgaaaaaaaatccccccccccccccgacgaaatttctttgtcgggctctcggggagggagtgggtttctttttgctcttaactcaaaattcttaacagattttcacctaaatctgcgtatttttgggaaaatttagcgtaaattaaaaaaaaaatttgagtggggaaggtcttggacggcggggtacccaccaattaggaaaatcgaaaatttaaacaaatttgcaccctttcagctggctttgcaacgacattttgatggacattctcccattttttcgccatcctcaactctggctcaaattggcactgatttcgtcacgtttcggtgctttggtggacgcgcatttcaatggcaaaacgacgcaatttaaatttatgagtcgtattacaatttgcaaggaggacaaaggaccaaaagcaaaacttattgtacatggtttcaccaaatatttggaatttccgttgcctttgccatttggaaaaaacattttgtttatgcaaattttttacgcttttatttgtctgattttgtgctctatttataaatcaaaaataattaatttcaatggataatattttaaaagatgcaaacaaaatgactcatccacagattttatcggtatttaaaaatgttcaatacccaaattaatatgaatttcttggctttctgcatattttataaagttttcgtaattttttcagcctttttttacaattttttttaaattgttaattaaatttttaaggtgaaataatatattttttaatataattatttaatgggaccacctgttgaaaaaaagaaaaaaatttcttcttccgccgacgaccagcagcagcaaaagtgccaaatgcgaagtgttcggttggccatggcaataaataataataataattactagaaagcgaaccggaccgtatccgttaccggatttttctggatcgggaatccggtccggcgacattttgggaaaatagggattgaccggattacctaaattgaccggattttgagagaccgggtccggaatccggtcatttttgaaaat

SEQ ID NO: 12487 - DNA, 1715 bp, Heterodera glycines
cttccgttttgtaacttttcctattttttctgtttcctttcgtttatctctttttattcaatgatcagatcctgcctgttctctatcattaaaataattttctttaaatttattgaagacagttgtcagaggctttttcaggagatatagtatttatcgcaggatcttacttttttatattcatttgtagtttttaataataataatagcacattaattctttatctaatttttttttcacgtcttcctaattaaacccaaaataactgcaaaattcattatctaatactgtatatgtatctaaaattccttctcatttttttattgtttcgttcttccggttccgattcatctcaattcttcctttcactatcattcgaccataattgaaaaagaattttatttcactttttacaacaaatgaataaaagacacaattcacacgtcatgcgaaaaggagaatcatcaaattggaaaaatcgtggttcattggtagaatttatccttttcaacacaatggggaatcggaaatgtcgtcgattgcactccaaatcggatgagtgtctgtaaatgacaatatatgaaaaaggcaaaaactatgtacccataaaattttgtattttcgttttggaggtcgaattcgaggaaatttttaaaaattttcatttcaagggggattcttggaattttctgagtcccaaaattctgtattttaaattttttgcttttaaatcgctgtttttatggcaatgttttttcaaaaaacttttttgaaacattgggagagggcgggtccccgcggtgccgataggcgccgccggaaaaaattttgagtgagatttgctaacagaatttgtcaaaaaatgtttacatttacagcaataatcaatttattttaaaatttaaaacacacctcttttgccgtcggctgcagccaatagtctttggatggtcggcgactcagcagcgaataaaaaatggctgcagcgatggccagagccagcttgaacagcgacgtcgaatccgcatcgcctccaatcggtgttcttcgtttggctttgccgttgtcgtcgtcgtcggtgccggtgtagttgatgttgaggatgccgtcgatgttgtggacgtgcatcctttacaccgcactgtgccgaacggtgtcgggtccagcacatcaagcgggctcttgctggtttctttttcagcagaagcagtgaccagcagcgcgatggcgagcgcaaccccgatgatcagcagcagcacaacgatgatcagcacaagcgtgctctttttaaacataaatggcttcattctggaaatcgaaaacagttaggaaagttgtgaggaggcgaagataggcgccgccagggaaaatttgagttttggcaaatactctgtcttaaaatgaaaattttttatggaaacggataggtgaatttgtaatttttgttagcatgcataagaagggggtctgtgtgaaaaatttgttatggaaaattagaataagaaaaaattcttgaaaaacttaacttaaatattcttttaaagtttaaattttatgttcttcatattgacagttaattattttttgctcttcatacattattcaatatgtattttcatcaatatagtattttggcgtctcattatttatttcaaattttcggaaataacacaaaatcgcaccaaaataatgccagaacggtctacctcagttg

SEQ ID NO: 12488 - DNA, 2587 bp, Heterodera glycines
  unsure (1)..(2587): unsure at all n locations
ttgcagatctcaaaaaaatataaatctgcttaaatatgagaatataantacatatantcagagaagagcgattttacatttcaaattaaatatttctgcntcaaagttaacattgaanttcggtgttgtgtatttacccttcacggcacanctacattggcagggttgaatggcgggccgagtatttntaaaaaaagttttcattgtttacacgagggcttactggaaaatgtcattgtaagataaagttcttcttctttcaagttcttccgcaaacgtaatcaaaataaattaaataatttaaaattttatcgtgtttatatgaactactgtaccccttccaatcaataattctctcaaaatactgcaccaaaatgagttaagataaaattaatgttaattagcaattttaccattcttaatcactgacgcatttcctctgtgtcaaaattctcccgaaatgtccttcgtgcctttgcaattagttgggatatcaccaattgtacattgggtgttgttctgtagagaacagtgacaaaaatgctgctaaggcatgggaattaacatcaattgatgttactaaattatattacttactattttaaaattttcttattgaactacccatgcttgagccatgttgttcatttcgtctcggtcggttttaaggtcctcaggaggagtgccttgaccgaaaaacattatctcggcctcctcaccagctgttttaaaaaataaattacttccatcactattttacttataaaaaaagaatcttctcactatggatgtcaaaaatatgtacaaaaaggttcaaaatatatacatatatgtacaaaaaaccaaaatatttttactaaataagtaaaatattttttaaattgttattttcttttgttaatatgcttataatcaatcattttttagtattttaaaaattatttgtgcaaaaaaatgaaaatatgtcagaaaaaagtccataatatacaccaaatatgcaaaaaatcacgaaatatataaaagtcccggtttttgttcacaagccaaaataagaaagtgtttttcctactatttagagcatggagaagccagaaaaaatatgtatttatataaatttagattccaacttctcaccaattgacgcgatgtgacgcgaactttagatcaccaaatgaacagaataaaagaaaatgatgttcaataccaattatttttattcaaaatttttcttaatgagggtgggctttatatttttacattaaattgttttacaatttaattaatataaatttttattttcacctcctatgatcagttttaacaatttgaggaaaattagcaaatcgttaagtgcatcggagccaaaaatcagacttttatgatttttttgatgtgattttttcaaaaactttatggaacaatgtggaggccggcggtgccgataggcgccgccgggaaaaattttggatgcgaattgttaacagattttgtccaaaaaaaccaaaattttttaaaatttaaagtgacttacgcaggcacaatgggagtgaaaatggtcaatgccaattgggaatcgtttgaaattacgcaaaaagcgcggccaaagagagtcgtcggattcgaacccattacaatacggagaatgaagctaatgattttttgctggttgtaactcatccacagtcaactcatccacatttctctcggataaacattagttaaatgggttcaaattggcgatgaaaaataaaataaattgataaaatccggtatatcttgagtctctaatgaatttgctgagttttataaatagtcaatgctttagcaatatacgcaacaaaaaaaaatttatttttctaaaacgttctaatctgggacaggtttcgaaattgagccaaagcgacccggatgacccttaaaataatttactcaaaatttaaaaaaaaaatttcgggaccaatgttctttagcttttccaccgtttgcgacatttcgtgccgtcatttctcaacgactgtccatcgcttcggcttatcaatgtctatgactatggtttcttcaccgaatttccatgcgatgacagtgccgccgcatcggatggacaagcgttggccaaatggcttttcactccgcttaaaaaaatgtgccaaaggtgttcaaatgctggttgcattgggatggcgggcatttcgcttcaaggattgaagacttcaaagcggtgcttattgtttgactgatttggcacttttacgggctttgggattttctgacaaaaatattttggaaggcattcaaattgtgaagttttaatgttttttttgatcatttcaattcgggaatgcttttcacattttttccttcattttaggcatttaccaatgcttcatctcctgtcaatttcatcgccatcattcgctttccgacgccttttgctgactccgtcatgccctttgatctaaccaacgaattcactcatgaacaattgaccttgaaaagaatgatggtcgatataggccgttttcttctgattcgttgtccaattgagcgaaatgaaagcagatggacaaaatgggaagaagaagcgatt

SEQ ID NO: 12489 - DNA, 1991 bp, Heterodera glycines
aaatttaaaataataatgtaaatttttagtttaaaacatttagtttatttattttttattgtcagcttttcctcctctttttcttctggtggcatttctccccaaataattcccaaatcgccgctttatcatctttgctcagtttgaactcttccgtttgttcatccaaaagtgccaaattttgtctgtataaatggtaatgttagctaatccctaatgagactctctctctccctctctctctctctctctttgtctctggtctctctctctttttctcttttctctctctctatctttctcactctatctcttgcccccccccttttctgcttacctgtaataactgttcatcaccgagtgccggtaggtcgaatgccgaaggccaagtgcatggccaatctcgtgcagtgccacataccgcaggtccaatgccatcggtgccatttgtcccctcggctgatgcttttgtcgtcctccaccaatgccattgctcctcccccgttctcctgtttttccgatcacaaatgatgattcatccgcttgttccttttgcctttggcccatttacctgtctccgccccttggccaatttgccatcgttcgctggcgtcgaaatggacaatgcccagcggtgggtaggccgaatgggccaccagtccgccagtgccatcgaaactttcgctgtcgccgtgcccaaattcggcaaagaaaatatcaatgtcggcaactcggcgcgagtttagcggcaaatcgcgcgaagccggcgacgcatcgatcagacggagggacggcgactgcgcggagaaagcggcggcaacttcccattttctgatcgcttctccgatcactattcttgatgagttagaaattacacagcagcagaaacaagaaaaatacacaaatgcattggctttttatgaccggaatttcctcctctttaacactaatgagtcaaaacccttttttagcgggggcccaaggggttgtgccacatttgcgccccaatgaaaaagaaaaaaaaattttctgctttggccattgtttaaatgcctcacttaaatgataggaaattaattctgtttccagactcaaccacgtgaaggtagcagacattgagtccacacaaatacatcacaaattctaatgaaaaatctatttatataaaataatttaaatactcaaaaatatttgctataatacatttagttggacaaacacaatactttattttttgtgttttcattttatttttttatattttctttgtttttgtattattttcttgttttttattatttcttgtttttttaaaagatgctcaatcgagccaatgatcaattccttttgtggtaagtcgaaatgacagaaccccccccccccccctatcaacgtaaattaataattacttgacaatttttaaaattcaaatttaagtttcatattaaaaattaaagatgaagaggaataccaaagaaataaaatgagaccacatgaaattgaccagacacgtccagtagctgaagtaccccgcaccaaaaaatatttggaaaatgatcgagccatcaaaaatctgattgaacaatttgatcagtttggtcctgatcagcgtgatgatcaaagatggattacacatttacacgcactgtcatttcgacttaccacaaaaggaattgatcattggctcgattgagcatctttttaaaaaaacaagaaataataaaaaacaagaaaataaaaaaaacaagaaaataatacaaaaacaaagaaaatataaaaaataaatgtattgtggtttgtccaactaaatatattatagcaaatatttttgagtatttaaattattttatataaatatggaggcgcaaatgtggaggcgcaaatgtggaggcgcaaatgtggcacaacccaatcatttacatttacatatttttaaacccacaaatttaaaaaatttatatccataaattaaaatataaatagtcaattat

SEQ ID NO: 12490 - DNA, 2016 bp, Heterodera glycines
  unsure (1)..(2016): unsure at all n locations
ccgacatttgataccccccgtttttttaaatgttcggggatatccttagaattaaaacaattagactcacgccgccatatccgccccctgtatcaatcccccccgtatcgtccccccccctcccccaaaattttttaaaacaacgaaatttttaaaaagaatttttaaattttaataaaaatttttgaaaattaaaaaaaaatttagtggggggggagaacagcggtggaatggtaaacgaactgttcgcttcggcacacacaaatcaatttgtcatagaaagattaattttgatggaattgcattcgaataaaaaatttttttgtttggaacttttacgttttaattttggatcatcgacgtggctatccgcgacgcgcaccgccttcacttggctcaatggacagctgatccggattggcttcaaatacacacggcacccattctgcactgccatgatcagggacgtgctgcttgggcagcgttggaagctgtccaatggaccaatggcactggggtaggaaaatttttataaagctaagctttcaaaataatttttgctcaaattttttggaatttttttctatctttcctaagcatgccaaattttacaggaggtcattctgagaaaatgactattacactcatccaaaaaagtcttattccaaacattaaaaatttattcgtttgtttgacgattttcgcaaaaaataaaaaataaacaaacagcttttccttattattagcttaattaagccatatttcttcaaaagtgaacattatttctcattttgtgttttattgcattttctaaattctcattgataaatcaaaaatgtaattatacaaattaaagtaattaaaattatttaaaaatgaatgataacatatcaaaagttgtaataaaatatttggattggtaattaattggttcatttttggccaattaagttggacgttgcttttgggcccgcctgcgattatgtgttggccactgtcacgcgcattctcagtttctatcgagtgccaattttcactaatgccggcttcaggtcgcttcttcttttatttttgactttaatgaaccaccgttttttcagtgaatttttcattgaacagaagagtacagtactgctgaccagggttggaccacttcaggtgcaatcaaaatgtgattactgtatgaaaatcataaactttaattatatcacctaaatcacctactgctaaagtatgtatatgcaaaaagatgacgataaatttaaataataataataagaaaataaccctgctttttgtcatgttgttaggctggcattcatgaaaaatcacctgccaagaatattttttcgacaaatgcataaatataattggtaacacttgtaattcaaaaattttttgtttttttaccatttttcaattttaacacttttttattcaatccatatattttatacaatacatatttttaatatgtaaatttgtcatggttatttatttttttaatttttataatttttatgggaaaacctttttatttattttgtaaaataaaataaaattcaatatgtttaatttttcttccaggatcacatcagcgaattgttggaacggttgttccgtcagtttggttggctccgttcgcgcatgttctacgaaaaacagttttgggagacggaactgcacgaggccggtttctgcaaactgttgatgaatgtaagagaggaaaaatttaatttttaaaaatttgaaaaaattatttttaatgtttgaaaaaaacaacgaaaaacaacgaaaatcgtttcaataacaacaacaacaacaaaaaaattggtgtaaaaatttcataaattaaatttaaaaaaggggaaccaaacaccacgtagggcttattttttgaagaaaattcttaaacttggttagacttatgatttaattgatagtgctggaaatatgtattccagtaatgagcaaaaaaggcaaangtattagcagaaacatttcaaaaatcatttt

SEQ ID NO: 12491 - DNA, 1303 bp, Heterodera glycines
tttttatcgaaagaataacacatgaattaattaaattcattcgcaaaaaaagtggtcaatttaatttttattttatcgaatcatcaaatcaattttaacggctacgtgtgtccattctcgaatggccggatgtggaatttgttacaatgcctaaagaatattaatattgattaaacattattttaaataaaaaaaatttttgggatataacagacaaaatctggatttgcaaaatccgcaatttctaggcctaagccaaggcccaggtttgtctggatttgtcaagaatatccaggtcaaggtcaaatgaaaaaatccagctttagtttaggaaagataggaaagaaaatctggatttctgtatgagaatttgtttattctataaaatgattatttattaattggttggaaacccttcaactaattaattaatcaattaaattaataattcacaaataatacttcaataatcaccgtttgcgcccgcagcagccgcctgcgcagcagcgagttgcgcttgcgctgctaattgtgccgcataattttgtgcattcgttacagtcgtcggcgcaacagacgaagtgtttggttgatgtaacactaaaaatatttaatttttttaagttaataaattttggaataatttctagttcataaatctcgaaaatttactggagacaatttcaaaataatgtgtttgaaaaataatcaaatttcaaattatttcaaataaaagtgtttttaaattataaaataattaaattaaattcgattggggcgtctcaaaattgttacatttatcagggatttgaagaaatttttttgctgtttccttggtactgagtcggcaaattaattgtaaatcaaaaaaattccggtctacctcagttgggcgcgcacggtttggcgctcacggtttggcgctcacgtttgggctacaaatattattgtcagctctgaattaccttggtcagatgttcactttgttcgtcctcctcctcaatttcgtctccaaatgacaaaagcgaagtgttccgtttggtcgctgccattgcgacatttgttgcgtttttctcccttttggacctttttctctcatcgtcctttgtcgctttcctcggattaatgtcatcaaatggattcaccaaaactttggcgctcgtaattttatgtgggtaaattggacgctcatttttgtcaacttcgtattccttaagcttcaaaaaattaaaaattgtgtttccgaccccctaaaataaaagccagttggtttaccttgtaattttggaattggccactttcc

SEQ ID NO: 12492 - DNA, 4023 bp, Heterodera glycines
tttattcattttaaatcaaataataaaaattgatgtctttgttccacttgttgtgccgcaactgcagccagcgtgttcggctgagcctgggacacgacggccgcaagctgtacagcagccaatgggttcattgttgcagcggctgcaaactgtggtccaagtgggctgttctgcaggtacagatgagacccaagccttaaaaattcggcaatcgattttttcgaattttgaaatttggcatttttttttgtgccacaaaagcgcttcagccctcaaaaaagggtgcacacaattaggcacacacccagcaaagtttcgcgcactaggcaaatgcgggagaaaaaatttcgaactcttggtatttcgacccttggcattttcgatcgcggaataggacaaaacgtcgacggacaaaatgccgccgaacgaatttttggaccaaaaccctttttaattttcaacaaaattaaatattcttggtattgttcgtacataagctcatgaaaaaatctctattaacatggaaaaatttaaaaaaaaatggtcttgtacaaaaagagtgaaggccaacaagtataaactgtttggccataggatgtaaaaatttccaagaattttttttaattctttaaattttcaattcttggtatttattgttcggtaaccccgaatttgctgtttttagcctgcagaagttcacaaacaattttttttttaccaattttatagaatttatgaaagaaaaaatccaatttaaatgtgttttccaaaagacacacaaaaatttctgaactgaagttgaaaattcgaacattcacttttagcccaatgcgttacaatatcaatttgatcagtaattgtaatactacagtagcagaaaccatcaccattcacaaccacttttgtttgaacaatagaaaacgacatgacacgcgcctttgggtgtaagtgtcaaaaaacaacaactaattttatggtctaatgaattcaataaaaatatttaaaataaattactaaaaattgaaaaaagcgcataaaaatgaattcagtcagtgagtggcacacggcaaatgatttttcagctcataacaacatcctcataattttcaaatttcaacatatattgtgataaatattctagaccaggccatgcacagaaatgcgtgggattgctggcatttcggggccaaataaagaaaaaaaaagtctaaaaattaaaaaaaaatactagaaattgaatttaaaaattgaatttaaaaataattttaaacaaaaaaagtgctcataaatactagagctctctctacctcgccctggatccaagactaggttttaattatttaaatttgtggtttaagaagatcttgaacataaaataagtgacgaattcatgattatgaaattgaacaaaaaaacttttagtgttatatatgtagctaaaaattttaagagaaagaaaaagtttaaaaattttttggcaattaaaatcgtgatcagcctccgaggaaaatcttatgaaagattgtggatttgatgagcctcgagaaaaattttatgaaagatttgtggatttgatgagcctcgagaaaaattttgtgcatttaaaatttctctaggccagcaagcccaacgccactcaaacattcatgccaaaaaattcattcacgccactttaaactacctccatcaatagcattttttgatttgatagcccatcaaattctgaagaaaatatattttttaaaattttccaaaaaatttttttatcacaacaaatcaaccaaaaatgcgcgacaacctacccaaaacgtccactaagctgttgctgttgttgttgttgctgctgaagttgaatgatcgcttggatttgggcggcctaaaatttacaaagaaaaattaattaattaattaattgatcaattaaaattaaatcggattttaaagggatatggacggccaaggacgtccgaattaatacttatataaatttcgagaaagaaaataaaaaatttcttaacactttttagagtccgacatttgaaaaaacttgtaacaaggacatgggttccattttgatcagagccaggattttctgtgcacaaaaattcaggaaaattgcaggcaggtccaggaaaaatccaggttgtccaaatggattgggcctgacccagaaaaaactcaggttgccaaaaaattgtctagacctcttgacctggactcaggaaaaatccaggttgccaaaaaaatagcctggatgtgtccaataaaaaaaatcctgaaactttaataatttctatggaaatttaaatataaaaataaaataggaaaataaaaaaatttttaaaaaattattgaatttaaaattatcaaagtgtgacctgcagttgtgggagttggtttatcgtggtggacaaggcggccaggtgcgcattgtttcgcggctttgctcccaaatatgccaaattcacatttgctttacgtccatcgatgatcgggtttgggtctctaaaaaaaattaaaaaaaaaattttaataaataaaaactctttaaaaaataaaaaaattaaataaaaattttttttaataattaaaaaaatattttttggctctgacctgcatgctttttccgcgtcacaacgatccttcatcgtcacaaagccataaccgcgacttttctgcgtttgtcgatccgtaatgacaacagccttttggaaatttaattttattattcaaaaaattttttttaaataaaaatttggctgttccaaaaacgacgccaaaaaaaataatgagaatttagttttagattttgaaatttattaaaaatcagaagttttttttaaccaaaatagataaattgaataaaaattgtcgtctgatttaattagaacaacattttttttttaatttgtacggctgtgtcgaaaagcgacggcaagaaaaaactgaaaatttttctatcagattttgaaatttagtaaaattagaaactttttgaaatttaattacttaaattcaataaatattttcgatagaatacttcttcgatttcgccaaattgcttaaaatattcatgcaatgtctcgtcagtcgtatggtatggcaatccgccgacaaaaatttttgtttgggttgtatcacggcttccttaaatggtaaatgatttttgtataaataaattataagttttccaaattcatgtaaaaatgccaaaatatttagagaaaaactttcttagggatgaattttagaaaaacttccattttagtttttacggctgcaaattatatcgaaaaaaattcgcaaaatttataagatatgtaaaataattcccaaatatataaactatttaataaattttttttacaaaattactataaattatcagaacctcaaaacatgaaaagatgtcaaaaaaattgcgaattttggattttctgggacaaattactttaaaaaatcttcaaaaatagcaaaatatgtacatatttaatatgtattaaaaagcgaaaatatttatatttgttctcaaatatcaattaaaatattaattttttatttaaaaaatatttgccgaaatttcgcccataaaacaactatattttagcataaaatgttttaattttatttaaaataaaataaattgtttaatcgcacaaatgccacttttttccgttgccgccgtttcagtgcccgtcgccatgggcgtggtaagcgattgatgggccgccaattctgccaaaatgttggggtcatccaatgcggctaattggtggttcagcggctcagcgggcagcatttcctaggcaattatcacaattatcgttaaagtcaatcgtttaaatatcctatgcatttttctatcgaatttttgccatattttaaatgcttggaatgtgacattgggaattgcaaaatgaaatataaggaaaagaatgttggaattcggggaataaatttaaggtcaaaaaatgtagaaaatccacggatgtaaatttaaggagaaaaaggacacaaaaacga

SEQ ID NO: 12493 - DNA, 1786 bp, Heterodera glycines
ccacaactcttttttaaagaatttttttatgaatataaatttaaaacagattttcatttattcattttttgaaaataatttttttttattaaaaaaaccttttcaaggagtcgaaaattaaatgcagttggctgtataaaaatgacaaaatatttatgtggttttaataaaattaataatataaatattttaagggtatttaaactattaaaatcaattaaattatttttagatttatacactccaaccttttcatctgctcgactgactcctgaagcatttaaaaagtccacaagttgctcaagtgcaaaaggaatttgcaatggatttaatgcgtaaaattttataaatttttcttaatttaacgcatttttattatgaatttgtaatttatatatttatttgcatacgagaagttatgtttttttattcaaaaaaaaaaaaattaaaacaaaattgaaaaattgaaaaaacaaaaggttgtcaaaatttaatatttttaaatacaaagcttttattttattaaaaaaggcataaaaattaattttcaaaaaataaaataaatttcttcaatttcacagggaatcagctgttttgttggaaatttattatgaacaaatgtcgcatgaagtgttgacggaaagtgagtcgtacatggtgagaaaattaattaggtaaattaatttaaacaaaaaataatttgcatataattaatttaattaattaaatttaatattttatatgtcttcagcttgtcaattttgtgtctgatgttggtggacaggctggactttggctgggcgcaagcattttaactctttttgaggtcttttaaggataattatttgctattaaataaaataattttccttattcattacttatttattcatttaaattattctttattttattaatttaattgattctattttttatagtaattaaatttaatgattggccaaataacataattattatgcgaccttaatgagtctaaattaatttttctttttatacttaatttaggtcatttaattgcttttttagtgagaaacaattcataattattcacaatatggttaattactcaattaaataataaaccaattaatcaaaggtggtcgtttttgtgctacgaattttgaccattttttgtcgccgccgttttcgtcgtgacgtcaccgtggctgattcatcgtcaggccaagaaagcagtgaaattgtccataaaaagggtccctcaatagtggaatcacgccgtaaagcttttaaaaaaatataattaataataattattattattttatttaattcaattaaactatgcacttatcatttagagtgattttttaaattttaatttcgtttaaaagtctaattaacgaacttttaaaaaattaagacattttacaggttcaaagacactcagtcagcgtttgaagaaagcggcaaaacaacgtttgcgcaaagtttcctcaattccatcggttggcgcggttactgtaggttcacctccgacaatgaaggatatggtaaaaaccaaaaattattatataattagtagagcgagctttttcgaaagttatattattggattatggggaatttcgatgattttctgaaattttcaaatttttcttctatttttaaatttgaaaatatgggaataaaaaatatatatatttttgaaagcttttaatttaatttaccttaggcatacatatttcagagaaaggcctccaaattgtgccaccattcgaccaccgaatttttcatcggaagt

SEQ ID NO: 12494 - DNA, 993 bp, Heterodera glycines
ttggctgtgtgtggttgaactttttctgctgttggaaaggcaaaaaaaaaagcgaatatgaaatggatgtgacgatgatatgacaaccatatgatgacaaataaatacaaaaatgtggcggtggtgcgcaaagggaagagaaaagcgcatcaaatgaaggcaaaagtaaatttaaatgacgacgacgacgacgataatgatgatgatgatgaaaattaaaataggattttgtgtattttgtgttgcatagatggaagccaatgcgaaaaacaaacaaaaaaattttttcaggggaattggaatttctgggcatcaaagcgcggaattccgacatttttgggttcggaccgcccaaattttttcgggtctctgaacttccatccctgctggtatgtgtgtgtatgtcatcaatgtttactccctagacatacaatataacagatcagatatactgtacatccattacacacagtatataaataaatacaatcaataacaattttaaaaaaacatattttgaacaacaatgtaattaagcattattgtaaatgatcaattgatcaaattatggtgcaattggaatcggggacggtgtactgttgctgttgtttgaggatgggtttactgtaggtgtcgatgttggcgcggtggtgccaaagttaactgctcctcctccgcctccatttgccaatgccctcgttgttgtttctccgccgcgcgttggctcagcgattcggcttttcgggtccgcaccacggacgggccagcaaggctaaatgggggaaagagagggatttttagacaaaattttttttttttaattcaattcaaaaagagagcagttaagatagagcatttattttattcataattggagatggattattatattttttgaaataattcttgatggatttggttttgactatgaaaatgtgccaaaaataattttttgtccaagcaatgtgtcagtagtcaaaaaaccgactattt

SEQ ID NO: 12495 - DNA, 1886 bp, Heterodera glycines
gataatgatgatgatgatgaaaattaaaataggattttgtgtattttgtgttgcatagatgggagccaatgcgaaaaacaaacaaaaaatttttttcaggggaaatggatttctgggcatcaagcgcgggaattccgacatttttgggttcggaccgcccaaatttttccgggtctctgaacttccatccctgctggtatgtgtgtgtatgtcatcaatgtttactccctagacatacaatataacagatcagatatactgtacatccattacacacagtatataaataaatacaatcaataacaattaaaaaaaaacatattttgaacaacaatgtaattaagcattattgtaaatgatcaattgatcaaattatggtgcaattggaatcggggacggtgtactgttgctgttgtttgaggatgggtttactgtaggtgtcgatgttggcgcggtggtgccaaagttcactgctcctcctccgcctccatttgccaatgccctcgttgttgttgttgttgcggcactttcggtgccattgtttctccgccgcgcgttggctcagcgattcggcttttcgggtccgcaccacggacgggccagcaaggctaaatgcggggaaagagagggatttttagacaaaattttttttattttaattcaattcaaaaagagagcagttaagatagagcatttattttattcataattggagatggattattatattttttgaaataattcttgatggatttggttttgactatgaaaatgtgccaaaaataattttttgtccaagcaatgtgtcagtagtcaaaaaaccgactatttttgcctttttggggtcaaattttcaaaaaaaaaaaaagataaacagagggtccgatgatgccattaagctcccatggaaattttaaaaaataataattttaatgcaatttgttaagaaaattgtttgtttaaatttccaaaaaagtttccttacagagtttgggtttttcagagattcatcatgacaccattttatgagtgaatatttttagggcgaaaaaatttaattaaattttttgtgtcaattgaaaattaaaaacaaaatcacctcaccatctgaatgttgttgttgttgtgccaaatagcacgtgagcacctgaaattttgccaatttattgcaaaaaattttacacggaaactcatcaaattattagggaccaaaaaaaaatgttttcaatttaaatttaaattttgccaatgctggaaggaatttcctaaaaaaataaatataattttataaagtaaaactcaaatgtataaataaaataagtagggctgctaattttatgtaaatacatgtttttttcctggattcttcatagcctaattagtaagaaaaacactttcttttttgtgtttgcgaacaaaagttgggacttttatttacatatttttacatatttcgggatttttctacatattacatatgtacatatttttatacatattttggacttgttcgtacatatttcgcaatttttcgtacatattttcatttttaaacatattttgaggatttttgagaatttatagaaattttttgtgaataattttttttaaatgtatccctaaaaaatcgaataaaagatatatcaaaaattaattttttaaatactaaaatgtgattctaagcttattttggtcatttttatggcattttgtgcctattttactttttacgaagaatttttttccaaaaaataaccattaaattttttttttacatattttcgtacatatttgaggatttttgtacatatttcatacagattttaacattttttatacatattttatttacataattcgcaaatattcttacataaaattagcag

SEQ ID NO: 12496 - DNA, 1987 bp, Heterodera glycines
  unsure (1)..(1987): unsure at all n locations
tgcatnntttttgtggccccaatcaacttaaatgaaaaaatgttaattaatatttaaaaaaactgtcgaataaaatttaaaaagttttaagaattttcttcattttaaatgaaaaaattgtcgaatttaaaaatggtttaagaaataaatacaaattaaaaattttaaatcaaaaaattgccgattaaaattaaaaagaaatttgagaatttcctttaatataaaatttaaatacgaattaaaattttaaaatggaaaaaaagtgtcggttaaaataaaaaacaattttttttttaaattttctttattttcaaatttaaatacaccttcatttgaaaaattgcccaatttttgggactcatttccaacaatttggtcctcataaatcaaattcgcaaggccaacatttatccgatcttctccagtgctgaaatttcccataaatcggtcaaatgattcgaaaattattcgaaaaaaattgtgcgttggattttgttgagaaacaattaacaaatcatatcgttcacccggatgaattagcactgaatcaaactaaaataaatgttaaatttttaaaggaatttaattttaaaaaaataaaaaaataaaaatgcacgtaaattttataaaatatttaatttttaaaattttaaataaattacaataaatttaaatcttatttgttatttttataataatttacccgttttggcttgacatacgaaccatcaactgcaacaacccaaaattcatgttcttcaatccacacataaaatgctataaaattgtttttatttttttattttacataataatttttcaaaaatacattgctcaaagcctccgtttatgagtcgtaaaagcaaattttcatctaataaaaaaataaaattaaaattttcatagtattagggataatttttccgtttttctcctcctttacctaaatatttttttttttaataagcttcgttttggttttctgtaatgaactcaagccagcaagaatgcaaaattcataggaatatataatgaaaaacccggaatttttcaggagttgggaaaacggaaatttaagatttatttatttcatttttacccctttttatggcaaagtttggcaatggtaaacgagacgggatcagtttcaaatcgtcttggctatgccaacctttttgattgactaacacagaaaattggcgcagaaatcccaaataagggccatgtgcctgaggtgggcccgcctaaaaactaaaaatttgattatgattttttgtttttgttttggatatataggagtttatatttaaaattctctcctttaacagggcaaaaaaaaaatttatgaaaaaaatactctttggttaaaaaattatgtcagcttaatttgtaaaagaattttagttcaaaaaactataaattttcgagaaaaaagtccagattcttttatggttaaaaattataagttttcgagaaaataggccttttatggttactgcgcaaacatgccgcgcttaaattaaatctaatttcaaatcatatttaatgtttttaatacaggaataaatttttaaaaagtaaaaatttataaaaaaaaactttccggttgaagaatttgtctacttattttttttaaagaatacaagctcaaaaatcgaaaaaactttcaagaaagtaggcatttacgtttgccgctaaaaacatgacatttttaattaaatcgaacatatttttaatataattttattttagtaatatttttaaaaataagtattacagtttctggctgaatacattcacccgaatcaatgcgatgaccaagccatttaattcgttcatgaacaaaatcttgccaaacatcttccacagatttggggagaccaatcataaaatttatttccaaattttttttattaaattttgtttattttttatttttccacctgcaaaaattgccaaattttgtcgcccaaatttttattttgtc

SEQ ID NO: 12497 - DNA, 933 bp, Heterodera glycines
taaaaaaaaaaaaatttgggttgattttttaaaaaaatggaaaatcaaaattaaaattttcagaaaattgggtccactcaaattcatgaaaatatttaaatagggggttagtcgtaaaaaaacagaagaggatattgttgtcgggggctttattaatgttgttgcactgcccacggcaaaagacaacagcccaaagcaaacacaaaacaatacagcccaatgccgaagatgattatcgtttaattccaaataaaattagggcgaggacaatcaataggaaaactgcgacagcataaactaacaaccaacactccacaaaaatcacaaacaaaaatgaaacaaattaaataacaaaacgccaaatatattttaaaatcacaatattagcacatcctcgccctctaagaagcgatgtcctcagcgctttgggctcatcggtagtgcattcgggcgttgaaaggggcggcaagggtgtcagcagtggaccggttcggcataaagtcgcgttgcagggtcagacctgtaaaaacaacggacaaaacggaattccgacttttcatctggccttataaattcatcagcggtagcttcttgcgcacacctgcgatggccatttggaaaattcaggcttttaccgattttcaacaaattttcaagattggcggctgcgacatccgccaattcctccccggccttcggcgaaaaaattgtccccaattttccgaatgctttccgtcctttcaattcgtcggtgcgactcattgagcctttacttttccaaatttgtccacactttgacttttccttcgaaaatacgccggcgaacacaaccaacgcagcgaaaatagcattcaaaaaccattttggaatttccgccgatttttcctccattttccctctttttacactgcataacgacgacgaatttcgctg

SEQ ID NO: 12498 - DNA, 1062 bp, Heterodera glycines
  unsure (1)..(1062): unsure at all n locations
aatctaatttcaaatcatatttaatgtttttaacatctgaggaannntaaaaagaaaaannataaaaaaacctttcagggtgaagaatttgtatagttattttttttaaagaatacaagctcaaaaatcgaaaaaatttttcaaagaaagtagggatttacgtttgccgctaaaaacatgacatttttaattaaatcgaacatatttttaatataattttattttagtaatatttttaaaaataagtattacagtttctggctgaatacattcacccggaatcaattgcgatgaccaagccatttaattcgttcatgaacaaaatcttgccaaacatcttccacagattggggagaccaatcataaaattatttccaaatttttttaataaatttttttaatttttaattttccacctgcaaaattgccaaattttgtcgcccaatttttattttgtcaccaaattcggttgtgaattcaattctctcgtctggtctgatcacaacaaaacctcccagcagtcccattgagcgatcacccatcatatggcctattttttgaatttaaatttaatcgcattatggtaattgctcatccgatcagcaggttggtatagggaatcatttcagttagaagcaattttcgggccataaatttttcaaatttggcattatttgaaagctctatgttttagttattgattaatatagtgataagtgataaataaataactcaaaatctaacttagtgaccttaaaaaagtaattaagaattgcagttatttttttgacagtttagaaaaaaatttttttttggtattttttaaaatttagaaacgtcgaattgtcagtctttaaagtgggggccgcattggcgtcagaaaactctaaaattcaaacatctcaaaactacattcgttactaattagacatttaatgaattgattgccgccaattaatgaggccgacaacagtgtaacgatgcaagtattaatccaaaaatcttaccatgataaaaatggatgccagggttgtcggcaataaaattgtatgtataactaaa

SEQ ID NO: 12499 - DNA, 2900 bp, Heterodera glycines
  unsure (1)..(2900): unsure at all n locations
gaggcttggaattttttttttttttagaaaacctttcaatttaccccctcacagcagacattttttgatttgggttttagaaaaaaatttacgggcccccaattgcacgaaaaaatgagaaatccgtcccctgggactcagtcgtccgcgctgaattttnttctatagttttcccagatgcgcctcaaaaagttgtaagacccttccaccactttcagggcgctcccggccttcggccgggagaaaatggttttagcaacgaaactccttgtcaatataacatatatagtaactagcgggtgcgtgaaccgtcggatctgggcctgggataaagcgcttcgcgcttcttgagcttcgctacctaggctgtgaagcgattcaaattgatagaagatgttagggataatttatcggaattttaaaaaattatcagcgatttttaggccgcttcgcggccttaaagggcggattcgagcccgttgtaagaggtaaaacagtgattagaagaggtacaacagagattaggagaggtacaacagagattataagagacctttctcgaagtaggactcgaaaattgaaagaatggaaaaatttaaaatgttattctaaataaaattttcaaaatttaattaatttttggcttggaaattcagatttaaacagagggttcggaattagattatgagacgcatccgaacaattttttagtttcaaaaatacgtgcaaaaaaaactcaaaaataaatttgggcaaaattcataattttgccaaaataatgaaaaccttttccaaatataatttttttcattaaaaactaaacttaaaaaagaaattaaaagtaaacttttttgataattttagggcaaaaattgccaaaaagcctttaaccggcagcatatcatcaactcccaccaaatatcgcaacaatttaacaaaaatgcaacaattcaaaaaaaattgattgtcacagatctgcccgcaccaccgcaatcattgccccctcctcgccctccaccgcctctaagtcctccctgtttctgctcatcccttccacgtccatttgcggccttcttccagcccttttttgcacccgctgaggcttttcttttgccactgtggtcggcgtgaccaccgccaccacggcctccaccacgtacagcacttccaccaccgcgaccgcgaccgccaccaccgcggccgccatcgccgtggccgccaccgccaccaccgcggccaccaccgcggccgccaccgccaccaccgcggccaccaccgccaccaccgcggccgccaccgccagcaccgcggccgccaccaccgcagccgccaccgccaccaccgcggccgccaccaccaccaccgcgtcctccaccgcgtccaccagcatcaccacctaacaatcaccagtcatatttaaataaaaactttcattcggggtataaaaacgcacttttaaattttttaattatgcagtcacatcctaagattaagggattattaacatgccttttaatgttaatacctgcaaatttctctattttaaatatgtagagtatttttccaaaaacagtataaatcggcaaaatttttcaaaaaagctgcctaaatcacctaatcagtagggattacattttaggctctaaaactgcaaaaataggtagtctctaggctctaaaaaaaccccaaaaataggtaccaaaaaacctcatttttaggggtgtaaaatgacaaaatgtattcaaaaaggtaaaaaaatcagatttgattaaaaatcaatatgtttaatcagaaaatttgaccaccccgattaaatgctaatttaaaattagtaaattaaaaatttctccacctccaccggctccagcattggcaccatcagcaacagcaccgcctccagcatttgcaccatcagcaacagcaccgcctccagcattggcaccatcagcaacagcaccgtctccagcattggcaacatcagcaacagcaccgtctccagcattggcaacatcagcaacagcaccgccgccaacaatggcaacagcaccgccgccaacagcaccgccgccagcattggcttcaacaccgccttcaccatcattaacattattattattgttcatttttggcttaaaaaaattaaaattaaattttaatatgcgaggctgaaagtgcgccagtggaaaatctatcaatttaaaatgttaaataagaaaaatcgttagtgtagtacttaaattacgattcatcgaattactaccaatccccataaatgctggaaaattataaaaatgtttaaatttttttaacttttaataggttcaattatacattaaaattatacggtgagaaaccaacaatatttattttcgcataatgcttaataaaaatatttatttctttttacaaaaacccaattttaaaatacgatcacttaaaaatattttctaccgacgcattttgtaacaaaccatgccgtaggtatggtttaagcactgaagaattttgtcgaataagtccataatgaattaaataaaaatctcaagtgaaaaaccaatcaatgcaaaaaaatattgcacttttgtttttctaaccgtgaaaacaaatatgtattctgtctaaggaagaggtctaagtaaaaaagattgtggatgtaaatatttgaatcagaaagggatttaaataatcaataaaataattttttatccaaaattctttatttaaaaaagaattgaacaaaaaatgataaataatatttttttcaaaattattatatgtataaaaattttaatataaagtaaaaaaaaagcacataattcaaatttattatttaaaagctagaaaaaaatttatcctatgtaggaaataaaatcagaacacagcaaataaaccattttgca

SEQ ID NO: 12500 - DNA, 3368 bp, Heterodera glycines
  unsure (1)..(3368): unsure at all n locations
atcctcagcggagaacggaagaacggaattgctgctgcgcttgaggacttattttcccacagtgcagcggggcacatcaaattgggaagagtttggggaggcgccgggggcgtgtcgaagtgatgggaagcgatgagttctcaccacccccccccccccatttgctaatggcaatgattcaaattagtctattgcctgtgctccccctccctccgtttgggtcttcgcttttggcacattcattgacaaaacattcacaatttcaatcattgttaattttaattttggccacttttccgtccttccatcaaatgaatccgaaattctctctttaagtgacttcaaaatgtgcaaatgtgccaataaattaactcagtgaaagaaaaagtcagatgaacgaaagagtgccggtgccaatctttcgttaattaatattaattattcattcattggcatctgatatttccttttcatttcatctgttgtccgctttaacaatttctaaacatcaatttatcactccataaaaccttttacaactaattatttatggggattaattcccattagtagataatattcccaatcaaattatcgattgattttcgatcgataatttgagtgtgtctactttttttctctgacatccccttccacaaacccaaacctattggatggtctcctcgagagagagagagagagagagagtacattctatgatttctctgactaatgaaatcgactttaatttaatttgtttttttaaatttattaatcgataattttatttgacccccccatacctattggatgatctttgatcccttcaaccgaaacctattggatggacttgtgcgcgagaatttaattaatttaaattttaattaattaatttaaacgagcgagagctgcgcgactatttccgataaattgtggaaaatcaaaaacatggtcgcggtctcgaaccgttgagagtggaagcgaggagcttaaccacttggccacaggggcagttgaaaggtacgggataattgttgactttatgatgaaaattccgttaaaatttattaatcgataattttatttgagccccccccccccaaaaaaaaaggcaaaacctattgtaaggactgtacacaaataatcaataaacccaagcctattgcctatatcatatccgaagctttaagtaaattagcaaaaaacccttttcttccggctgggctcgaacccataccaacttactgtgctaaccaattggccattttatgccactgggaaagcaaaatccaattcattaaattgtaaaaaaatgacgtcatcatggaaagtaaaaaatactccgccccttttcttgttggtcacgcccattggtttttgttttgctttgctaagaatacgactccgccttttggctttttagtttctttttttccgcctccatttttttttgctatttaaccacagtttttctaaataaaaatcattcgtgttccattttttaaaaaattccatcctccttcgttttttccgatcttcctgcaatgaattctcttaaacgctttcaactcccggagcaaggaacacgccagcaagaagagttggattccgttgaaccgaaaaacatcagcgatgtggtcaacttcaattcggccggcgttttttatgttttgggaaaagtgacaaatatgcagtaccgtgtttacaaagtccaaattaattaattaattaaattattaatttttctgtttttaggcatgcccattccgttccaaggggctcatttgtcgccgaaaattgtccgatgataacatgtgtgaggcttgcggccaaaaagcgattgcccccatccacacggtgtttgtccgtcttctgctacaggatgttgaacaagcagacattgctcaacgtgtcaccatgttttcgagtgttgccgaagagtttttgggaatgaaagctgctgaattgctcgccaaggagaaggagccggagagccttgcgaaacatttggacgatttgattgctgtgaagataattgcgaaagtcaacattaaggttgtttttttttgcaatttattacatatttgacaaaccacaacataggcgaacagtcagacttacactggatttgattggattgtcaatttgttcaagaagtgccctggaaaaaatgacagtgatgtgccaaaagaaaaagatgatgatgatggtgacgttgatgagattgctaccaaaaaaacaaagaaaaattgagagagagagagagagagagagagagataacggattcattttgttgtgagcttcaaaaaaaggatttaatgtgtcctttactttttaaaaaatccattaaaaatgcattttaccacgaatgggggtatatgatcacacctaagcccacatcccattccgaattaaattgaagttttcttggtagtcgaactcgaaaagagtttgtgcgatttccttcaacatttgtgttggaaggaacgatcacatagaatgagtttgatgaaggcattctcatttgaaatttaaaaaaaaaagagcccctttatatatttttccatgtcatggagcttgcaggaatccagctgttgtgccgttgactgtagcctttccatttcaccaaaacgtattcaacaccttgctttttcctctttcggacgaccttttcaatgtcatatagggtatcatcatcatcatcatcatttttgcgcactagcacacgacagagatcgttggcatagaaacggcccttgatcagggaaccgtcgtcatcacgtattcggtacgtgacgggaaagcggtcagtgtgcacttcggcaacagtgaacacttcgttggtgaagcgtccggtgtagcccttttggaacacgtgtttgtacttctcaatgcgcacacggtcacccacctggaaacgtggtagtggttgtttccgctttaattccgctgtcccaccaacagcgttctgcttgagtttttttctgagcttttctgcattctcaaaattcacatcaactgggcgcatttttatgcttgagttgtacgagtggtttattccatgcacaatttgctgtatcacatcaacccatttttgggtaccccgttccgtgaaatagcgataacggcgttctttgatggttcggttggcccgctctgccatccctgcgtgaattcgcggcgaggtgtacataaaaaagtttttcacgttcttatttttgaaatattcctgaacctcttttgccttaaattcgagcccttggtcggtcaacaatgtccatggtatgtatttggagcgtttaaacaagcgttcaaaagcagcaaccatgtcggagctctttttgcttttcaccgngctcaacaaag

SEQ ID NO: 12501 - DNA, 5075 bp, Heterodera glycines
  unsure (1)..(5075): unsure at all n locations
ttaggtcttttttaatacattttgtgcctattttacccttnatgaagaatttttccgaaaaataatcatntaaaaaatttattngcttatttggtaaatctntgggtttttctacatatttcgggatttttttttacatattttgaccactttttgtatatattttttgacatcctccctatgcatcagaaataatgaattttgaactggtaatttttttattgcctgaatttgatgctaccaatgcgctgaccattagaaattcttcttcctaaaattggaacctaaataaaaaattaaaattatttaaattttatcaccggacatacaacggattattattttgataataaatgaataaaggactaaatgaattgttttgaatgtttgtgacgatttgtgagttgatatttgatgcgccaaaactgacagggaactcactcaataggacagcagtaaaatttgcctaaaatataaataaaattttattaaatttaattaaaaattgtaaacttttttttctaaaaaaatcatttacctaataaaatttgctaaaactagctttttcttgctaacattatgatttttcttgctaacattatgctttttctatttcggttactcctcgccgcccaaaaaattctgaaaaatttgtagtttcttgaaattttttaatagttcggtccaaatcttgtaaatttcgcccggctgcgaaaaaggaaaatcaggcaagcaaaaatgtgttaggcaaaagcccctaaaaattggttttttattattacaactatcagagctcggtgctcaaaattgtaggaataagcatcagcctttaaatattctcaaagtcttcattagcataaaaaacctcattttttaaattcttgaagccgaatcaattgtcttttaatgattttataaaccacaaaaatcccaaaaacccgccaattctttttagaacaaaaattccacttttatccctccaaaaaagcccaaaatgagaacaaatcccgaatcccgagccctgacataaagcaaatttttaattatttctttacaaaccaatactatgtataaaattacttgatccgttggctctaacattacaaattgcggcattgtatgctgcaacagtccggtcactggtacagtttctgatcgacaaaaatgggttttaatttgccaagataaaagcggatactccgataaaattcccgaattccggctcaaaaactttcgggattaattttcatttgtgggtgttgttaacctggtttcagtgagtcaattgtttgatgaaacaacacaattccttgctcaaatttgcttgaattggatccgatgtttgacagaatgtttgattttcttacgaaatggaaagtttttgaaaatttaaaatttatttaaaaaaagctctaatttatattttaaagttaaacaaacgaagattatataataaatagagatggaatttttaggcatgaaaaagacacaaaaatcttttttttattattattattattgttaaaactttttagttaacaaaaatacataaaaacttaatattttggacattttatatttaaacgaaattgcttnaaagaacttttaaaaaaagtataatttttaaaactaaaaattttttgtcaaaataaattaaaggtacgcacagaaattattcgttcatttacctaaaataccatccctaataataaatcgtttaacaactgaactgaccttcatttaaaactcatcgaatgtgccattttcttggttatttttttcattttttatttcctaagaatcaaataaatgattttcaaaaatgacactttttattgttttaccgtttctttttcatttttcttctgcagctgctgctgaagaaattcacagcgtttataaagcgattgaatgaattgtctttgtgccggactttgttcggcttccaccatttgagtgagggagaggacattatcacccgtctcgaccgacttgaaaagttgctagaagggtcagggaaccccactctggtcacaatcatcgaacgactagaaaagttagaaaagctggtagaacggctaatcgcgggcgagaatcgatatggaaatcgatttgctgaccctcaacacacctcccacacttcggcctccaccaacaacaacggcaatgttcaatggggtcaaccgccgccttttgctggcactggcgccgtttcgcagatgattaccgaggcaatcatcaactccgaacaactgaaagagaagtccactcgtgcggtcatcaaaaaattgccggaggcgatggaccaacaggcagtggtggagcaaattgcagaacaatgcggtgtcaaagacaaattgtcgcccgacattcaccgccacccaaggacacggcctgaaggaggggtaaaaagggatcggattttaaaagtgccgtttttggacaaattttcacgtgacaaatttctctttaatttccgtaatgctgtgaaaaaattgcccaatgtgccccaacatatcaaagtccgaagggatatgacccaaagtgagctcaaaatcttatactcccttcggcaacaagcctatcaggccaatattgccgcaggtgagtataagtattttgtggttgacttggagatcagatctctgaaagacccccgcccgctcagaactcgctagggatacgcgagcaaatcaaacaaaaatattgggaatacgggaaagaaaaatccttggatttcttgcctattaataaacgcccgatcgataacaaataaaatagctgacttagaacatataacccaaaaatacgatccttttataattataataaatgagacctggttaaactccagaaacacattagaatcagaacttaaagtaaatggtcaatatcaaataatccttgcaagccgaaatgataaaaagggcggaggatcggcaattttattaaaatcaaacatcccttatcagacacttttctctgaaattccaaagcgaaattattcacataaaattactttttaaaaaacctatttaaattataaatatatatcgtccaccaaattgtacagttcagaatactaaaaactactcaaattcatttctgaccagagcgattctgaaaataccatattctgtggtgattttaatatcccaaatatattgtgggatgaaaataaggtaaaaaaaataaatgatccggcgtctaattctctaattgagtttatgcaccaaagacaattgatacagcatgttaaggaaccaaccagagaaaaaacaattttagatttagtaattactagtgaattagaattaattaatgaattgacagttctagaaaatttttcaacttccgatccgaaaatggttggatttaaaataaaagtaaaattcagtcataaaaatcctaaaatttacagaagagattttaaaaatatcaatttttcgaaattaagtcaggcgatacttgaaaatcgaattgatttatcaataaactcagtgttcaccgttgaacagaaatataaagaatttttaaataaagttctgaaattatatgatatttttatacccaataggcctctaaaatcgataataaaacaatcgtatcctcaaaaaataagagacttattttcagagaaattacgtttgcataagcttgtaaaaaaattccctgaaaaaagtgatctcattttaaattacaaaattatttctagggaaatgaaaaaacaattgtacaaattaagaaatgaaaaagagtcaaaaattatttcccaagggcaaaactcagttaacaaatttattcgaaataaattatcaaaagttaatgaaattcctacgttaattgataatgctggaaatatgttttccagcaatgttcaaaaatgtaagatattagcagaaatatttcaaaagtcttttttaagaaaatcaattgttaatggtccacaaactcaatcgacacagaataagactaaactttctgacattgaattgaatgcgggaataatttggaatatattaagaagacttccccggcgtaattccacttcaccggataatgttccttacattttattaaaaaattgtgcagaaccaattacaaaaatattagcagatatatttaggctaattttggattccggtcaaattccggaaatatggcgaacatcattggtggtaccaattttcaaaaaaggcgaaaaaactgatccattaaattacaggccggtgtcattaaccagcactgtctgtagagtttttgaacgaattttgagtagcaaaattttagaatttctgaacagtacaagattctttgataaagaacaatttgggtttttaaaaaatagatcgactacaacccaaatattaaaaatgatggacgatatatataattctatacaaaagaatcaacaaattgacataatctatattgattttgtcaaggcgtttgattctgttccaattgatttattacttcaaaaaatcaaaaagattggaattgaaggaaaaattcataattttttaactaactttttaaaaaatcggagttttaaggttaaaattggcgaagaattgtcagaaagtttcagaatattttcaggagtgccccagggaagtgtcttagggccattactctttttaatttttataaatgatctgccgtcctttattgcaaatgaagcggcatcagttggcataaaaatgtatgccgatgatgttaaattatattatacacatgaaaacgatgaccattcgaatcagttggataaagcaattgaggctttggaaaaatggtcaaaaataaatgggttagaaatttcaactgaaaaatgttttgttttatatttggggaaaaataatatgaaaaaagaatattttattaactcacaaaggatttcagaatcggataatgttcgtgacttgggaattataattgactcgaaactgaatttttcagaacacataagcaaaattatacgaaacgcatatcttagaagctttcagattttgagagtgttgaaaagcagggaaataaagactctaacagcagcttataaaacttttgtacgacct

SEQ ID NO: 12502 - DNA, 4318 bp, Heterodera glycines
aaaattagcagcaaaccgccgcattaatttacaccatttatagcttacttaaattacaatactgttcccgttgcccccctatactgtaagaccctttttaggggagtcaaaaaataatacgcatttcctaaatctgatctaattttcggcgctagttaaaaaagtgcttgttttccgggcttttaggggttgctgaccacgaaaatcttacgccatttttgaccaatttcgagtccctaactagaactccaactaaaaccagaaaaattattttttcaatttttcgatttttgtttccaattccgttaaggaactcggaattggtcgaaatacaggtcagattcgcgctcaacgactcctaaaaccctgcaggaaaagtttaaatagcgcctaattttctctaaatttttttagtccataaatttttttatttgcacaatgaattttttgttggaaatagtacaaaaagttaggttttgatttattccattattccatccgccctcccataaattttctctttttactttgaatttcctgaggaagcggcagcattaaagtcacattttgtggccgcattaaagccacattttgccacggcattaaagccacattttgcggcggcatcaaagcaacattttgcggcggcatcaaagcaacattttgcggtggcatcaatgcaacattttgcggcggcatcaaagcaacattttgcggtggcatcaatgcaacattttgcggcggcatcaaagcaacattttgcggtggcatcaatgcaacattttgcggcggcatcaaagcaacatttttgcgacggcatcaaagcaacattttgcgacggcattgaagccaaattttgcggcggcatcaaagccataacatttggacgtggtaagcctgggactacggatggacgagaacaacgacagttgaagttgagaaaaatcacaacaacgatgaacagcacacctaaaaagatccataaaaacagatcagatgaattgtggttggaatttgttgaagcaggcgcattcattcgtttgcgacgcctccgacggcgacgaccaattgcatcacaaaatgatttatgtatttaaaatgaataagtaatgcaggaaaatcaatatttgcttatatttctcacaaaaaagtgaggtcttccgatttacggcctcaaaaagatgaaaaaatggattctcagctgttttcaaaatgaaaaatcttttcgttataaatttatgaaatattttttaagccaaaaatggtcattttccaccttaaaatgacaatttggtcttttctatataccaaaacaaaagattaaataaaaaaactcaaattctcaaaaaatctgaaaatatgggaatatgaaaatatgtactaaaattgtgattgttgactaaaacagggagtgagtgccattcgtactttttttcaatgggatgtaggtcaaatttagactaagaataatcgctttctaggcaattttagacctaataatttaccaaatatcaatttttaaatttataaattaatttaaaatactgaatttttgtatatattttggtattaaaagcacttattttaaaatagctaatgctttttccaattaccatcaatcgtcatcttcattttgtccatccgtagcagaaaatatatttacgtcccatttcgtttccaatgaccgctcaaaaaattgcaaaaatcgccgttcttttgtccattttttcctttcttttttctccattttttcctattcttttttctccattttttcctttcttttttctccatttttccttttcctttcttgttctttttgcccattcttttcttcttcattttcccattttcttctttcccctttttgccacattttcggcaacttttttttccccaattccatcgtccaattgcaactcattataaatgtcaattagctcaattaaaattgcttttggctcattttgctgcttccctcgggagcttttcagcggaatttggccacgttttgccaagaaaaactaacttttctgcaattgttttttttattaatttaataatgtaaacaaggattcaattattaatttaatttagacgaattgcttaacaaggttttattggttttatgtttatacattcatgatttaaatagtgtaatcctttttatttccgagagttcttcaattcatccatctgtttgtttttggcctgcaaaaaaagaatttttttttatttcaaaattttgacaaaattatttctatttgggtggatgttttgagtccaaccaactgaccatccttagtttatagtacctaccgtaactgtttttttgttgttgcaacagaccgtacaatttttgtattattgaaaaatgcaatttgtaagtctgaagaagcttttaatacgagaaaacaaaggaatataatatgttaaaaagatacaaaaaagcaaacgcagatgaagtttccttaattttcgaaatttttgctaattgccgaaacgccgagaaattattcattttagcttcttcacatttattgccttttttaataaaaaaataaaaatttcaattctgttggaacatgaaaaaaaaattacagttcatgacacccaaaattagttaattgaactcaaacaaaaaaacattttacccaaaatttcttgctaaggtttaacttttcgaattttttataattaaaaaaatttgcattttttttaaattttcaccattttgcaaaaaaaacacagttgcttgttgttcattttgtggctgttcctgcaattcaaaaaaaacaatatttataagaaaattttaaaaaactcatttaaattttaatgataattaactttaattattttttataataattaaggaaatatttaaaataataaacaactattagttcaccatccgcacgtctgttgacatcagcaggttgttgctcattttgatcatattgtaaattatctaaaaacaaataattaaaaaaaaattaaatccgaaattcattataaccattttctgacaaagcggaacgttgttcattaaaatcttcgggcaactcattagtcaagtctaaatacaatgtaatttttaaataaacataaataagatttatttttaacgatcattgggaatggaaaaagagcgttgctcattttgttgataatccggcaaattctctaaataagttattaataatattaaaaatttcaaaaataatattatgttaaaaatatttaaatattcaaaacaaatatcaccattttgtatgagagcagtggaccgttgttcattgaaattttcggtcatttctttaaaacataaatattttattaagaaataaaatataattaataattaaactaattcgccgccattaggattgaaaaaagattgatcattttgttcagtgtcaacaactaatttttacaaaattaaatttaaattaaaaattcattagcataatttggtgctcgagaggcagcaaaaaattctagatctttttgttcaactctcttcttcttgtaatctgatcaaatataattttaaaaatatggaaattatttattccttttaaataaatttaaaaattttaattttttgaaaaaattaattaaaaaaagttattaataaattcttaataatattcatcattttgagagagaacagcagatcgctgttgttcgtgttcatttcctgagaaaaaagcaaaataaataaatttttacaaatatttttttgattaaaagtaggaaatgtcatcaatgaaaaaagcatgatgtataaattaattttgatctcaatgcgacagtttgaagattttacgtttttaaacaccaaattgttttttgtgctataggccatgtgacaaaaacagctttttcaattatgtatcaaaaaaaaattttaaaaaattatttatgccaatttttcttattaataacagtaaattggaccgatgatttgaaaaattatttttattttcaatattcagcatttttgtgcacaaatgtaagttaccaagagctgctgatctcggacccgattctaatcccggaagcgactgtttcggcttttttgttcgccaaatcggcctcggtcccggaaacaaaaacggccgctgcgttgaggacttaatcggtcccggatattgacgataaaatgcttcatccggtatctaaagtttccaaattttatgctggaacgctgggagatctgatcaccggaggtgacagattcggattttttgttggcaaatcggcctcggtcccggaacaaaaatggccgctgcgttgagggcttaatcggtct

SEQ ID NO: 12503 - DNA, 1035 bp, Heterodera glycines
tttgaaaaaaaaactaggattagaagcagtattagtcaatatgctgggaattagaccagtttttgggtttttaatgaaacttctcacatatttagccttttttccaaatttttagttttattgaatttcgccaatcttcttcaaagccgtgttttgaaaatgtttttaaaacaaagattaactggatcaaaataccatgaaatcccagtttaccatttagggattcaaacggaatcctgtatttatacatactatttatattgtaccttttggttcgaaaaattgttgacattcacttcggtttcgtgacgcttggctgggtcggttttcagaagaatattcaatcgaatgattttaggttggccggcgccgcccagatcaaactcaattgctaaaattgcctaaaagcaatgaacaaaattgtgatctggactgatcaaaaattgaaaatggcaccggaaggagaaaagcgatccaagtgatcgtgaccatttttgagaaagacggcattccaattgagtgatctgaaaaatgaaaaatataaatttggaaatggtcaagtctacgaaaaattttaaaagccgaacaaatgaatttaatcgccatgagattaattttttaaaaattatattaccaaatcttcctcaaacaaacaaaaattgtgccttaaatttaacaatcgaaaatcatccgtaaaaaagaacagtaaattttatttttttttactaaaatttgaattttatctaaggttcggaaattaagagataaagattagcaatcatttagaatttaaatcggcttttctattggatttacagaattttattaaaaaaacgtaaaattttatgaatttcttatgaattttttctaaatttataggcagtccaattcacgatggttttaaagcattaataaaattaggatgatgaaaagttaattttatagcacattttacgaccccaaaaaatccaatcgctcatttggtgggctgaataatttaataataaaaaattttattgttttttaagacctgca

SEQ ID NO: 12504 - DNA, 1941 bp, Heterodera glycines
ttttttaatttccaacacatttattcagggtcgaatttgccaaatggtggccaattcgctgccgttggaatggtgccgaacgaggcatttcagtcgcgaagctgcgcaaacactgctcgacaagatgaaagtatcggtttttttttttattcaattaaatgcttatcccactattttaaattttggcggggggggggggagacggactaaattaccccacatttgcgcctatgtccaaattcgggttcaacttaaattttttcaatcgctgatagcctaagcagttttatataagtgatagaaagttttgtgtctgctaatttgatgaaatttaaaaaataaacctttaaacagcagaattaatgctcctaatagactagaagattgggttttcttaatccccaggcgcaaatgtctaaacacggacggacgacgccccaataaaattagggaaaaaatgggttttagccctatctcgatttttttgttgcaatttaactgcttcacattcatttgcagaagtgcaccgctgccactctgtcatacgttttggccaatttgcacaacgtgaaaaagccggaggcattgcgcaccgtcgaaatgctcaaaatggcgtccattcggttgggcatgtccccggcgaggacaatggccgtggccgagaaattgtacacccggggaaacaccaggtttgggttgatagttttttttttgaaattgcccttcgaaaataggagcaataaaagcagtttttttaaattttgccaatccggcggaacccacgccgccgccaccgattatcccacactttgcgccgatgctcaaaatcgttttaaaaattttagttttttcgaaccagaatagcacaaataacactaaaaaattttttaaactcatttgttagtaattcatcatagaaattttcgaaattatttttttttgaaaaatttataaatttgtaaattttaaaaaaaaattcttgagggggtgggggaaacgtgctgccccttaaaaataaacagtttccctctcaacttgtgtaccgcaacaatttccccagttacccccgcacggagacgtccgcctaccatgacgagtttgagtttgagcgtgttttgtccgcgttggaacggtcgccaacatttgcccgcattgttcggcagattcgctccgatggcaaattgctgcccgaaaatgggacaaacaaaggcgaccatccgccaatcactccgctacgttcattttgtctagatggaggtgcgaaaaatcaagtcaagtcggccgttaaccgaaaaaatggtaaaaaacagttttcacattataataggaagcgaaaaaaaaaattttttttaagtaaattaaattctcgagtcagtccaaaaatgggcgaatagggaaaaaagggcgggtgtaaaaaaagggggggggtccgccggcgaagaggggaaagaggtaaaaaattttgaaattgtacaaattttcttacaaattagaaaattcattaaaaattccaacattttcttgacctcgcaaaatttgccgctgacccccccccccccctccttttcatgcgttttttgcatattattgttaataaatgaatgcttcgtagaagtggacaaatgcttgtacgaagatgcgcatgcgctttacgaacaaattgcgtaccattttctcgccacgcttatgcgcccgtgcaaatacatgctcaaaagtgtgatgtaagatcatttaatatgcataattttaaataacaaaaaatgggtggataatgaataaaccccaaaatctcgctgctgaaatctcgccgaaacaaaagttttttttccgaaaatccaaaaaattatcaattgttggtgaaaatttgttaaaaatatggccaaaattctcgggttttcttgcggcggcacccatcggcaccgccggacccgaaaactttaa

SEQ ID NO: 12505 - DNA, 3006 bp, Heterodera glycines
  unsure (1)..(3006): unsure at all n locations
ttcctaatttcactcatttttcttggtaaattgactctatattttctaaactttccccggcggtgcctaaagactccgccggatcccaattttcccatgatttttccaaaagtatgtctcaaaattacctaaatattctgcttttttctacggcgccgaaaatttaagtcaatttttctaacttccaaattttagaaaatattagtgtaattcagaataaaattttgaaaaatcaaaaattttaccgtttaattgcaatataatccataattttgtttgttttgctatgctttgatttttatatgttaattttgaaacacaattcagctgaaagaagaaacgctcgcgttctacctgaacaaattttgcaatttcgaacaacgaattgacgacgttgaggaacaagtcagagcaggtgtccagcccatcacattagtgaactaatgagctcttaattaggacccggggtagtaggcaatttcgggttcatacatgaaaaagggggtgagatcgacagaatgtttttttggatgggagggggtccagctgccggggagaattttgtgaaattttatgctcggcttttttttggtcttgattctcggaacttttggttttcttttcatcataattatgaaactgaaaaaagctcaaaagattttctgacatccttttttgcggcgtgatttttcgaattttttttttaaatagcggtgctatttgtaaccaatttttgtccaaaaaacgaccgatttttacgatttcatgaatttttattaacaattttcactaaaacaatgtaaaaaatcgaaaaacgaatttcgattttggccaaaattttacgaaattgcctcgcaattccgtacgatttacgaaattgacccgccctcgctttgcccacctaaggagacttcccctttttgaataatattttaaaaattattttgcagaaatttttgacccggccaatccgcgccgtcaatgtttcaaatgtcgtcgtgttatgctaacggttcgagcggtgtttaatcaacagatgcagcaacacatttgtccgagctgtcaggtgtggtgaacgatagccaaaaaacaaacaaataattaaaaaaaaaattgtaattatttataaaatttgaattttttcgagaattacacaggaaattcctttaataatattaaattgaaatatacaccattcgatagcccttttaaagctctacaatttcgctcacagtgactgtttttcgctaaaaataaaccccaaatgaattaaaggcccgcgagactctttctaaatctcaaatttagtattttttggatagaatctgttatcaaacttcactcaaataagctcgccgcaaaaaaatgagaagcaaaaaagagcgtcgattgggtaaaaattgaaaattccgtccaaaaatttcttattttttagtttttcagtgggaaagaaagactttcttgttttttcagattgcccacgagttttcccgaatctcccgccattgaacagatgcaacgatttctcggcgtaaatccagcaaattgcctgatctgatcatttttcgttttactttcattggccctttcactcaatcaaataatttgtccaacaaattccacaattctttcttctttttctgttcgcttgccttcaattacttttttttactcaaattttacgatcacttattatttcactgatcactttctcagttctttttgttcaacaaaatcccaatttttgaaatcattcgcaaatcccagaagaatacacacaaaatattattaatatgtataacttttttctttgttcaccaactttatcaaatatggtatcattcgaaagctttaaatgtttagaagatatttctaagctattcgaagtgattaagcagctcaacaaaaagttgtcgcttgaaaacataaaaaggcagaattttcgaagttttttatctctatctttttttcagttcgatattctctgtaattatttataggcgaatagagcctgtgaagagctttcgaataataccaagattattggattatatcaacaatttaaaaggttatattgatttaaagttggctcagacggagttggcccgttccccccccccccccccccccgctggacgtccttcgtatggaatcgggtcgaccccgcctttgattgcatgtatctgccgacattctgacattttatggggggtggcggcataacggaaaataccgcaaatagacttatattatcttatcattacgtgatgcgacttttagttacaaaaaatcacgaaatagttaattaaaatagtgaggaaaaatacaaaaataatgacaaaatagtaaccaaaagttcgaaataatagtgatataattctcagcctttaggacacgtaaaataagaaaattttattcaaaaagcaacaaaattaagccaaaccaatgaaataaatgaataaattttggagatgaattttaagaaaatttttcgtttcttagggggtttatttttaaaattttagggtcgattcttaagggtatatttttgttcaatttttggggacgattcttaggtgtgtattttaaattttgggcaaaaggccaaaatagtgatttctaatggcgaaaattgtttttcaaacgaaaaagaaattcaacacagaatgagtttttgctcctctcttcaaaataaatgaacaaaaaaaatattaaatcgctggaaatcgcatccgtatgctaatttattaatacaaaaaactaaaaaggaaagtgttttggtctctcgaaatgtcgaattaaattcccaaacaaaaatgccatcatctttcgttctttggtcggcacaattcactgattcatcgtccgccggtaggagtgccggtattttcccacccgtttctgttgacaacatcggcgagccaagtggcatcattccactgactctttncccaatcactaaaaaagaggacaattaaattcaaataaatattttaattttctaaa

SEQ ID NO: 12506 - DNA, 3533 bp, Heterodera glycines
  unsure (1)..(3533): unsure at all n locations
attaatcgataattaatcgcctgctcaaaacacgcaatcgtttagatcttacatggataatcatccaattcaccacttgcgtgtttcttggagatgaaacgattttcgagcatttaatcactcttgaatttccaaaactccaaatatttaaatgccatctctcagagaagccctaatcaattgcgatcagcatttcatttgttgtttcttaccccggcacccctgagctttccatgtggttggccagcgtgacgtcattgctcattatgtcgaattgccacttcttcagccccaacaccccgcagtgcgctttgccactgtgaatgccgacgcgcatgttcacgttgacgccgtacagctcgcggaccaacctaaaagcacgggtgagtagtacatggttcttcaaaattagacccggcgcggggacgagatcctgcacggaatcgcagtccgcaatttcgcatcttttggaaattgctgggattttgcaggattaatctagcaggatctcgtcccgcaaaaattgagttccaatcccgtagcggaattcgcaaatttgattttttgtgttgaattccgcggacaggcattgatttttttgaaaattttaaaagacagaatgcaaatatttctgaaaattttacaataaattcttatgaacgttaagtgattttcatcgcaaatttcatccaaaatttgtgaaaattcccggcgctgctttcggcccgtcggaatagcctccatcttattaattctataaaaattttgctgaaaaattccgcattaagtcattttttggacacaatctgttaagaaagtgactaaaatctattgaattattttttaatttaaattagcaatattaaaaatggtttacttgatggtgtgaatcatgtccaatcccatggcaactgcacagaccgcgtggtcaggacgcgcctcaggaaagccttaaacaaaaaataaaattaaacatacattttaaagaaaatatttaattatttaaaatttgttattaattaaaattcttatccaactaaccgctgacgcaatagtagcaatcgccgagaattttgatgcgcatgcaatggttttcatgcgccaatttgtcaaaacgcgcgaacagttcattaagcgttagcaccttagaatttgattttaaaaaaatttatcaatttattacattgcccatttgtttgttatttcaaatttaaaattgcttatcaatggcattttgtatgatttttgaaggaaatggcaccgcttttcctttgtgataagtagggatgggatttttagttttttaactattttttctgcggacgaaaaatacacccctaacaaataagaatcgacctaaaaaattttcaaaaataaacccctaagaattggaaaaatttcacaaaaattcttccccaaattttttttttcttgttcaatatttgctaaaaaatattttgtaactggaatcagtgaataaaattgtttgccttaattttaaattattttcaaattaaaaaacagctatttaaaaaattacacccctaaatttggaactttttcgccactatttttgccactattttggcatttttttctcactatttagttaattattttgggattttttatcactaaaaatcccatccctagtgataagtgccgcccacttttggcacacccaccaaatcctcggccgtgcaatgcgatgccaaattggtgaagccgcaaatgtcggcgaacagaatggagatctcgctgtacttctggatgtaaatttttcggaattgcaacgccggctccgtccggtcgatgtttttgcgcacgtccaacgcaatgaatttgggcagcacggacagcaaaatgttctcctgcttttggttgtcccggtgcaaatggagccgattctccacgcttttgcgcgtctcgcggaatgtccgtcgttgaaccaattcggtgggaatgtactgaaatggacgacggggcattcattggccaaaattaatgaaggaagaaataaaaatttatcattanataaataaattanaataaattatacagaatcccttggaatttctcaagccaaacatcccaatcccttattaagagagaccggattttgaagtatatgatcttttttttttgcactttccagttaagaagcatggaaatcgcatttctaattaacaataagtttgaggatatttttcatgattaatttcacttttgataccaaagcaacccaaaatttttcaattttaataaattaaaaatttggatatcaactaattatttttttaacaaaatagcacttaaataaaaatctgataggaaaaccggataataaaaatcgtttcccagaaatcaaaaaactaattcactagaattcgaaagaaattaatttagattacaatttttttaacaaaattctatattttggacaatattttggcaatttttaacacctatttaagtatatattttgcgcaattttaagtatcaaaaagaaccgttcttaataatcagatcaactgtctaagattaatttactcatttccattttttttttttttttggtaattcgcatttcgtaaattcacttaaacccacaatgaaaatgccgttgatattcatggcaagcaccaaaatggcttggattgccaaatgcctcaggtcgtcgcttcgcatcacatagattagccaaagtgcccggacggctaaagacacggcactgatggcaaaggcagccaacagcgacgccgtcaattgcagtggcatctgaatgaatttgggaccccataaaacacattttgagaaacgattaaattattaatacaaaattaataaaattattccattacttcaatttgcctaatttttccaagtgaaaagccaattaaaaagtgaattaaccaggccatattatgagagtacagatggcaccaccgataaatttgttcttttacattcttaaaaatgttactaaaaatggcattttttgtcgaaaagtgcgcctccaattaactgtgtgccaatttaaaatattgcctttctgtaaaatatgccaattaaattaattcttaatgagttaagggcgtcacgttcgttgggagttaagtatcttccataaattccgtcactatggaagttgtggtcggaaaatgtgaaccaaatcataacttttggtaaaaaacaaccgaatttttaatttcaaattttccagtataaaatttgtttgtataaatcagtgattgttaattaagcaacagattataccgctgtgtagcagaggagcagcagcaaaatggtgagcaatgagatcaaatgttgggggctgagcagcagcaaacacagcgagacgatcaccaccgcccaagtgaaaagggcggaacgccaacgccacgtggtcagcaaaagaagcaccagcaaattgatggagagcgcgaaacggagccaattgtgcaggttggcatggacaccgatttggagcaggcacaggaacaccangcaaagcagcgaaatctgtgcgggaa

SEQ ID NO: 12507 - DNA, 1394 bp, Heterodera glycines
tcatcgtccaccttcagtctgcctctgttcatgtgttcaaagtagcgcgtgtacaggtgatcagactggaacagctgtgccaacacgtgcggcggtgccgcccttttcggtgtccgtctcgcgcccgtgccgcgctcctcgtcctcctccgtcgttgttgaggtgccgtacccagcgccgccacttccaccaccagtggacgaaacggcacgaggtccgccaaagcgctgccgtcgttcctcctcctcctcgcgcgacaacagcgacagcacgtcctcctccgcaacgcccagcgaactcatcccctgctgcactatcgtgcgtgaactgctcgagtcaccggcaccaatgccgccgcccgcgctggacgccaacggctcaatgacggaggagccgtccactgacttgctggcacccatctctgagctctgttgatggataaaaatgatgttattagtaccgaactgatgatgatcagcagttttgtcagtattgatttggactgatgtgagatggcaataattggaaggagtgatcggaatggaataatctgaggaggatgttcgatcaataatgggccggcactgaacagtgctcttctgaccattcttattggttgccgatttacaacattcatgatcagaaattatagagattggaatgttgtttgcactccgattggcgggaataaatgccacgcgattggaattggaatcaaaaatagcatagtgatcaggacatttacttgttgcttttgctggtgatgccggtgctttagtcgtttttgcatttgttgtgggagaggaggaaaaattaaatggcatttctttgaaatttaaattttccgcgtgcaatttacagttttggcattatgtcggactgttcagcgcttaagccatcaagggattaaaaaaatttgaattcctcaattgcctactggggtcaattaagaagaaagtagagattggaaaaacaaattttagaacctaattacacagaactaatcctgtaaaatcatgcacagattccagccctattccgaactaaaaagagaagctttccttttacagatagccaaagaatggggctaaaaaagttgaaacaaatatgttttttaaagtttagaatgttttggctaattggataatattttccttcagccattgtttgtttgctgtgtgctaatttgttaatttgtgagtgttggcttactgtgttagctccattttcaccatttaacaaatttttttctttccaaaaatggaacccaacaaatgacaaaaaagtatgtggtgccccttgcaaaatatcacttggctgacaaatgaatgagcagcaaaaggccccgctgctccctcatcggccgattttgttgcttaatttagcaaccccct

SEQ ID NO: 12508 - DNA, 2016 bp, Heterodera glycines
  unsure (1)..(2016): unsure at all n locations
tcgacttttagtggttttttgtgatttaaagtccattctctagtcatcacagttcatcatataccatgttgagctcgttcatcagtgtgttaacgttgtagcaaaacaccttgaagtcgggcaactgttcatgagttcgatgtgcgtaagctaaggaggcagcccgccatttgttctcatcgtatttccaagactcagccttcaaaaagattttttttttgtatgccattttctcgccccgtcaacttcaagcagtaaggcacgtgattgtgcccgaaagtcgtcgctctgattggccgcaaattgttcaactgttgctgcgcacaatggacccaacaacaacgcatggaccaaatggtgaacgttgaaatgcattttatcagcgaaatgctggaggcaaaagttgagtaaatcgaaactgaaatcaaaaaaaaaaaactacaaattgcccaattaattgtattttatgccaatgtacacgtgcaaatgaataaaaactgacaaaatctcacccaatttgcccttggtgaaccatctctttgacaatggtgacaaaagtggtcaagtattttgcgtgcttcagctccaacacgctgaccaccgtcttccaaatgtttgagtgggtccgtggcggaaaactgagtggggcgagcagtgtcacaagctgatcgcgatggaaagaggtgatcagaacgcgattcagacagggaagttgaggggaaagggtggtgatggaattgccagcagcggcagcagtgtgaacagtgccctgtggattacatgaattttacaggatgaagaaacagtgtaattcatagattaaagaggaggggtggggaaggtcaccaattgagaaaacaaaggtcgacaaactccaatttggcccacacaattttttgttggaccgaaccggccctagcgtttttattcgtaagctgtcaggcgatcgggccaccctctctctcccccttttttcaattatacaccaaatttttgttttcaatttaaaactaagctgaaatggatcaacagtttcaggcgataccattcgattcgcgacgactcgctatgcagtaaaatatgtcaggttttcccctaacttgaaaccagaagctccatcagtactgctgattagttccttctcgttacctcctccccattcccagcatcgttcgccccagtgtcgtcctcaatctgcttctgtaattgcgtttgttcatctccctgtttttgtccgtcttcgtcgtgctgctgttcattctcgcacaaaatcttccgaagtttgtcgctcatcgcttccaaatgggtggactgttgttgctcgttcctcttgtgctgtttcccgtcttcatcattattagcaaattcggtttgctgttgctgatccaccatcgtccccttctcccaccgcaactgtgtttggtgttgttgctcttcagttacggctcggtgtcgttgttgcttcgctcgtccgccacctttccgtggtggcgtcggtgttcgctgcgacggtctgaacccgtcacaatcgctggtcgctagtcgcaccttcgctgctgcagcagtactgctcggactcgctgccgttgtcgctggggcatttggtgtcgccgtcgttgacgatggcaaccccttgcggtttcgcttctccgtattttctaaccatacaaagaaactctgcaaaataaaagatgatttcgctttcgctcattttatgaccaacttgaacaagcacgtgttccgcaccgagtccatccccaaaatacgccgtcgttggctcgtcttcccgagaatcagcaatccgcgcatggcgcaacaatgcaataaaaaagtccaccactttggaggccggcaccgtgctgaacaggcgaatgcccgtctcgaatcgggtgggtgcacgaggactgacctgggactaatttgggacttaagcgactgtcattattttncagggaatcgtgcacaatttatgcttgcttacccggtgtcccggcttccgtgcggatttggtgctgc

SEQ ID NO: 12509 - DNA, 1313 bp, Heterodera glycines
taatcagccacgatggtggccatttttcactccgttttaaacttgtcggtaagccaattatagaaatagggcataaatttagaatgtgtgaaaaaccaaataaattttaaagataacggaaatgcatcaaatggatttttaaaaaggtaattgatgaaatgaacatgaagaagtaaaaagaaagagctgtatttaaacttttttatgatatgaaaaatggaaacgaaaaaacaaatataacgaaacattcaaatttcgggcccttctccgcccggcacgagcattgtgatgtgattgccattcagcaaaattgtgtccaattttgtcacccgttttccctcgggagttcgttcgtactaaaagaataaattaacagcaattaaatcgattttcatgaattattctacgcctctcacttcgacaacatcctccatcaccatattcacgtagtcatcaaagcccaccaaagtgccaactgaaaaagcatcattttcattaattttaatttgcaatggattaaactaatatttggcaaaaaatcccctggcttttttgccactgaatacgaagcggacaccaacttcaaccaattctaagcctagccaaaattcgaaaaaatttgaccactgaccaatttctttctcgttcttcatgatcacccatattttcgaaccaacacatttgtcgatcagttccaacggcaaaagggtcgacggattcactgcggtagaagcggtcattttttttttgaattagaaatttattaacctgcttttgtcagttaattataagtcttataaaaaacaaacgaaataaatatatattgaatataatttgacaaaaaaaagattaaaaaattgaatagacaatgatttaaatttaaaataaaatgaataacggatacaaattcagaaaaacaagttttagtttccgaaaaattgcattccagaaattgtggttccgacaagaaaaaaaatcattatcggccgaatttaatattattgtccgttaaaatcaataaaaaataagctttctgtttgtcggaatcacccaatttaaaattcgatagggaaaatgaccaagttcacatcactgcttccgccttcctcggctctttatagaacaggttcagattttcctcgacctccttcaactcgccgatcaaattcggcgcgtattttccctccacgtggccgtcaaccgttttgccctcgaacacatccaatgctttgagttcgtcaaagattcgccgttcctcctcctctagactcgccaactcggcgtccatttgtgtcactcgctcttccctcccc

SEQ ID NO: 12510 - DNA, 1090 bp, Heterodera glycines
tgtcattattttgtcttgcggcttctccacatggtaggcgatgttcagtgtacggatcactttctcaaattcttcttcgctttgttcgcgcaataatcgcaactttaaaaaaattcaattcaattatataaaataataaaaagaaatgaaaaagcattcatttttcggacgggttattctctttcttttttaccattttccgacgtccgtggatcaagttgtgtaacttggcgctcagccattttggccgtttgcgcattttatgccacggcctttgcggggcacgtctctgcatcagatcctcgtacagcgcggtccaatgccgaatggtggcggtggcccaggcaactgatcagaaaaggtaaagatgactgaacagtgacaagacaatttcggaaagattagaaacccgggaagagttcccggacatgttcggagaaagatttattttttgacactgacaaaaaaggcttttaaaagacagcgactgaatatgtcgggcagcaaatgttcaggcaaagatcaactataatacaataaaaataaactttttgctggcagcgaatgattgtccaattgatcgtagcgcactctgtccgtcatttccctaaaataagtaaatgcaaatgaaaaacagaattatgaatgatttcaaatgaagatttttaaattttattattaaaaaggtgaattgttgaaaaatgtccgactttttacacgccgctgtgaagtcactgcgctcgccatggtccaaactgaagatgcgctgcacactttcaggtgcctcctgaaaagagcaaaactggtacatttttagaggacaaacaagaaaaaaactatgaattcttgggattatcgtccgaattgagagattcgaagggatgtcataaaaagtaatagccaagggaaatcgacaattaattctcaaatacgaaatcaattaccactaattttatcagaatccattactgcaaaaagcttacagccaacactttgagcccgcggtactcaagccgtggctgtgacatgtccaaggagggaagtccaaagtctgtaaagaaaactgagaaaaaacaaacaaaacgcatta

SEQ ID NO: 12511 - DNA, 3611 bp, Heterodera glycines
  unsure (1)..(3611): unsure at all n locations
cggaacactcgcccatcctntttcgacaaagccaaggactatctgatgcgctacccggacacgggagatgaggaggcagaaaacgcagcgcaaggtgaaaaaaccaaaatgaaaatgaaatttaaatttgaaaaatggaaaattatttaaaaatctaatcaaattttgcgtagaagatttgctgatcagcaagaaaaagaagagcaaggaggatcaggaacaacagcaacagcagaagggcggaaatgcctggctaaagagtcatgacccggacttgcccgcctcgctgtcggaggtggaaaacagttcatcgtcagtgatcggagcgagacgaaaagcggaagacgacacggcagagagtggggagatgggagagagtggacagcaggaggagaagaagcagagcagcagaggggaagagagtgggaaaaagcgagagggcggcaggaggaaaaagacaaaatcgaccaccacggaggaggaggaaagtgaggaagaggaggaggaggaagagagtgccacgccgttccggccacgcccttcgaccatcatcgggttccgcaccattcagccgatgggcaccggtcagtgccccgagcaaacggtgttggcgccaacatactagtgttgttcgagaccgaaaatttctcgagactcaacccagagattcgataccagcgagactgacaaatgagaccatacccggactttctcgagtcgagaccgaggctcttgaacgccgctacatataataagtccgtcgagattctcgactccattgcctcccgtcccggagtctcagttgggtctctaatttcctggaaaacactatcatccctaagctttcgggataattctcgacattgggggtcaaccctcgggtcataactggtctgactgatcagctgatttaagtgatcagaatgatgccacctttcccgcttcttcagatggcgtgtgtaaagaagcgcccattgtgcaggtgaagccccaaacttcgcagccccaatcgcccgcggcgcacagtccgccggcacagccgacgacgcaacaacgcgccaaactgttgaccaccagaaagtaagaaaatgccaaaaaacaaaccaaaatttgaatcggaaaaaccaactcacaattcatagccaaggggagggattaaacaattaaaaaaggcaattatgttaattagcagactgacaaaaatgccataatttattttaaaaattctttaatttacgtctgttttgctaatcccaatttgaatagatttaactacgctttttgaggacattcaataacattgcttaaatgttctatttgtatgccaaaacgccaaactttttttttcgtttaaccgctgcccctttaccgtatttacacaccatttcttggccagctccgcttcgccgtccccaatgcatggtacggtagtcgcttcgccgccgtccccgctgtttggtacagtaggcgccgcgcccgtcagtccatcgtcggttggcggagcggcgaccgcccgtggcggcgctatggcgccccacgcgacgacgacgccgcacgctgacgcgccatcgcccgccccaccgccggaccccgccgcgtcgccaccgcaaccgcagcgcttcgagacggcagccgcgtacatccggcgcaaaaaccgcgagcgacgaacgcggaacctcacagtggcggtgacggagttgtgcccggtgcggcaggacgagtggacgacgaggtgcacaagcaaaacgactggcagagaacagcatttggcacccaattaagggctaatgtgccacgttttagagctttctatagcgaattgcaatccccggcattaactgtaaaaggaattcgttgtgaaaatttattttcgtttggcatttttttaattttggtgtgccattttttctcagtttttgtgccattttctgttttccttttttttcttatgtgagaattaaaactggaggaatggggaaaacattttcaattttgaagcataaatttttcattttgattactcagatttccatctgttgaccagcccgactatcagccgacttcgccgggcggcggcggattggccaaccgacggaagggaagcgtaggaggacaaagtgaggaagggaggtaattagggacagacagattcaagacagattcattatagagcaattcattagggagggaggggaggggagtgattaattaaggaggtgtaattaggaggtggtcaattaattattaataatgtaggggataattaggaggtagtcggtcaattaattagctttatttcgtcatttaaagaattggatgctcagacatcgcccggcttgggctatcagcgtccgggttatttggacgaacgcaaatacggcggcggcgagtcgaactttccacgacaggcaaagccgacactttatcttaattgcctcaattaatgatattaaaatcatttcagaattacgtcgatcgacgaaagtctttccacgaaatgtcgccgccctcgggcgacgagccgccgtacgaccggtacgcaattgccggcggttatttcaactcattggtcggcaacacgcacgtgccaaacaacatcaggcaattaattctatttgaaaattaaaatatgagaggattttttctcccttagccgcttcgaggacgaagtgtacaacgcgttcaagcagttcggcggtggtcatggcgcatggaaccgagggcaggagaaagagcgattcgaagtgtacaaaacgatggcggaacgatcggccgaatttggacgcagcgagtaagccaatcacagcattatattccactaatagcattgcagggtcaccaataaaatgccaaaacaataggtctctaattagtttaattagtgccacgcatcgctggggggggggggaatttgatgggcagttttcataggaacctttttaatacctttttttgtttgtttagcattcaaaatcgaatgtccgctggcggcagctgttattaccccggtgaacgtccgttgagcacttacgccggcggcacaacaaatttggcacagttacgacagccgcgcattgttgacgatgggtacggtaacggcgctggcggcgccggagcgctaccgtacgatcggagacggtccgtatacgaaacggacaggaacggttgtacaaaaacttaattatgagaaatattttttgttgactgatttttaatttaatttaatttttaaaattattaaatttaaacttatgattaaaatcaatttatttaatttttttaaatttaaccgattctaataattttaattttgaaatgcttttcctccccaggcaataatgacttttctggcggcgctttcttctcgcagcaccacgcgccgttgccggagcccgactcaccgccgggcggtgccggcggccgataccggcgccgaattggcgccacactgcgcgacgcggacggacgccgcgcggcgtacgcctcgcgctcgcagtccaacgaccatttgtgcatgttgccaaggacatacgacgaatatgacagcagcggagcaccggcatactacggtaaagcgaaatacagtactgctgggtttgtttaatcgtcat

SEQ ID NO: 12512 - DNA, 2037 bp, Heterodera glycines
atctaaatggagaaaagataataaaatttataaaatgttccatgaaatgataatgaacgcattaaacacgcaccccgacacatgacgggtcaagcgagctcaattgcgattcgccctgcgatgccaacaaacgacgggtctgttgcggcatgggagctacgtacgggaagaacaaatggttggttagaaaaacatgatcatatagaatttcaattaattcttttgagaaaataatgtaacacataccaggatggttgacatcgtagccgatctgtaaaggggaaaaattagtaactaattaattaggatttatagaataattatcatgaaaatttatcaaattaaccgcaaattcaaagtgtgtgtggagtctttttaatgttaaacccattttagtaattgcgtatatttgttctgtcttttatcttaccacaagcacatttccgctttcgagcgaaaagcgacggcacgccgacggctccatcaccggcacgtagttgaggccaaagttcttcatgttcagcttgttcaggatgttctccagcgtttggcgctggttcttccgcacaacgtccttaaaaagggagtgccattttgtcgtcggtcagtttttgcgaaatccatcgtttttttaaaccgccgtacattcgctttctccagcgtcacatgctgcgtggtgactttgtgcattgcctccgacagcttgagcagtccgtgggtgtccttgcgcttttcatccaccagcatgatgaattggatgtgcttgttgacgcatcgctcgaacatcgtcatccattctcggtccgagttcttgacaaggaaaacaaacattaaaacatgtcatgcaaattaatggttgccttttttcaatcaccagacagacaaatatttgagttgaaattgctaaattcgaaaagcggttttttctttttttatgtcagaattacagcagcatcaatgtagttggtgaaaagacaaaattacaattgtattagcgttttgtaatgaattgtaaaaatctgctgatgatccagaaaaggcttgaaaaaattgaaatctttgcttgtaagattcaaataaaccactcctgggatcgagttctatatcccatcccaagttaaaagatatactgggcaacagtatgccatttttagtagttttgttcccaatttgttactcacatccgggctgttgaaagccacaatctccggctccgcaatcggaatgcccttttcgttgcccatgcgacccaaacgttccacaaactgttgggcagtgtcaaaacggttgcgtgcacaaagcaccagccagttggccaattcttccgtcttcaaatattccgcacggcccgcgtcacggcgccagtcaccctttaaaagcgcaatttaaacgattatagctaattgtaagattaattttttttaaataatccgactaactttttgcgcgtcgggacgcaacacacggttacgactaaaacgaagctctggcaatgcgcgaacaccaatcataatcttaaagtgtaagatatcaaataaaaaaaattaattaaatttataacagggtattaagacagtgagccgtagacaaaaaaggctttgcaaagtagttgaaaattaaaacaaaggtttacaattagaataattaaaactgggtaaatgcattagttttactgacccggttcgacttttgatccacagagatcccaaatgctttaagcacagggttctggtcgttgaacaatccgagcgcacgagcacggtcccaaatgcgtcgcatgcgctcatccggtttcatagagttgaatttgagcaactggtccatcaaaactgggtcagttttctcacgagggacacgctcaaatgggaaatttgtattgaattttttttaataaatgtgtgtatttgttatcttggatgaatgcgtgtattggaccctaataataccaatttcctagaaatgtctgatggtcaatttcaattcgggttttccaaacgaaaaattagtctgggtaaaaaatacgtaaataaatttttg

SEQ ID NO: 12513 - DNA, 1551 bp, Heterodera glycines
  unsure (1)..(1551): unsure at all n locations
gccagctgaaatttgtcagaattggagtgtgactataatggcaaataaaattaattggctgattgctaattgtaagaaaattttgaaagaatatagcaaaagccatatntcaataaaaattcaaatttgaaaacgctggtgctacttacagtaagcagctcgaagcagagattgcggttcagagcacgttggccactaaaaaagacggtacaaagtattgcaactagcaatttcataaatggggtcggcagaaagagtcacaaacgttgcagtaacgaaaacattgattttttgcaattcggtacaaaaccattttaactttcgcactaagattagtgtcctttatctttaggcatgtttttgttttgttttaattgtaatcgaaatcagcatacaatgccacttactcgtccctgcccctcacgaggcttttgcctttgtccatttctccgttgcgcttcttcaccggcatgcgctcaatatcgacgtcgtagaagtacgccttggaaccctttgccacattgatggtccaaatggagcaaacgccctgacgcttgcgcacctgcgtcgccggaggtgcgggcggaggagcgaactcaaatgggaagcaacgaaaatggattgtcttgtcttcaattcggtaactccaatgcacagcagggtgcttttacttttgacaagcccaagagttgaggctctattgcactttaggctcccaatcaatggccattttgattgttagttcctaggccataactttttctttttcataatcaaggctcacattcttggtatcaaacgaaagtttgaggtctattgaacattctggtctaaaagcaacaacagattttttgaataactcgaaaaaaaagaatttgattaagtatttgctcttttcttgtatttattaattcttgactttacgctttagtttgatgccaagaatgtaagctcttaccaagtatgaacaaagttatgtcaaaaaaactgaggatggtccattgattggacgcctaaagtacaataacttaacaattgtatcagtcggtttttaatttgtttaaaacgacgcaatttgattgtaagcaactcattgtcggtgtgtaatttttgactgacaatgaatcccgtcttttaacgggaataccaaaacggaattaaaaattagttatttcgccactatagcgccaactccagtttgtagctaatggatctccgaaacccaaaagtgatgtcaaacctcgccaatattgccccgttcagcccgcatcggcggtggtccgccgcgctgctgctgctccggcgggtaataatcaccgccaccgctgtcgggcgacgaccgttcacggcgagctgagtcctggaactgtggacgaccgccaccgcctcctccacctaggcagaaaataaaagtaagtccaaaatgggaaaatttgacgtttttgggggcttgctcttaagctagacttttccagttcaagactgaacccccccccccccccccaaaggcaagcctaacactttttttgtgcaaggttttttgatattttt

SEQ ID NO: 12514 - DNA, 1608 bp, Heterodera glycines
aatgaattaaaaatacaaaaaaaaatgggggtgcccacaatttttattttctccatttttttgaaattattctcatttggctttctctttgtttttgttcgatgcctatcgaatagcagcagaatgggccatttctaattttgccattaataattttgtttaaaaaaaaattaaattttcaacataaatgaattaagtaatttattcggggttaattaaatcattttcaaattattaaaaaagtattgaataaattctaaaaatcaaatgacaattagatatttcttttcacatcagctctaatttaatgaattcatcatgtcattttgctcacttcttccgccaaaatttgaagggcgggcaaaatcttaaaaatttataattttaattgttaattagttcgtccttaattacttgtttggccaatttgtttatgcccttttccgggtacacaaagccaacataatcaccattgaaatggccagatgtcagttccattgtataaacatatcttattttaaaaaataaattgtttttttatttaacatattttcataatctgtcttaaataattcgagtcccggatttgctttttatttattgttttatggccttttagcgtgaaaaatagattttgaagttgcttggaagctttaaaatttatttcatgataaatttcgctgaattcggggtttttaaccaaaaaatgtcaacttttgaaaaatatcaaaagaaaaaatgtaggaaacacaaaagaataaaaattttcaaaattctacgcctaaggataatgattctttcaaaaaattaccgctaaataaatacaattaaattaattaattatttaaatactttatgttcacactttgcgcataatcacggctactcccggtcgcggcatctgaagaaaaacccaaaaaatatatccaattattaattaaattaattaattacgcacataaaatttcatcaccacagccaactttaaagtgttcaccgcccgctttttcgatggcaatggccatttcatttccaactctttgctaattgtaaaaaatattatatttttaaataagaatatttaatgcaaatattaatagtaaattttcaaataggatttttgggaaacttttttaagttatttttattttttcaattcaaattattgggcttcaattagaaataaattgccaaaatctttcaaattaatacaataacaaattaattttttttttaaatttcaaacgaacccattccgttatcaaactgtggttacagccatgcatcagcacattactgtacgaatgcagcgtcaaataggcatcaatttgtggcaaatgctgatgcataaagccggctaaatttgcacattccggctccgaaagcggattatccccgtgaaaaacttcgcttaaaagaaaattataaataaatttaattttaattttaataattacacaaaaataaataacccaaccatttaaagaacgcggaataagatttaaaagaaacactcaaattttacaaagtaaaagcaataaaaatttatatcccttttaatttcccaaaaattttaggaaattgcatttttataataacattgattta

SEQ ID NO: 12515 - DNA, 1907 bp, Heterodera glycines
attttgcagaatttttttaatataaattaaaatagggttcactaattgctttaaaaatttctaaattggaggtaaaattcaagaaagtttaactaataaataatcactatattttagtcagtcacacaatcacacacattttcgtatagtgccaaaaatacttttggcttttttatgacgtatgccagagttctatttttttgaatttttatgattttttacaatcaccgttttatattttatataactttcagtgacggacttcaaaaatttatggagatgcgagttttttgggagcaacgaaaaatgcaaatgtttgcaaaatgggaaagtcaccaataattttctaagcttaaattacatgggcgtttgcaaataaatgtcaaagattttaaaagttaaatttaaaggatcctccaaataatctgcataaatgcaaaaacaaaaggggaaaaataaatgattgatggctttttgcttcgctgcgcggcgcgagaggatgcaaaaaaaacatatccacggattagggaaaatgcccatccgaagggattttaattagggcggcaacttcataagggagtcgaataggtttggttcaaaggactcccttcctatcggcttgggcttttgcggtaaaaccaggtttggggttggggcggctacttcaaagactgtactccttcataggcacgggatgggcgagcgatacccgcaaccttttgacagtctgtgcaattttatatagggcatatatttcactgataattaggtatttcatttcacatcagcactaatttaatgaattcatcatgtcattttgctaacttcttccgccaaaatttgaagggcaggcaaaatcttaaaaatttataattttaattgttaattagttcgtccttaattacttgtttggccaatttgtttatgcccttttccgggtacacaaactactcccggtcgcggcatctgaagaaaaaacaaaaaaatatattcaattattaattaaattaattaattacgcacataaaatttcatcaccgtgtgctcatagtcgtcagggtttacagatggaatctcataaatatcaagttggtcgagaattgaatgtaatattgtcggttgcgagctaaaaaaaaatataattacttgattaaactaattaattaaacagaatcaaaatcataggctttttccaacttttctggacttcttgcgatcagttcactcgcggatgaaaaaattcaaaaaaatatcattattatcagtgaaatggcgtcaaatttgaaaaacttaataatatttttgtcgaaatgtcatagttcaaagtggacttggtcgttttggcgccagcctattgtgctatgactttttggtatcattcgaacgcccttcacattttaatttggcgcatgctttaaataaaattgtaattttcttatgagcaaaaatttttgatcaaaattccgatttgtaaagctacaaattttccggtggctcctaaaacaacccttgtttcccaatttttttttgaaaaaacgcgctgtaaaaaaaatgtaaaaaaaaatcaaaaaagagtcattattatagatgtcaaaattatgtacaaatatgtatgtaacagggatgggccaaattgaaaaataaaaagtgaaatgcgaaaagcgaaatttgcgaaactggaaaatgcgaaatgacaaaaaaagcgaaatgcgaaaagccaaaatatgcgaaaatgcgaaaagcgaaacgcgaaaagcgaaatttttttcaaaaattttaccaatagtaaaatcatagattttgtggtagtgatgcaaaaaaaatcaaaaatctctgcattttccggttcaatctttttctcacatcacaaaaaaggaaaattttacccctttaaaaccaagttaaaa

SEQ ID NO: 12516 - DNA, 3906 bp, Heterodera glycines
aatgtgccttctttctccattgtcaacttttcttgggttcgttcgttcaccaattcaaatggcacaattggcaatgacgcggacatatacaaatgaattgtgtagcaggcagaagaagtgatggcacagagaaatgcctaaacaattgaaaacgaaaataaaaattgtacattttttaacaatatggccagtaagggcgtaattttcagcaaattttttggaattttaagcaattttttttaacaaattgcattaaagttttcgaattttcccggcggcgcctaacgcaatttacctttgaaaaatagatgctaaaatgacaaaaaatagtcattttttgcgaaaaatcgctataaaatcctctcccccgaagccaagagttcgtagggatccttcccgatcgcttttccaaaacctttggaattggtcgtgatcccttcaacccctgttgtgtccggttcactgatcatcccatcagggtacaaaaaatgggaattaattgaattaaggttcagatcggtgagaattgttggtgaaatgagccgacgcaaattgtccaaatgctcagcatttgaaatggtcaaatggccaatgtttggcgcaaaaatgggccaaatttcacggacaaaaacattccaaagcggctggacagagtcgttgtcagttgaggatatgtacaaatccaatttggtgcctttgtcccaaatttgcttgttggcacggagaaatgcgacgacggaatggtcgatgtaactacaaaaatgcggttttactgttcaaaatgcctattaattgaatatggctaatatctttaggtttttgccttttaggtttttataaattaaaaaaaactattttcaactatttagccgttttgcccaaaatttgttacaaaaatgttataaaaatgaaaaatatacccctaagaaatgaaaaatgttcccaaaaaattcatttccaaatttattacatatcttttgacaagatttttatttacctaagcctacctatttttggcaatttttagggcctaaaaatacacataagccctattaatgaattacttaatctgaaggttgctaaagtgaattttgctgggcaacggacggtcgggcaatggaaatggcacagaattggcataacttttaaacacaaatagtttcgcttttgttcccattttgtcaattttgatccgcttccaaattgtcaattcgtttttgccatcaaaatgtttgtccaccaacacatcgaaacgtggcgaaagaagtgccaatttgaggccgagttgagcatggtcaaaacagggcaaaatgtccatccaaacgtcgttacaaatccaactgataataaaataatcgaccaattacgaaataattaggtaatttttatttgtgtgatccccccccccccccccttgacattttcaagtcatttctagggtaatttgtggcgctgatcagtgatcacgaatgcgaacttttcgaacaaaaaatcgaaactatattttccttgtaatttatgaatttcgaatttttgttcgggtcaagggttttgaaaaataaaggtcatttatttgaaatttcaaggggggggggggtcataaaaccgaaaagtaccaataattgaacggaattaaaatttaaattaaatttttcaaaaatttttctcacatttttcttaaacgacgacgttccattttgcttccaaaggatgatgtcacaaatgaacccggcgaattgctgctgattttcaccaattgctgcatattacttttatttggttgtaaaatatatttttacgtcaaaaaatatatacggttttaattttgaacgctgaattttgaataggtaaatcatggaatttagaaaattaaagatgaaatgcgaaagcgctgacaatccttttaattggtctggattttaatcactagggatacgatttatagttgctaaaaagtgccaaaatagttagtttttagtttctaaaaaacccccaaaatgctcagggaaaaaatagtgaaaaaactataaatcatatccctatagtgaaggtgctgatgtccagcccagaatatgacgaagggacgagggaaattagggattggatttgggggaaaaaggaataagccaaaatccgggccctggataaatgacctccccaaattggtaatcccatgggcgcctactagatctaatacgcgtgcggggatgggcgaggagtaaaataataatataaatattggccaattacattaataataattccgccgcgttctgctctcggctctcgctcgccgattaactgcccgctcaactgacccttatcgagagaatgctcccgattaaatagttggacttatggaacggaaaatggaatggaatagagcggagatatgtgcttgggaaagagattaaacggatgtgattcacaaaatgtccccgtcacttaataatgggagagggaaaagtgtttttttataaatcaaatttaaaaaaaaaactcactgaagcagttttttgtacttgtagaatttgttgtcggcctgccccatttccaccacgtctttcaccgcgtcaatgcgaaacttcaacgcgcccaaggagtgaacatgaacagttcctggtacttatgtcgtttacagaccataaaaaatagtttttataaaatcatacatataaacatttttagggggttttcggggtcgctgatcacgaatctaaatctatttcggtcaatttcgaatccccgacccgaattcgaactaaaaaccgaaaattcaatttgcgaatttcgcatttttcgtctaaaacggctttgtaaaactatattttgtatggcctgtaaacaatatacctaagtaccattctctcatgccaaatgttcctatcgccaaaaaaggaacgttcaggttaaaggttaaacaaactcagattaggacacccagttttttttcaaaattctgcagacccctaaaagctcggattaaaagttatattcattttcgcttttattttttattcattttaatacatacaataagtacagaggcatacaaaactatacatataaatatattcattcggcaatgagaacaaatgagcataaaacattacataaacaggtcaaacatcattatgaaaaagccacaatatattggcatatttaaacagaacaacaaccatttgtgggataaatacattcagcaagacaagcaagacaatgcaataggatatggccaaaatcgtgaacgctaaatgaaatgggtgacacaattagaagacaaattgatggttaaaaattaaaatgagaaaaaaactgggaatgatttttgactcgaaatgcggccatatttatacactttttgagtgcggatgttcattatggcccgcgcagtgcgcccatttccatcacagtacgtttggtacagtcctggcagagattcgaagctgggcggcacatgcgcactggtcgatccctcaagaaccacattacgggtacgcaagcgcagcggacggagatctgtgattgccttgctgagaacggtgagcagtttctatttaaaataagaatgagttcgcgtaaattgtcagagcaaaacaccccaaaacgcccaagttaatgtcaaaaattgttgggtcgttgggtgttggctatttattttgcttttgggttatttattaatggaggtctccagcgccagcctggcgccaattccgataaaaaatgccgattattaatgactcagtgttaaggaagcacttttgattggaaatgtcggatgtcttctcaacttccccaaatttacctttaaaagtgccgcccctctcccatcggttggactccctttgtcggctaatcaccttctcttttggctacccatgcaatgcttatgtgataatcccttgg

SEQ ID NO: 12517 - DNA, 3878 bp, Heterodera glycines
tcgttcgctgatcggctgacttttgctggtcctggccataggtttggccgaccggctgagtgatcgggaaggctgggaacatgaaaggggcgatgcccttgcacgcctgcacccgcgggtatttggcattcggacgccgtccccgtggcactctgtgggaggattttgatagatatgattcattgcattaaaatggtttaaaacaaattcccatgggatgaggcgggagggggggagactcagagtttgacggcacaatgatatcattgtgccgttgccatctgttggtcgctcttctgacagtgccaagggattgtgccacattgctcgctcgcccacctcgaagctgccagcaatgcttcaactgagaatggcatcgtttttcctttgcctccgtccgccgctctctccgtccccgttgaactgcttcttctcgtcgtcccgtccatctgctgcgtttggtcatctccgcctccctccgccactctttcctgctgctgtttctgttcgtctgctgccaatccgtgcccacagtgttctttcttgcgccattttgccctaattaatcggcttttcgtcctaatttatgaaatggataaaatcactcaccttcggttctggaaccacacctgaaatatttaaacaattttttaactttgcaaaatgataaaaaaagtccccccccgccgcttttccctttcattttgcaattgcatttcccttttttttgtttttcctcaattactgtgcctaattgcttcatttcgctttccaattttcaaattataacccttgcttctgctgatttatgataaattatccccccccccccctctggcgttttgcgccaccatcttttgccctttttccgccgattgtttcgccccgggggtccaattggcttattattcgattatttgtggctaaatttggcccatttgtgctgccttatctcttcggcgcatcttcgccactcataactctttgccggtcgaaatccattaatggcccatcaaattgaatgaatttgtcatccatcgcttccccccccccccaacaaatctcactcattcgcttaaaagagtgaaggaaatgcaagaaatgagatgggagaaacaatggaaagaaatgaagagaatgacgaatttggaaaatgatttgcataaaaagtggtgattcattccccccaatttagcagatttaaattggaatttaaattttaaaacaataaattggccacctgcactcgcgactccagcaggtcaagccgaatggcaagtgcttcgcgcacgtaaaccttaaaaaggcattttgaagaccaataaataaattgaataatttattctttttgcattttaattggcttttcgtacgtccgggtaatggctacattcgaatgcgctttccaactcgttcagctgccaattggtgaaatttgttcgcgttcgacgcctttttgtcgttgtgtcggacgctgaacaattataaattacatatccatttgaagagaataatcattttgagggtatttagccatggccaatgtccgtcggattggccatagcagtgaaaacatttgcctcttcaataattttgcattacatgccaaggccaatgagttgaatcgttcgtttctcttctaatttaacattcgatttccctgatgctaactcacccggccttccgccctctctgccattgtccgcgttattcgtttgtttcggtggccaattttccgtcgcattcgccgccggaggagtttcagtaccgttcttttgctgctcactttcgcccttttgctgctgctgttccgtcagcagaatgtttggcaatgttcgattttggagcagcacaaagcgttcgagaaaagcggccaacgacggatgggccaaagtatggtcaaattggtcgacggaagtgccaaaatgggcgaacggatgggcggggaaaagggcggcgttttcggaggacgaagaggggccaacgacagtgcaattgctgatcagctaattggtaaggaaaaaaatggagaacggacggactgatcaacaacaatgagaaaagtgtattaacagaaaaagaggcaaaagggcttataaagtgtttaaactttaaagtccctgagaacgaaaagaaattcgaaagtaagatagtattgtaagtaaaagtatactgtatgaagtgtttttttctcaaatgcggacatacattctgatcagaagcaattattttttaatcagaacagaagaggtgattatttgactgtctgatcaactgatttgatctgcccccggccatttaccatttgctgctgcgtgtcctcgtcaaagcgcggcagttgcggcggcggtgacaaagccgtgcccccgtccgccgtgccgttggactcggacattgacgccgacgatgtgttgggcccattcacaatactttcgtcagaactgaggctcggacttgcattcggatctgatccaggaagaaagaaaattaaatgcaatactcttaaaccattcattacgcgttgaagcgaatgaattcgccgtttggcatgcgccggtgccattgaaaagtgtcgccgcagaaaatgcgggcaaaatttgctgatcaaattgttccaattgatccttcgcgatgccattctgttgtatttgttgttgttgctgctggaggttcaacaacagaagcaacgggttcagctgcagaaggggcggcgacgacggcgaaaggccgtcgttggcaattgccgaaaaatccattggaattgtgaaaaatataaaaataataattataaaattaagaaatattttaaaaggcattaggtaaatggagaattttttatgcaattattcgaagacaaaaaagtggcaaatggccttaaaaaagaaatgggcaaagtgtccatttgaatggtcaatgatcagtgacaaaagttgccactccactccaatcacttctcccattttggtgggatttgtcagagggcaaaatgaagaagaaaaaaagatcaaagcaaatttaccgccaaagagttaattactccgtttgatgggaatggcggattattagcaaaaggaacaatttttccatttgcttttacacccaaaacaaagtgaattttcatgttaagaataaatttttatgcaaaaagaagtgacattttacagcaaaaaatataaaatgataaccattttattatatatttaattttgctgattttatttttattttcttaatttttcaaattaaaatacatttttataaaatggagtcaaatccctgctctcatctcaccaatatattaagaagataaattaagaatttgaacacatcggtcgaatataaaagaacgaatgattggattatacaaaataaaacaaaacataccgtatgaccaccgaacaacttttaaaaggggttaagatgggaattgagctgaagtttggttggcggggggtgccgtcacggcaaatgatgcggtgggacattggcacttttggggagatttggcactctttctgcttctgatggggtgggcgagggcaagggtaagcagattatggcctaaaacatttaacggatcaccccgtggggaattggcgcaccctccgcacaaaatgggcggggaatggcaaagaatgggggaaagggagaggaaaagcagccaaacgacaagctaatcgctcaaaaacacattcttgaattgtaagttttaagtttaattataattcagagcggaaataaatttttaaaattaaaaatgattttaaaattctaaatattctttcatttttgagaatttcaataaattaattacttttaattatattatgttaaatgcaatggaaaatgggaaattaccaaacaatggaattaatggg

SEQ ID NO: 12518 - DNA, 2281 bp, Heterodera glycines
actcaattatcaaataaataaaaaaaactataaataataataatttaaaataaaattgaccaaaatattaattgcaagttattacttcgagcagaatattaaaattctatttttaaacaacattaattcaaaaaataagacaacaaaatttggaccaaattttttgtaaaaaaaaaaaaatgaaaatctaacttgccgacgaacgaccaatttggtcttcaagaaccaatcattaatctagcctttctcgaaatctcgcgttccattttctataccagatattcgggagtccaacgcaaaaaatattggatttctctctcccctaaaaggtgcccggtttcaagcagtctctgcgccgatacttcctcttcttttcaccggtcagcaacatcagcatgcagggcacaggtgccggtgccgcgtgcggtgtgccattgcctgggatcaatgtgcatgccgcttggtacaacaatttggccaagaaacagtcatgtggcaatggtggtggtggtcatggaagaaatgttggcatctacgtcaatggcagaaaagtgggcgccggtgctggtggtgccattggcagcagcatagacgccagacggcgccaatcggtggcacagattggcaccactggcacggcaccaacattgaatgatcatctacagcctcatcaacggcatggaggaggacgacgagcaataagcacggtgaaccccccagcaggtagtcaaagctgctgggttttgttcaagactcttgagagcttcatacgtgaaataatttcggctattatggggctttataagaccagtgatttctgggctataaaccagcttaacacaggataaacctggatttggttattttgggcttttttatgataaatgcctgatcatgaagcctgtcctcgggttttttggatgcctgatcaaacttctatttgaccctaacaaaaaaaaaaagtcataatccagaaaatttgggttttcgacttttgttcgagttcggcttagggattagaaatttgttaaaatagatgtcagattaatgatcagggatcccaaaaagacttgggaacgagaatttcataaattattaccataaaaattttttgcaaaccaaaagggtacttccccccccccctttttttttgagggtacactctttataattaccgttagccaaatttattattaaaatccatttttaaattgaatatataaatttgtttttgttttttcagcatttcccatcgcaattgtgcgcgagtcgtcgcgctgtgttggcgttgcgcaatttcgtcgccatcaaaccgagtcgcaaccattgaaacagcaaccacaaatacatcaaaattccacagaaactgatgaaacagtggccgaagaatgtgtggtagacagaatgccaccacagcaacaaatttctaccgaagattcatttgacacaaattcatcatcaaatggtaaatattggattaaaaagtgctttcataaatttatttatattacatattttgataaataatttttattctaacaaaatttatttcaaaaatttcatgctaatatattacaaaatattttatttcaaaattttaattgaatatttataaatgttattttttttatttttaaattcaatatttattaaaactatttaaaaatgaattaatttttatttttaattattaaaaatttaaaatgaatatttataaaaaaatttttaatttttaaattaaaattgttcaaaattaaatttattaatgtttcattatcttttatagaaaattgtcgcatttgtcctgaagaagctgatcgaaaacggtccgggcaaagcattgcaagccgaatgtctgtttggagcttgcgcatcttcagcggacaatggagagtcagctcttttttttatctttaaaaaattttcattaaaatataataaaaaatgtacttcaaaaatttattattttttcaaacttgatgaaaatttcctcccagttcttgacaaaaaaaaattttttgacatttcttcccttttctcttcctgacacgtttttttttggggggggggggggggggggaaattgtcgggtaaaagttgtgcttttgcacgtagcggaaaaagccgcacttttcgaacaggtcgcgcaccggggctgaattactttggcattttgtttcgacaatttattttaataagtaaatgccgcccacctttcgctgctgcaaaatacacagaactctttgctctcgcatttcagcgaaaatccgttgatgttttt

SEQ ID NO: 12519 - DNA, 2322 bp, Heterodera glycines
  unsure (1)..(2322): unsure at all n locations
ttaccgtatttattgaattatagccccgcccctgaattagagctcccccccctctgaaataaagcccctttctagggggttgaaaaataaagcccccccctctgaattataaagcccctctctgaaataaagccgccccccttatgaggggggttgaaaaatagagcacccgggggctctattacaataaatgcgataagtcccatcccaacccaatccaaaaacggattttttgattgcctaaccgggccggatatatgaatataaaggcaaaaaacttgtgatgattgttcgttcacccgtccgtccaaacacaaatgacagctaacattcccagcaaaaatatgatcggaaatgggcaaaaaaaaaaaaaatcaaaaacaattttaatatggaaatttatgtgcaaaaaattattatggtaaaaatgatatctaatgagatatattaaataaaagataaaaattttaataaatggatgatttaaatttaatttaattaaggaataaaagcattcactaattttgccaaattctttacaattaaattaaatcagcccaaaaaaattcataaaatattttaacatttttagtgaaataattagaaatttcttgtacaaaattaataatttaattacatgtatctcaaaaataattaataaaaaaagtatgaaccatttaatggaataagtcgacaaattttcaataaaaacttggcaaggttaacccaaaaaatggagactcattaagggaatttgttataaattttaaaaaatttaaaatatatccttaagaattttacgcaataaataaaatcaaaaattcattgtgtgccaaaatgggaattgaacttgaaaaataattataaggcaaaatcgctgacaaattggcaaaaaaaaaaaaaattttttttttcttttcgatttgaaaaacgatcgagaaattctatttttttttaaatacaaaaacatttatctgttgaatcgctttaatgataataatacataataaattcaaatattttttttattttaaaaaattattcaatttttttcgcctccgtcatggcattgctgctgctggtggttgccaaactgcgcttcttcattttgcccgaaatatatgagtcgtagaagaattgagcaaacaaatacaggtatgaaagatacatcagaccgccaagagacaaaacattccaactaaaattaaaaacaaattaaatttcactaattaaataaaattattgtaatttgttgccaattatgacaccaaccaaggacgtccttgttgtcttgtgaaattaatatttttgacaaaaataattcataacttagctcaagagtaaacaaattttaattcttgatatcattcgatagccataaatattctctatttgcctgcaaaatttcaaatttttgttgagtttcgaaaaaaagttatggtcagaagaactcaaaaaatcaggattttcaaacattattggtcataactttttttttttgaaactaaatgaaattttttgaaattttgtagtttaatgaaaaacacttaagggctatcgaatgatgtcaaaaaattctacaaacaaattgcaaacgctagccacacttttttaacctccaatgatcccatttgatttgaccattaaaaattgtttaataatttaacaaataaataaaattattttcgatttaatgtttaattgcatcacctcgcatcacatggtagcacatccgtgaacttaatgtacacaatgtgggtgaagatgtaaacggagatgacaaattggagaatttggatgctggtgatgaatttggcaacaatgcgtgggctccgaattttcattgcttggaggccaaaataactgaaattttcaataaattaaaaaatagttttaaaaatttgaaagggatttattgaaatttcaggttgatcaagcattattatacataaagtattttcggaaaattatttattaaatttttaaatctttagaaatttttcaattttgaatttttttaaaaaacccaggagggaaatttcagaaataaataaattacttcaataattttgattttttaaattcaatataattaattcaacccctaaaaatgcactcacaaatacatgacagtgtgcacgctgaggttcaatgccaaggaccaacggcaccacgcttgtttctccgcataggttatggtggcgtagaggaaggtgagcgcatggtggtaccaatgcagaaagatgacgggacgcttgcggagaatctggaaacaaaaaattanattttaaattcagaattagaaatttttttaatccctta

SEQ ID NO: 12520 - DNA, 1225 bp, Heterodera glycines
tcttcggggcggaactgaaattttttatccctttaggactcaaaagacggggactgaaaaatacaaaataaaaataaaattggggcggggtaacaattttgaatatttttttgcattaaaattagtcgtttttaaattactttcttcgaagaatgtttaaaaacggcttttgggtttaattactttgggctaatttttcaggactttttcggatttatttcgtgcttttttggcatttttatgtgactttttggttattttttcatgacttttttgtattttttgtgactttggcattttttatgactttttcgtgactttttggcgatttttcatgactttttaagtcgactttttgagatttttcgtgacttaaattcccatccctagttatgaagaaaggggttcaaaaatagcatttctacgttaaaaatttttgatctggtgaagctttttagtccacataaatccatattttgggggtttcgggaatattttgcgtttttagtccatattttgaccattttttggaaaatttcacaaaaaaatgcaaaaaaagcgaaaaatatacccctaaagatagaatttttagaaattttttaaaaatacacccccctaaaaagagaaatttttcggtattttggcaaattttcagatattttgtccgcttccaaaaattgagtgtttaaaattaaatctttttcagtttttagtccatgttttggtccgtatttggccatttttgagctttttaatccatatttcgagcatttttagtccatagtttatgtaaatagttgacgctttttagtccatataatttcgagccataaaaattacgaaaaaatcaaaaaacttaaaaacgtaaatactttaataatttaaaaataataatgaatggaaaacacccagaattaatgggactttggatcgcttgtttcaaaactcaaaaaaattaatttttttataaattctttagatttgtataattattgttttattttttattttttgatttgattaatatttaaacttattttaaaatttaattaaaataaattattttttattaattttaaataaacgattattttattttataaatttaattaattgacaaaaacaaaaaaataaattaaaaaagcaaaataaaggtgaattattttcactcaacaatgagtagaaaacacacaaaattaatgggactcgaacccatgacagcata

SEQ ID NO: 12521 - DNA, 1953 bp, Heterodera glycines
ctttatttttattgaagcattgttgacttttagttgttttccttgttcttaagccggttttgaaccaaaaatgcaagattcgaaaaatttgaagtttcgtgccggtaggcgccgccaggaaaatttttgaaaatttgagtgcgatttgttatcagattttcaccaaaaaactgcctaatttcttgcgattttaagccgtgtggcgaattttttttttaatggttttttacgaaaattttattgtctatttttagtctatcgtcaaacttctttgcctccacacattgctgtgtttgaacaatggactgcacaaattctccattctgaagggcaataatgaacaataacaacaacaatcaatcatcgcatctttgatatttttgaacactttttaactgtttaagaaataatcgtttgattttgccaacttttatcatttttactgagatttgttgggtcggacaatggaccatttttttcaattttacggtggtaatttgaaaatgttttttaaaggcaaatgtctgttccaaaatcgcgtccctttacttgttttgagcggctgaagtctacttttaatgtcgcccagggtgacaaggtaacagactcctctttttacaaccttccaatttcgcatttatgggcggctatttattattggataattcaattaaaatccttggaccattcgaagtacatacgccaaaatttttaattgcttggccatttttgggactggggcacggcggtgccgaagtaaaaatacaaattttgacaattattgtccaattagtagcccatgtgatctattagcgttttgtttgaaccctttgtcttttactcgatggcgtttggatgccaaatgcaacccatcattagcatcccccgccttattctcttatccatcgccaaagattagtttggtctctcacctcccctttcgtccgtccctaatcaatggacgatgaatgaccccttccccaccgtccatttgccttcgtcccccgctgttccttccccgcacattgcccaccacaaaaagggcgcactttcccccaggggagtgtttgctgaccctccggtttggtcacttttcggatcggttcgctcactgagtaagtgagtgacctttcccaaaaccgacatttcttatcgccgtcgttccgtcggatgaatgcctttcggtcattgcagaagttttactttagctttgatttgccattctttccccatttttctttcgaaattattcctttttattttaaattttcgcttctaggaggacagtgacgagttgcgcagtgcccagtcgagcagagcgtccacctcccgccaacagtcgcaacggaaagagacggcggaaaaacattcgcaggaaaagcagccccggggacacaacgagcgggaggagcaccaattccctgcgcctcctccccattttgcgcacccttttcaattcgttttcacgaatcgacaaagcgccaacacattcagtctcagttcgggcgcaaaagtcgacgagttgagcacgccggaggaagagagtgtggtcgatgaggagggcataaaagagggagagacgacggggccgccaaaagtgccgccactgaaattggaggaattgtcgccggagggcaaatcgccgtcggaagtgaaaacattttggaaaatgtgcattatgaaaagcaatgaaacgttcagaccgatacgtataacagctcattgaacatggacactgtgctgatacgagaggaagaggaggaattaaaaaaggtaagcaaaacaaaaaagacggtagaagcatactttaggaaaagcatgtcatactgtaatggcttcggcaatcccaaatattcccttgaagaaatcttctgattttggaccaaagtttatgttcgcaaaaaaaatttacgaggccgaaatgtccgctatgtcccgagtaaattcggtcaa

SEQ ID NO: 12522 - DNA, 1986 bp, Heterodera glycines
  unsure (1)..(1986): unsure at all n locations
attttgaaaaatcacctgaaaattaaaaaaaaattttctcatataatttcaaagaaattttttctaatattttttctagaaaaatttctgtttaattttttttttttaatctactcccgggctgtgttttgtggtgtaccatcccttcangatatcaaaaaattttggatcatcaccatccattttcgtgccattgatggcataactttgaccatcatggcacatagaattttaccaaaaacaacgaagactcgggcctcggcggacagatcagtcccgtcatgctccaagtttcaaatgccactgtacgtgcttcacaattaacccatgacaaaaattttggctttggttcgtaaaaatggggacaaaactgaaaccggctcctctaaacactactttctcgaccgctcggtgctacgtcatttcgcgacaagtgcaaaaagggcacttcgcgacagtgcaaaaattgggcacttcgcgaaaaatgcaaaaattgggcacttcgcgacagtgcaaaaatggtgtaaaaatggggcgtttcgcgacagtgcaaaaatgggcacttcgcgaaacgtgcaaatttaaccgaaagagaccgggcctcatcagtacggtgtctctttgggttaattcccaaataacaacgaaaacatgcaaaaaaaaatattgtatactaactaaattacaaaataatattattaaaaatttgtttttttttgtaaaaataaattaaaaaatgaaaaaatcaatgactttactccctattggggatatacccaatgactccctcccattgggcatatacccaatgactcctcccattggacatatacccaatgactcctccccattgggcatatacccaattctttccttgccgcagggcatataccccaagggtgtaacttgtttctgaaaagacgagagtgagagttaggcgagaggcgagagtccccaaaaagacgagagcgagagtttggcgagaggcgagagtccccaaaaagacgagagcgagagtttggcgagaggcgagagtccccaaaaagacgagagcgagagttcggcgagaggcgagagtttccaattcttctgtggccttattttttactccaaaaaagtttcattcatagctaaatatgtaaaatttaatttttcgttggggttttggaggtgaccgcctgatcggcggtgtggagggggaccgcttatcagcggtgaaggaggtgaccgcctgatcggcggtgtggagggggaccgcttatcagcggtgaaggaggtgaccgcctgatcggcggtgtggagggggaccgcttatcagcggtgaaggaggtgaccgcctgatcggcggtgtggagggggaccgcttatcagcggtgaaggaggtgaccgcctgatcggcggtgtggagggggaccgcttatcagcggtgaaggaggtgaccgcctgatcggcggtgtggagggggaccgcttatcagcggtgaaggaggtgaccgcctgatcggcggtgtggagggggaccgcttatcagcggtgaaggaggtgaccgcctgatcggcggtgtggagggggggggggggaagagggcttttggaggtgatatcatgacttacgctccgagagtagtgtgctgttttgcccgtccttgcgcccccgaaaagcttcagacaaagctgaagcgtcgactccttctggatgttgtagtcggccatggtgcgtgcgtcctcgagctgtttccctaaaaacaaggattacgtgaaacatttaatatcctggcatatcaagcggatgtacccgcgaaaatgatgcgctgttggtccggcggaattccctccttgtcatggatcttcgctttcacattctcgatggggtcgctcgcctcgacttcaagggtgatggtcttcccggtgagagttttgacgaaaatttggaacattatattttgtttcaaaatgatccggtgtgcaaaacgtaataaaattgtaaa

SEQ ID NO: 12523 - DNA, 1485 bp, Heterodera glycines
  unsure (1)..(1485): unsure at all n locations
cgaaaacgaaacacgaaacgaaaaaagaaattttgaaatccgaaaacgaaacacgaaacgaaaaaattttgacggacgaaaacgaaacacgaaaacgaaaaaatagccattttcgtacgaaacgaaacgaaaaaaccgaaaattttttaaatatattcaattttaattaataactttaaaattgtatcctctaactgagggaattaagatcctagtaggtggaaaagcggatgtggctctaggacaggggtatgaccgaaaaattttcaaaataagaacatcaaggacaaaaaattattggaaattttacgaaattggaaaaaaaagtttttgtgataaaaactcaaaatttttacgatttgaatagcatttcgttcaattttttatgaaattctatttaatttccaattcgcaaatttcatttgaaatgaatttcgttttaaatttcttaacttttttacgatggatttgtaaattttttcaaaattatagatacctaatttttgtgaaaaatcgttagcaaaattcatataatcggttaaaaagcgcaaatttgttcgataaatctgttaacaatttgcaatcaaattaaaaaaaatttcccgccggcgcctatcggcaccgccggactccaaaaactcttgtttaatgttcgtaataaaatttagaacgaatctatattagtattttagttaaaaaatatggtttttattgattaaaaacttttcaaaaaaccctgatccgtatacgggtccgtatttttcctgcatacggacttatacggagtaagggttttccggggttttagtccgtaagtctgtagtccgtatggatgcctagtccgtagtcctgatcctgatccgtattttcgccaaatgtcgctctctagaaaaaattatcaacatttcaaactttacatacaatttcctgtcagatttaatacaatacttcaagaaatatcttattttttcttaccaaaaaagtcattcttaagggtgtaagtattttcgtctttttcgtccaattttgctctgacgaaaacgaaacacgaaacgaaaaacaaaattttgaaaaccgaaaacgaaacgaaaaaactttggtagacgaaaacgaaacacgaaaacgaaactcaaaaagtgccgaaaatgtaggacgaaacgaaaacgaaacgaaatttcgtccatccctgtttggaaaggaaattacacaaattttaaaaagttaaatgaataaattaaaaaataaaattttaaatactgaaataattctacaatgtgtatgaattgaaaaaaagcaaaaaaaaaaaattcaagaatttgctggtgccgtcggacgaattggacattcgcaatacgccggacggcgcgtgccgcgtacgaattgcgcagttccgcgcagagcatgtgggcgaatatttgtgcgtcgcgaagaacatttacggcgtggcggacacgcgcgcgcattacnacgtggaggcaatgaaaa

SEQ ID NO: 12524 - DNA, 1700 bp, Heterodera glycines
acgggcgactgcactctttttggtgcacgaagcgaacgagtcggacgcgggcgcataccgctgcgtggcgaagaacgcgcatggcagcacgaacagcgcgtgccaagtcagcgtgaaggcattcaaggaggaggtgaagaaccatttgacacgagactcacgagcatggccataataaaatgccgtttaagccgaagaaagagggggccgagccgagcttcacccggggattggtggaccaatacatcgaaagggtaccattgggaggaaattgggataaataatatttaaataaatgatttaaaaataattttaaatgaataaaaatataattagaaaataatgttgcgaatttaatgagtgaaagtgaagaaaagttttttcgttttcttattttattgaaatgaatcaaaatttaaattacttacagaggtttatgggatttacctaatctttttccagggtgacactttggtgtttatttgcgctgtgtcgggtgatccggcgcccgaaattaaatggttttgcaacggcaaactgttgaagccgtcggacaggtgagcagcgaaaggaaagggcactcgaagtcaggacgggccaaggatttcggcttgggggaaaacacccgccccgggcaacgactttttttttttgcttttcccaccactttgcggagctttttccaaaaaacttttcgggatataggggggccgagggggaaaaattgagaattttggctatttagcagattttcttcaaaaattcctgattttgtggattttctgacaaaaaattggtaatttctggattttatgaaaaatttactaaattttttggaaaatttgtgtgaggcaggtcttggagggggtaccaacaagaaaaaccaaaaattttaagcaaaaatactatttttccttaaaaatttcgcatgcggaggggtcttgggcgggggggggggggggggggtgatattcaatcttcgagtcactccgaacctattttactacaagccaaaagaaacgatagtgctgaacgaaacaaacgttggcgtgataaaaagaatgaattggttggaattgaatttgaagaattccaggaaaaacaacgcaaaaaagttgaaaattggcgtaaaagaaaaatcgaagaaggtgggacggaattagaaaaatttagagaaaatgaacacaaaagggtaaaagaataccgtaaagagagaatggtgaattaaaccttgcggctagcgaccaaagaaaagcaagtttttattctctcaaaccttttaacttaaaatgcaaagcaatttattttaatgaagagcttcccggatcaacaaaatcagttggtttgtttaattgttgcaaaaatgggcgtttaagtatacttcaagattttgttgaagaatatcccgaggaattaaggaaattatttttaccagaaaatccaaaaaaaaaatttttttaaataatatacgtcggtagaatagagtttcttcaatctccttataattacgcatttgctttggcttctctaagttgttttcatttttcttttccaacacctggaccaccttgctttaaaatccaagggcaaatatatcacaaatttaatcaaactgcgatgccattcagcgataacgaagttccaactaatggggcattgtattttattgatactaacgaagctttaggaaaccgatgcaa

SEQ ID NO: 12525 - DNA, 1497 bp, Heterodera glycines
cgcacatcagcgtcaagttggccgaccaacgagtgcaagagggtcagccgttgaaattgcactgcaaagtggagggcgtgccaatgcccgagttggtgtggtacaaagacggcgagcaggtcaggccgtccgagcgcgtgcagttggagcgggacgcagacggcaccgcgtatctgatcattcccaagtgcacgatggacgatgatggggtaggagtggcataattcttttgctaattagtcaactgagactaattaacgatataaaaggtgtaccgagtgatcgcaaccaacccgcacggtactgcctacgataagtgtacggtgacagtgaaaaaggcggcagcggaggagggcccgacaaagcatgagggtgccaaggagtttgaagcggccaaagcgccaaaactgttggaaccgctgcaaaatgtgaaatgcccggagggcacggagtttgtgctgcggtgccgtttctcgggcgaaccgacgcccaccgtcaaatggtgggcaaaaagagaaggggaagcggtcaaagggttgctaattatgcttttcccctttcttcaggttcaaggacggcgaccgactgtttccctacgagcgaatgcaaattgcggaaatgtcgccggatggctggtgcgaattgcgtgtgcccgcctccatgcgttccgattcgggcaattaccgatgcattgcggagaatccatacggcactgcgcgtagcgcatgcgaagtgaattatgggagggatattggcatattggtggtgaacagaaaaagccgacaaatatccatttggacaaaaaatagtgattaggaaggcaactgatcaaagtgattgatcaattagaaaaagtttaataataggagaaaacactccgttggcccaatgttgataattgattagaatttggaaaagatttgaaagtgatcaatatttttgcaaattttggttaaatttgtacaaaaaaatgggaaaaattgactggcagctcgaattttaatggaattaattacatttttattgtttgaggtgcaagtgcaacgcgaaaagaagcccaaagaggacctgaaagagttggccaaggaatttggccgtgccccgggctttacaattccattgaccgtaaaacacgccaagccgggcgacactgtggtgggtattctgttaattatgctcatatactcaaaacattgtgctaataaatataattaaattcactcattgtcataccgtatcacaaaaacatacagtaagccgactgatcgaaatttccaggtgtttgaatgtcttccgtacggaaagccgttcccggacataaaatggatgaaagatggcattgaacttgtgccgagcgaatgcataagaattgaggcattgccggacggaacgcaacggctaactctggacactgttgactttccagcggaaggtggccatttgtcgggaattaaatttaaattttcgaaaaataggttactattcgttgtgtggcaa

SEQ ID NO: 12526 - DNA, 4347 bp, Heterodera glycines
ggataaatattttttatttgtttgctacctttttcaacaacaattatatttgcagctggtatttcttcgtttgcattacatacaataattgcggcaacttcatttgtttgttggacattgtaccgatttggatcaaatcctttgcgtaaactcaatagcattttaatttcttgtgtttcgttatttttaatatttgatgattttttttgttcgtctattacatttttcatcattttataggctttgcaaaaggataattttttctgagagatgattctattttttctgttaatgtaacatctaaattatgagaatctaatctaagattttgtgcttcgttactatcgagaaaatataattgcccatttgttggcaaaaaatttttgtctaccggttgtgccactggattatatttatgataaacctgtcctgatattttaaaacaacttggacccggagttgtaaaactaaatttattacaggctaaagaagcgcatgcgaatgaattattataagctcttatatttttcataaaagttttcgaaatttcattatcttctgaaaataaatcttttaattcagttggatattcagcaaataattccaacaaattttttgcttttccaaaattgcaacatgaattaaaaccattctttttttttgaatttgtaggtttttcttctaaaaaatgcattgctttgcaaaaggtacattcaacatttaatcctagcaatgaaaataattttacgtcagtaaactccgctccttttttaaacaaataaccgattggtaaaagtttcacggtctgttcgaattcattgctttcgtttattacatccaaatcaattttatccaaatctatcacattttcaaattcaatatttcttttagttttctttctttcattaatatgttctacctcaaaacaatccaataaccgtcggatttccagaagtagatagattaatattttgtaacgaagatgaggaacattgctccgcaggaggaaaggattgcttagttcgaaccattatgaatttaaaaaataaacaacattaaaagaaaatccgatttaattatgatgttaacatatgctataatcaaaaattcgcaaatggaaagtttaagccttttttattttttaattgatataattaataattatcggaatttaaaggggtaaggctttagcttgattttatgattttttagaaggataattaactaacttaaatttgaaaatttgtctttttgtgattttattaaaaagctaaaaaaggaaaaataaaatacattttaaagtagtaacacaaaaaatcgaattcaatgagataaaaaattaaacttacaacaaactatattatgaataagaaaaaagaacaaaaaacgaaattataaaaataaaaaaacacaaaaaatggattaaaataaataatatttaaattaattaaaataaatataatttaattatgttaatatatgctacaatcaaaaaacgcaaatggaaggtttcgaccttttttaagctttattgataaaagtactaataattggaatttaaaggtgtagggctttagaatgattttgtgatttttttgaagaccaataaacaaatttaacttttgaaaatgagtttttttttaatttaacgaaaaagaaaaaaaaagaaaaaatatacagaatagatatcacgaaaaaatgaaattgaatggaataaaaaacaaggcttacgggcggagcttcgcctcacttaatatatagcaagggattagttttagggaataaaatattccattggaaatccacctcagttaattgtttcttgatccgttcgaataatttttctccgggtacgagtttataatgtctttattcatctcaaaacttatgtcaaaatttcggtctcgactattcatggctgcaatttttaagttgttatgtaatctcttaaaattcttcactaatttgcttttgaacattttttcaattccattttgtttctttctatttaattgttcactttttatttttcaatttacaaattttttttaatgtgaatttttattttaattactttattcaatcatttaaattgaatttcactccattcacccttaaattgaatttcgtatcactcctttatcacaaaaagtcattttttccatccgtttattaaatgccacagaaaaagcagtggtcaatcaacagactttttgttgactgcttaagttaatagaggggccgcggttgtccatcgtccaacactttttgacacaaacggcggtggtagcaaagcaaagttccgcgtggaaattgaattatgtgccgcgagtgacaacgccgccgcccccccccccccccccaaaaaaaagtgggagcaaagggagagagggggcgggggacttattctgctgctcttccatttttgtcgcaaaacgcttattgaatttggcacatcagtgaaagcacagcaaaaacagcttttctggtcaaaagtgccgacactcgttgcgaaattgaatctgttgatgaagctaaacccgagaagaggcggaaggagagactgatgaaacagatggccaaaagtgggatactttagaattttgtacatataaaaaaaaattaaaatgccaaaaagcggctgttaaatttgctttttaaattgtgctttttcatttgaatgttgcctattccatgttgccacacattgtgtgtacagcagcaaaatgcgtagattgaatgtgtcgataaacatctgttcatgcttaatgccgtcttctcgtcataccccgggggtgggattggcggcgcacacaaacagataatttgttgttcgagagcataaacgactactgatggcacacacacacccaaaatgccgccaaaatgtgcgttttgtttgtttgcgctttggctcgtgccgctctcccgatgtcgccctcatccctccccaaaatgccatctatccccttaggcggatatcctccactcctccggggtggtaaggggaagtccttccccaccccctcttcagcttcatccatcatcatctgctgttgatgccgttgtccctaaacccccaagaatgccttcttgtcacaaaaccaacaaaaacggacaatacgccccctccctaaaggcactcgccgcccaataatttttaattacccccttttatgcaaattaaatgacaaattgttttcctcaaaattaggggcggcctattttgagaaaaacaacgcaatgatcattcaaaaaaatcatatttttgtgattaatctttcgcattttccgatttgccaataccaattattaggcttaattgctgaaagttttattttttttaatgcttttggtgtaactgacaaatgaacgattcacttaattatgatgccattttcattattttcgcgcatcattagttttaagatatgcccggaaattgcctcgggcgatataatattaattttaaaaaataattaaaaatttcccatgggatggaaaaacaatgattggaataaatatgcttgaaaggaggaaaaatgtttaattaaatccaagcgaaaaaatatttattcgattttaatgacacacatttaaataataaattttttattttcgtttttccatttttggccttcttccgaaaagcctctcctcaatgcgattcttgcgagcacaaaataatgcgactaattatgcaaaataattacgcctccggcgacattggccattcggcttttcccataaattctcccctctttttcctccgtcccaatgttttcaacgattatctctaagtgtttcgaaattagtcagctaaatttcctaaaaaaaatcgtttaatgcgcctcttagcccattcatccgtatgaaaagatgctgacactctttctgtgatgaacaacagtgtgccaaattgaattttgccctgcggggacgacggcacaaacgaaacgaaatcacaaaatcattagccgctgccttaagggcatgaagacgcaaatgccgaaatccgattttgtgccgggcgggcgcagctgagggggcacggcacaattcttctctgtttttttttgccgcgcacttttgacgagaaaaaaaaacgccgaatggcaaaacgacgacagaattaagcgcaatttgttattttacgttttgtcaacccatgcaaaatgcgctgaacaaaaacagtgacgaaagaattggacaaaatagacacagcagagaaagctaacggttataaaattttgaaaatttgaaaaattttacactcaaacagacggaggaggaggaggagactggccaaactgatcaattcagatgctaagagtgagtggggcgatt

SEQ ID NO: 12527 - DNA, 3813 bp, Heterodera glycines
  unsure (1)..(3813): unsure at all n locations
tcaaatcaaatcaaatcacaattcgattcttcacataagtcacatttattatgattctgttatttcttcgactgtgcaattgactttattattggaaaagaataaattctaaaattttatgggaaaatcaaaacgaatttcgcaaccgcgtcaatcaggagaaaatattagaaaattaaattaatttatatttgttaatatttattaaaataaaccaattaaagtgcaataattctattgtacattcaattgcattttgcttttatagttaagcggaccgggcccagtctagaaagccccttttcgggtcggtccgggttcctgatcaggtacttttggtgcctcgaatgggctccggtgggcctctggaaaatgaccgatcgaatttagtttttggatcggttccggatgccgggcaaatcgccaaacaatttctcccggctaaatcgaccccttggcataacccggtctcggattccagaaatcagaatccggaacttttcctggtccaccgggtttttcgtgaaactccaatagtccctcatgcctcctgggctgtactccgtaaatgattaatttggaccgaatattgctgcttccttagaaatttgattttaaatttcatttaaataaaattttgtgattcacatcgaagattcaatttattcacatttagtaacacaaacataatagagtctcaatttgcgttccattctctgttccgtctctcctcctccgcttttccgaattgccatctcacaatttctgtgcctttattcgcttttcggtggcgcaccgcgacggtacaaaatgtcgtagtgaccggggcggtaaaggaagaacagtttcggttggttgtcgccctcgacgaggaaatcgtggtgccaaccgccgctgggagcctggcttcggtccatgtactcaatgcgaatggaaacacctgaaaatggagaggaaacagagaaaaaacagagggagggagggaagatgggggggggggagatggtgaggaaaaaagaaatgatattcttgattttttttagagagaaaggattatattattagatagcatgccataagataattttctgactccttgttttacctttctcgaaaaattgattcacccattcaagctcgttaaggttaacagcatgataaacattgcccatttgttcgtaaatttcttcaattttcagaagcgaaatttgccgttttgccatgctgtgggtcgacctttcttgtaaccacttgccggagctaaattttttttattaataaatgtttattttttgctggtcaacataataaatttcatagaaacaaatactcaaaatgtcattttaaacagtgatcgaaaccatttttacatatttttttaaatcaaagcaaattcaaaaaaaaaattactgaaaatccatttttttgtgttgaattatcaaaaggtttacttttttcattttcctgctgcggttagttcataagtgacaaaagtcggtgcgccgtgacacgggcattttacttcagcggttataacatgccgtgtcgctgtatttttgactttgttaacttcgattttgatcaaagttttgtttgagcatgggcacgggcaaaggtactcttcaaccattctttttggatcactaaatatgaactgaaattattttgcccttccttccgagccgcccagcctggggtcctcttcaaagaggggggggggacagaaatcgaccacccgcccccttaaattaataattaccattatcgaagaaatcgtctgcccatttttgacaattgtaccatattacacaatagcccctcaacggcatgtcagcgtatacgtcattcagagtttggtgacatcgcaattttttggttcgaacgattttgatgaagtttccgtactctcccaacctaaagtgttggattttcatttttggacaaaaaactagccaaaatccctaaaaatttcccgtcacaaaaatccattattttcttaaaaatgagctccaaattaaaaaatggaaattttttctgttagttaacatatgtattgcactcaatttttaaaaaattttccggcggcgcttgttggcaccatcgtctcccactttttccaattgttaaaaatctgatgttttttgacggatcggattccgtaagattttggtgacacccctggtcacctcaaaaaaaaatttaaatgtttacattgcgctctttccttttctgctgaattcgtacgttacgtgagttttttggcgcatgtcttgcacaagaatgtgaccacagcacaatggtgctttggagcaggcgcaatgggaagcatgtcatatgaggtgattcggattttgattgcggtttgatgttcgtagatatgacagaagtggtcattcctccaaccgccagagtgtgccaatgtgtcgggcttcaaagagccaccggagctgctactgctacttgaagagtgggaagacatttttgaacagaataattggcttaaaaagagtaatggttttacgcaaatttttataaaagcaatgagcaaaagaaaacccaattctcaagtaattttagatttaaaacgacctttttttaaatagccacctaaaagagacacgaaaaaaggcatctaaaatgcatgaaaaggacaaaaagtagggatgtgcgagaagtgatttttactgggaaccgagaaataaccccggaaacgataagagatccaaaaaccgagaaatttctcgactcggaaatcgagaaatttaaatgaaaagaatccaaataaatcaaaaacacattaaaaatggggtaaatcaaagggaatttttgcgtagaagtctcagaagtctcaacattaaagtgtcgccgttttttgctgttaaaaacgctttttgcacactttttacacaaaaaaacttgggaaacatgagggtccgacggtgccggtaggcgaggattctgatcgaaatttggggaacaaatgaataagcaaatcgtaattttcagtgcattcgtgattcaaacggctttttttgcggcatttttcaaaaaactttttttaggcttggggagtcagggtggcaacatgaagtttgggcaccagagggagggatttaaaaaaataaaacaaaataaatatataaaatgttatataaatcattaaaatttagtaaattttaacaacccttgtgctcaaaaatttctatgttattgaaaattaaaaaatttatctatggaaacctgttcaatcttattatttagtcaattcttacggttgtttaaacgcatagttaaacatgtatttagtttctgtttggacttagacctgaatacccagattagttggccccgaaataacaagaacccgtctaattttgtttaaactcataaaattttagaacccgtctaattttgtttaaactcataaaattttaagtcttgaacagaccgagccttgcaatgttataattataagttataaaatacatatgttggcattgatatagaatgaatggtaatgaactaatgagtttagcaaaataagcatgcttaatcgagtgaatattcgttaaaaaattttctattcctaacttgattcgacttgataacagattttcaccaaaaaggccaatttttgcatgacaaattttaggtcaacttttgaaatctggggaattntgtggcacggcgcgctgaagacgccgaccggaaaatttttaaaaatgtgtgtccagggctattctgggtcgctgatcaagaatacgacatcccatttcgatcaatttcgaaccaatgaaccgaattttaaaaaaa

SEQ ID NO: 12528 - DNA, 752 bp, Heterodera glycines
aattaattctatgctagtgagaatttgatgcatttccatctttactcttctccgccccttcagcgaaacaaattttggagtctaaacaattttgtgtaaattaagtgggaatgttttgacacataaagaaattgaaatttaattccacaataaatcaataattcatggattaaattatcgattaattgcctccaaagcatttcaacctaacaaatccataattaattcattaattagttaattgagcacagattattttttgccaatttttgtcccttttccttgtctatttctttctatgcgtggttttattttttgcaaatttcacaaaacatttttgctctttccgtcgaatgttctcccatttcgcattcatttgacggagacggccgacattttgtggggtgtcaaattgggggggggggaaagattcccactcggaccccacccaaccacgagttcgagcagatcaatttatgtgtttatgtgaccaaaaacgagcgacccccaaattggttgaacctttttgatctgaaaatgcaaatttaaattaattttccgacaattcggagaattatttcaaatatgtatcagttaaacaatgatcagagcaaatcagcaaaaccccataaacatgcttttcttgccattcaacttaaaatttttgcaaaatgaaggatatggctatgcctttgccattaatttccccattttcccaggctgaccaatggccaagcaatctctgaccttaa

SEQ ID NO: 12529 - DNA, 2456 bp, Heterodera glycines
tccttccgcctctcatcaatgttttacaaatagtgcgtactctcttcgcttccccttcatattccaaagggaggaacactttcgaatcaatgggcccatggattattttgatttaaaatattattaaattgtctatttttgagattatattactttccagcaccgttagtcagtcaaccctaaacgaattggccatggacatggaaagtgacccgggctggcgatacttacgccgcacgcgcgagcaaattttggaggtgagcaataaaattaaatagtccaaataattaattaaagccattttaggaccaatcgcgtccctatgacagcaaaaagaactgttggattccggacccggaggagggatatttggcgggagagatcgtatctggaaaaggggaaaaggttaccgtaaaattcggcggtgggaacgaggtacggtacatgccggattgatttaaatttgattaaaaagaacggcacttgcagaaaacggtgaagcaggaggaaatccaggagatgaacccgcccaaattcgaaaaaacggcaattttattattaatttttaaatatttttaaatttatttttaggaagacatgtccaatctgacctttctgaacgatgcctccgtgctgcacaatcttcgcgcgcgttatggggcaatgctcatttatgtgggctaattttttattaaaaaagctcaagcacctgcttttagacctattccggcctgttttgtgtggtgattaacccgtacaaaagactgccaatttacacggactcagtcgcccgattttacatgggcaaacggaagaccgaaatgccgccacatttggcaagcatttaaaaaaataataaaaccaattaattcatttgttttgtaatttaatttttttgccatgagttagagcatattatgaacaaaatatagaaatgtttttctcttttattcatttaaatattaattttaagtttgctgtttcggacgaagcctaccgtaatatgttgcaaaacgctgaaaaccaatcgatgctaattactggcgagtcgggagccggcaaaacggagaacaccaaaaaggtgggcgaatttgaaaatcagccattacaatttcatcaatcggtctcatctttctctgtttctccactaatacagttctgctgatcacttgcaggtgatcgcttattttgcagcggtcggtgcgtcgcaacagcagacagccgatggcgggagcacgggtccgacgttggaggaccaaattgtgcagaccaacccggtgctggaggcattcggcaacgccaaaacggtgcgcaacaacaactcgtcacggttcggcaagttcatccgcatccacttcaacaagcagggcaaattggccagctgcgacattgagcactgtgcgtttggcatttaattgtttgtttctttatgaaaaactgcttcctctcgagaattaacaagaggcattctcgaatatcacttactaaccaatcaagttctactttaataaaataaataaatgccaaattttcttctgtacgtgtagatctgcttgagaaatcgcgtgtcattcgccaggcacccggcgagcgatgctatcacattttctaccaagtaaaaacctcaaattaataaagggtttttatcaaataacagctcccaattttgttcagattcaatccggctttttgcccgatctgaagaagcaattgttgttggatttgccggcaaaagattattggttcatcgcccaggctgaattgaccatcgacggcgtaaatgatacggaggagcaccaattgacccacgaagtgagtgaagtttaacattaattcataaaatattttttattttaatattcaacaatcactttgaatcctcacactttttattgtgaattttttaggcattcaaagtgctgaatttcacggactctgaaactcaagacgtttaccgtttggtggccggcataatgcacatgggtaagttttaaagtgatcagcaaatcatgttttgaattgcgagtattattctcatatttaaaggctaatgaaaaaaagagtaaggcttgaacgatttaggcaatatgaagttcaaacaacggccccgggaagaacaagccgaggcggacggaaccgaaggttggcattttgaagcgaatgttgcaactttaaaagaaaattttagaggccgagaaaaccgccagaatgtacggggcgaacccggaggaatttatgaaggctttgctgaagccgcgtgtgaaagtcggcacagaatgggtgagcaaaggacagaaccaagaacaggcaaggcaacccaatggcattggcatttaaaatggcaacaattgatttggacaggttgcctggtcagtcggggccatggccaagggactgtacacgcgcattttcaattggttggtcgtaaaatgcaatgtgacactggtaaacaaaaa

SEQ ID NO: 12530 - DNA, 3063 bp, Heterodera glycines
  unsure (1)..(3063): unsure at all n locations
tttttttaatggtatatggtaagaaaatgttcaaatttttcattgaaaattttttaatttttcatttgggggggggggacgtggtccctccccctctcttccccccccgggtcgggcctgttcaagagcaaacgtttttcgagttctctcggttggtagtaaagctccaaaattaaagaaaaaaaggagagtatctttcacatagctaattaaattcccacaaatttttcaattaattaaatacaatttttttttttttgcatgtttatgaaataaaatttaaaaccgaaataaaatttgccacaacattaaattcactaaatagccatctatttttttaatttgcattttcaaaattcattcattggcatcagtatagaaatggcgtgtccaacactccgttgcccgatgaaacgccgccctcattgttgtgcatgttcttggtacggaccatgttaccaggctgttcatactccagcacttccccggtgttcatgttgccaatgaggtatccgtaaatgccaagctcattgataacttcggcaaactcggcccttttaaagggccagaccataaaattctgtaaaaaatgtgtgacaataaataataaaaaagagaaatcggaaacaaaaatatttgaactcattaatgaagaagtcaaattactttgtaaaattttaaaaattttattaatgttttaagtctgtctacctgctgttcataattattaaagacattttttttttgcaatttataataatattcaaaattagaaagaaatgttatgaaaaattaaatttatttaattagatgaagaatatttctcctaaaataaggaaaaaaatttgttactggatttttcagggtctctgatcaatcactatagcatctatttctacaaactctaaattccttaaaccgagaattcgaaacaattcgatatttcaaaaatttaatccaaaagggtccctcacttttttaattgacgccttgataaacactcttttaaatttttctttaaaattccaattttatcaaaattacctttactgtcaccggattaatgcgctccatcaaaatatgtgccgcaagttcacttcgagaaaatttgcgtaatttttgagaaatttcttcgccccaaatattccctccaccgccctccttgtttggctttagcacataacgctcgggatgggcaattgcatccttaattatacttaattaccaaataaatcgaaaatgcaaataaaaatgaatttgaataatttaaaaatataaaagtaaaaaagaattgcataggattaggaatttagaaaaataaaattctattgtttaatcgatgcgaaattttaaagaattatttgcaacgataatagtaaaatagattaactaaaatagattaattttatgttttattaattttcttttaactgttaattatcgttaatgcgttaattgcataattacctgaataattttttgcgtttcctcgtccttattctccaatccccacagtttagcaaatgttgcacgaattgcgtcaaccatttgttgttcgctgggatctgtgaaaaatcgttcaaccatcccgggcttggcaagcaactgaaatttttaattgaacaaaattaatttaaattaaaaaaaattaattaaaaaaatacttgttgaatttttttcgatgtgctcaattcaaagaacaacgaagtcgctttctgaaaatataccaaataaattacgaattaattaatttaataattacaattgctgttgagcgttcaatcattcgcaatgctgcccaagatttaggcccaaatgcgtcgctgccaagtcgcacgagattccaatatgcaacgccaattggacgaccgtccaatcgaagcgttaaatcatcgtcaagctttaaactgaaaaaaaaaatttatttatttatttaaataaattctgtgcttaatagtgaatggcaaatgcgattattggcttttaagcaaatgatttcgaaagaaaagcccgaaaagattagcataattcgtaaagcgataatttacaaaatttgttgggttttaaaattgttattttttctgattattatgtttattttttaatatactcatcgattttttgcatgtgaatagaccaaaatttgtgcatcattttgtaaaattaagaaattgtctaaaaaaataattttttttttgcatgataaatttatgaataaatatttccattaatatatttgtaaatttattcattcggtacgatgatttaatttttacagaaatatgtaacatcaatgtctcgatcgagacctttattaaatttaatattaatattttaatttttttttttgaaattttcgcccttgccccacttttcaaagcattccacagttgttaggtgaacaattttggcacgtccaccggacaatctttccaactcatattcatcatatcgtttggagaaatgccaagtgcttaagtctttgacgaccacaaataaaataattgcacgcggatcattcaacaatttcctggttattaaaaaagaatgaaaaattaattaaataataattaatggagcgccagaggcggcagggaaaaatttcatatttttcaatagaaatgtcaaaggttaatccaacaaaatagacaacttgagagtaaggttggtcgggaccgggaatctttggcaaaaccgtgaccgggacttttttggttaaaaaaccgagaccttttggctggaaaaaccgggaaaaacccaggaatttcccggtcccggtcaaaactggtcaaaaccgggacctagatactcagttgtactcaggtgtccgtgtctaggtcccggtcccgtacaactctactcgggagtgaaaagattanagaaaaaacattagaatatacataaaatattatttttatgcaaatgtttttttaatcaaagaaaattttaacggattttcgaatttattaataaataaatcaaaaaccattgctggttcaaattttcattttagcctcatcttgtttttgtggctaatataaaaaatatataanttttattttt

SEQ ID NO: 12531 - DNA, 1750 bp, Heterodera glycines
aaaaaatatcttttttttgcatgataattttatgaataaatatttccattaatatttttgtaaatttattcattcggtacgatgatgtaattttacagaaatatgtaacatcaatgtctcgatcgagacctttattaaatttaatattaatattttaatttttttttttgaaattttcgcccttgccccacttttcaaagcattccacagttgttaggtgaacaattttggcacgtccaccggacaatctttccaactcatattcatcatatcgtttggagaaatgccaagtgcttaagtctttgacgaccacaaataaaataattgcacgcggatcattcaacaatttcctggttattaaaaaagaatgaaaaattaattaaataataattaatggagcgccagaggcggcagggaaaaatttcatatttttcaatagaaatgtcaaaggttaatccaacaaaatagacaacttgagagtaaggttggtcgggaccgggaatctttggcaaaaccgtgaccgggacttttttggttaaaaaaccgggaccttttggctgaaaaacccgggaatttcccggtcccggtcaaaaccgggacctagatactcagttgtactcagttgtccgtgtctaggtcccggtcccgtacaactctactcgggagtgaaaagattaaagaaaaaacattagaatatacataaaatattatttttatgcaaatgttttttaaatcaaagaaaattttaacggattttcgaatttattaataaataaatcaaaaaccattgctggttcaaattttcattttagcctcatcttgttttgtggctaatataaaaaacatataattttatttttagaaaaattttcattattcaattggacttcttcgaccatcgctaaaatacaaattattcatttttctgcataatcatgactaattaaaagcaataaaaaaaatcaaaaaatatattttaataaaatgactgaccaagccttgtaaattattttggcaattgccgcgcccgaacgattttcgggcaatgcattgctgatcatttggtcggaacaacctgtgtgtttgagcattcgctgatgaatgctcaaaagccgatcttggcatcccgcactgccaattgagccaccattaacttcaatctgaaaaaatttggcaaaaatatttataatatttttaaatttgtttcgtgaaataataaattatcgtttggtcgacctgctttagttggtagtttggttgattggactttgaattagtttcagctgttatcatataatcctaaaatagagaaataaaataaattatataattattattatataaatattacttaaacttaaaaaaaatttaaaaaaaaaatattaaaatagcttagttatcactgatctgatcagtcagtgacaaaagtaattacaaaactcggaatacctcatttaaattgtatatttaaaatccatttgggtgtgtctgttttgatgaacaattttagtactttatttataaaattttgttgaaactcaaattatgtgaatttaaatttgaactgaccgatcgttgcaaaaagatggaaattggctgtttgatcccttcctttttaatatcttccaaaatacccagcagcgtccgaacagacgtatctgattcaatcacatctttataggccatttttaaaaactcgaaatcggatgcaaatcgaaaatacagcagactcatggcctaaaatatatga

SEQ ID NO: 12532 - DNA, 1083 bp, Heterodera glycines
aaattattttcgagaattttttgccaaatatcttttttatattatttattaaaaatttccagggcggcgcctaccacgacaccgttgtgggctcaatgtttctaaatagacttaaaaaacatataaaattattattttgtattaaaaacagggacctcgaaagtccaaaactctgttttttaatgggggcataaggagccaaatttttaaaatttcaaaaaatggcgcaaaatgtagccaagactctcgtatattcgcgatggcgctttgggtcagagtacagtacaactcgccgacgccaacatgccgatggccgactcgctgacgctaagctcgccgataaattaagcaagaaaaaatgatgaaaaattaaaatttcttgatttcaaaaaaaaatcgaaaggcaatataataaaaaaaatttaagtcataatttaacttttcttggtattcgctcaacggcactgatcttatctttgcgtatagagaaagaagatatccattaagagtttgttcgccgcgttaacttttgaatttgtagcggattatacttagttgttactaaattttgtcgcaatttttttttttcaaaggtgtgtaaaaaaaacctaaaaacgctgatggattctactagttttttttttaaatttgttcgttcgtttgttttttcccattcaaagtaaattgcttagttagtgatcagaagcaaaatgcgcgcatgtgagcgaaatttttcgatttatgaccaatgtttctggcatttatttttttatttataatcctttttacaggaaaatttggttttaatttataaaatttgaattttttccacaatttttcttgaataattatcggcgagtaaactatcggtgcgtcgatgtccaccagctttcggcaccatctgaactctcttctttttttttaaaaacgcggcgaaagattattgactttgaactagagtgccactggaccgggaattttgggcaaaaccgggaccgggacttgtaaaaaaatttttaaaaaattcaaattttaattatttttttttaaagtgaaaataatataaacttatttttttatttt

SEQ ID NO: 12533 - DNA, 1332 bp, Heterodera glycines
agacactaatgtgtgtcatgctttgaaaaacattagtggttgttctgtgactttggtgtgagacactaatgtgtgtcatgcttttgaaaaacattagtggtttgttctgtgactttagtgtgagacactaatgtgtgtcatgcttttgaaaacattagtggtttgttctgtgactttagtgtgagacactaatgtgtgtcatgcttttgaaaaacattagtggtttgttctgtgactttcgtgtgagacactaatgtgtgtcatgcttttgataaaacattagtggtttgttctgtgactttcgtgtgagacactaatgtgtgtcatgtttttgataaacattagtgtttgttatttgagtttagtgtgacacaattatgtgtgtcatgtttttgataaacattagtgttcgttatttgagtttagtgtgacacaattatgtgtgtcatgtctttgataaaacattagtgtttattctgtgactttagtgtgacacaaaagtgtgtgtcatgcttttgaaaaacattagtggtttgttctgtgactttcgtgtgagacactaatgtgtgtcatgcttttgaaaaacattagtggtttgttctgtgactttagtgtgagacactaatgtgtgtcatgcttttgaaaaacattagtggtttgttctgtgactttagtgtgagacactaatgtgtgtcatgcttttgataaacattagtggtttgttctgtgactttagtgtgagacactaatgtgtgtcatgcttttgaaaaacattagtggtttgttctgtgactttagtgtgagacactaatgtgtgtcatgcttttgataaaacattagtggtttgttctgtgactttagtgtgagacactaatgtgtgtcatgtttttgataaacattagtgtttgttatgtgagtttagtgtgacacactaatgtgtgtcatgcttttgataaaacattagtggtttgttctgtgactttagtgtgagacactaatgtgtgtcatgcttttgataaaacattagtggtttgttctgtgactttagtgtgagacactattgtgtgtcatgcttttgaaaaaacattagtggtttgttctgtgactttagtgtgagacactaatgtgtgtcatgcttttgaaaaacattagtggtttgttctgtgactttagtgtgagacactattgtgtgtcatgcttttgaaaaacattagtggtttgttctgtgactttagtgtgagacactattgtgtgtcatgcttttgaaaaaacattagtggtttgttctgtgactttagtgtgagacactactgtgtgtcatgcttttgataa

SEQ ID NO: 12534 - DNA, 1279 bp, Heterodera glycines
  unsure (1)..(1279): unsure at all n locations
atatttaattaataaatacgaatattttaatttaatgctagcatgaaaattcatataaaactttttgtccgaataaatacgacagaatttgttaccaatgcaataaataataaatgcatcaactaaaaagaaaaaaaaaaaaattctttcggacgtttttttgtatcatcaaattttcttcagcaacaaaaagcacaaattctttttggcacttttcgcttttaattttcttttgcttttgttggcacaacgacggggtcaggaagaaggaacagaaggagcagaaaggcaagtgtgcttatttgaccggtgatggccagaaaaaagatcagtttgatgtaagtgtcgtatccgaattctttctttgcttttcctctgttttttcgctttcgccgtcgatgtacaaaatttttttgttttccgccgttaaaactttcggcgaatttttggaaaatttcgtgctcaaaaatcgcctcgtcgagcagcatttggaccaggtcgctgggcttcagctgctggttggccttggcctccagcagtttgtcaatgccactttttgccttttgctcgggtgccaatgccttcgcacactctttgaacgatgcgtcaaattccgcaagtttcgccatgccctcggcattttgttcctcttgaatttgctcctcctccgtttgcatttgtgccaaaacgcattgtccggtggcaattagcgccgatttcccccaattttgtgcaatttccttcgcttttgatgttccacccgcgcacatttccatcattttttgccccatttcttctcctacacattcattggcggtctttgtccccaatttggccttttcccacaatttttctgccatttcgcaccctttggccaatgcccaatccatcgtctgctctgagaaacttgcgatcatttctaaattgcattttatttattaatatatatttaatatttatttttactttttcctccattgttttctatcgcatttattccataattttttaaaccttctgttgaagtgcattttgcagatgcattgtttattataaatgtgaagagaatgtaaaggactggaaaaagcattgaatcttttgttaaaaaatatcaaagtaaatttattttaccaaatttaatgggttcaaaataagttacaaatattttaaactttattttttttatctttttttgagatgaatagaaattcttagtcttgcccatgctaattagggaactanaataataattttaaaattatgcaattttagagcatcg

SEQ ID NO: 12535 - DNA, 771 bp, Heterodera glycines
  unsure (1)..(771): unsure at all n locations
tgctcgtgaatttcgccttcttcggaagatgaggaatacattttttgagggaataaatgaaaattttcgaaggaaaaggaagtgttaatttgtgcagtgcacgagaatggtcatttttacttgcaagtaatttggcaaacatttttatcatcgcattttcacatcatttacattttctaggtcattcgcaaaaaataattaatttatttgcctattttccttttttttcttgatatggcaaaatcggtccctttcggcgaccggcattttcttatctatttgtatatttgactgtcggattgtccactgtccgattgtccacctctgtccgattgtcctcactgtccgattgtccactgtccgattgtccactgtccgattgtccactgtccgattgtccgggagccaccacgaaaccccggcggatgatgcatttttaaattgggcaaaggacggcaagccaacaacggtttcgtcaggctcagcaggggaattaatggattttgaccagaaaatgccctcgtatttcgtctaaataattacaaaaaccggccatgcttaagatttgtgttccctgctggtctgacttgggtttgttgctctttttattgctaacaaaacactataaaaatttggtggccgaaagagaatttatcctttgagtcggacttacgtaatcccctcccccgcctcccnacattcacaattttccactagcaaaacaattcgacctcaaaattacttaagtttttactagtaaatccaaaaatg

SEQ ID NO: 12536 - DNA, 2077 bp, Heterodera glycines
  unsure (1)..(2077): unsure at all n locations
atagagacatttcgatttggtcgatacagtgaaaacaacgaaattgatgaatgtgtggacattttagtggcagaaaaataaaaaaaaaatttcttgcaaactgcctttgttcatttatgcatcccctcgcaatctcgccttaaagcaatgtgaaatctgatggcccattcatgcaaaaaaaagagagaaagttgtaccatcccacattctaccttatccgagcacatacccaagctgttctattttattatggattgaatctggtcttaataacgcccacccccccccccgaaatgaaaatttttaaaaattttccagcaaataatggaaatttttttcgaattcccccccccccaaacgaaaattaaaaagtttaataggcaaatttcgtaacaagtagcactcaaatttccaaaaattttttccggcggcgcctatcggcaccgccggacctacatttccactatttttacaagttttttgccttaaaacggccaaaatttggtcatttttagtgaaaaagtgcagttgttacccagcagtggaaaaaaagttattggttaaatagcaaaaaaaaaaaaaggtcttcaggtcgggtcccccccccccgaaaaatgtttctagatacgcccctggttcatcgtgacattaatttcccgagactcaccacgaaaccccggcggatgatgcatttttaaattgggcaaaggacggcaagccaacaacggtttcgtcaggctcagcaggggaattaatggattttgaccagaaaatgccctcgtatttcgtctaaataattacaaaaaccggcaatgcttaagatttgtgttccctgctggtctgacttgggtttgttgctctttttattgctaacaaaacactataaaaatttggtggccgaaagagaatttatcctttgagtcggacttacgtaatcccctcccccgccttccaacattcacaattttccactagcaaaacaattcgacctcaaaattacttaagtttttactagtaaatccaaaaatgataacaaaataaaataagtcgcagagtttaacaaactcaaagtgaaaaatatttgaaaacaattaacgcatcataaaacctttctccaaattgcaattagctgaatttcgctttggagaagtccatctccggatgctgctccataaacctgaagtgtcaaaacaatcggtcatttccatggccttcttttcccgggccactcacttcttcagaatgtcctgcttcttcttctcctcggaagtgggcaagccgagctccttctggcgctggtcgtacatcattttctcgaccattgagcgcgtttcgccgtccaaatccttaaaaagagcgcatatttacaaataacaccaatggaaagggacacaaaccgaaagtttagagttttccggctgaacctgaaaaaattatcgaaatttatttgacaaaaagcaaacgaattccctggggaattgtggaaaaattgcagggaatgagaggcatttgcgtttttaaagggtttgtcccttccagtttttccgttctgcgtttctcttcccctccccaccttttgagtgtcaatttctgggtcgccttcgatcagtttgttccaccagtgcatttggttgatctgacaaaagaaaagccatgtaaaattaaattaaaagatttgtatgttttttctaatttttaaacggtggattcgttttgccaattttggctgttgagtaaaaccatataaaagataatttgcccactcgcacaaaatgtgaatgtattcaaaccttttcgagtgttaagtaaacgcagcgtttgtcttcgatcacccaagtcatggactccacctttttattgggaaaaaacaaatatcttactacaaatgaacgatcatttggcattagtttttctttttttgtgtgcgaaaaatctgctaaaaatttaattagcacggcacttaaattttagaaaattaaactaacaataaatagttttctggacttacaagcaaaaaaaaaagaagataaaagatcttcgaattcggatgcttttacatngtgcatattttttaaaa

SEQ ID NO: 12537 - DNA, 3260 bp, Heterodera glycines
ttttcgctatcggcccgtaaaattaaaaattcacaatagaagtctaccctcctctatccatccaatggtatataatacatatgcattttccgactaacagttcgcgaggttcccttgtaaggattaaacgcaccaattccaagtcgggattttccttcagaagcttaagagtcgcctttcccattttcgaatccaacggctctttgattccttcgagtgcttcgatgaattcgtctctgttccgctgaattccattggatcaaaatgcaaaaattcgtaatttgcttcccaccggtctggagaaggatttaaaaaatgatttaatgaggaaataaaaatgtaaaatattaactgaacagccgaattgttcttcaggtgaaccccgcgaacataaccgtaaagagaaaccgaacgcgacactttggggtccgaacgaataagcttaataaaggaaaagcattcgtataaaaaatgaatgtgagttccacctcggggtcagtgatatcctcaaatcggtcacaaaacacgtagggatgggaattgcgccacaaaattggccttaacttggccacagaaatgaaacggccaaggtttttgatttcgtgttgaaggtaacgctgcttttgcatcccggtgaggtaaaacaatttggcaccctaaaagtgattaacaatcggttacattcgcatggtagacatttcgcacttggtaaagttcggaccaaaagcgatttttcaattgcttctttatggacttcaattgactccgtttcggcacattgtccatgtgagtgagtactccaatcacttttggcatgccgtgcacttggcaaatgttgatgaactcgaacacttccatttcaaagccgaaagaggcgtcgatgagaatgagggcctagaaaatcgaaagaattctttatccaaatatccacaaaaaccgaccaaatcggcaatttttgctgcgtcgaccatggcatttatgtcatttggcacttcaaaaaaggtcacccgtctctttttgctggtcaccacagtcactgggcctttttttaaattccttcgatttttcctactcgaatttcactttttattacacaacaaagttgaaatatcaactttaaactgtccttttggcctttatccgattgctttccgttggcggggggacaaatgcctaaaatagggaatgccaattttgtttaattctgtccgaaatttcattttgcatttgcctttcagctccaaattcgcgagtgccggattggccgcattgacgagggtgccctcggggactgttcacggtcggctctgtccaacttcagtccaaccaaattgtgcgactgtcgcccggttggtcttccggcatggacaatgttggcaaattggtgttcacttacaacaccgtgcgtgagccgatggtgtcgccagaatgccttcggcacgacggcgcacagcgattcgaatttgcggacaatacgctgcactgctcatgcgcactccaatggatgatcaacgcaccggaggaggagcaggtgaatcggacgcaggagacggccaaaaatacaaattaattgccaattttggattattttgacaatcgctaaatggcacaattcagtggttggccgagaattactgcggtgccgaggagaacttcaaggcgctgctgtacttttcgcccgccggcgtcggctgtgccccgtgggttccgacggcgtttgtccctccggtcgctccttttccatcgtcgtcttcgactcgtcctttgcttccgagcagtccccaggatggattggcccagtcggctgaggtcgacgaatggtccgaccccgaggacgaacccttccccaatccgtcgccgcaccggcggcactcttcgcacccccttttctctgcctgccctcctcgtcatcacttggctcgtttcttttccctctgtttgtctgtctttctgccactctcctcctcctttcctatctatcttccctcttttttgctgttgtaaattttcattgacagtgcttttcattttgaccgggaacagagccaattttgaacgcatttgtcaaagcgataaaatcagtcacttctttcaaatgaattctgtgctatttccttattcaaacagaataaatattattatttttataataaaatcagaaacatggaagttatggcaaattggaaggtatcgactagagaccggcgcgggacgggatttttcactatttcgacattttttggaaaattccttaacaaaaatgcaataaaaccaaaaaatacacccctaagaatcgagcaaaaatttttcaaaatatactcctatgaaatgaaaaaaaattttctcaaaaatttactttcttggcaaaaatttttaattttaaaattttttttaggtaactattttgggttttttggtcttaaaaatcccagtcctactcatttgcaactgcaatcagtgaataaaaattatttttgctcaatttttggctgaaaattatgtcactattcgtcactatttcggactttttgacactattttgtcactattttggcatttttactcactattttagttaactatttcgggatttttcgtcactaaaagttgcgaccctacttattaatcttgttgaaattagtcaaaaaatgtaaaatctggtcaatttttgaccaagaatggttttgaaaagcaaaaaatagttaaatttatggtccattaacagatttgattctagatcctctttttaccgtctgatacattcggaaaatcttagtcgccaatgcatcccgctatcccctaaaaatttctttttcaaaatatcattattttctcttttttggaaattttttgaaatttaattgaaattttttcaaaatcccgcaatcccgcgcgggatcccgcaaattttaaatgcgggatttgcgggattaatcccgcgggatcccgtcccccaaaaaattttggattccaatcccgcagcgggatccgcataattagtgctttgagggaatgcaaataaaaatatgccattcctggccgtggtgcgacttttggggatttgcaacttggggacccgacatttggggatcgaacgtcttttggggatctgacatttggggacccgacatttggggatcgaacgtcttttggggatctgacatttggggaacttggaatgaactgatcagtttgctcgccgagtcgggcttcgtcggtcgtgcgcaggcgaacattttaaagtgtcacggggtactctt

SEQ ID NO: 12538 - DNA, 2171 bp, Heterodera glycines
gggtaaatgatggcaaatcaaaaaaatggcaattcgactgatgataaaaatggtggtcaatgtgtccacgattcgtgatcaaatgaactgaccgatcaccccgaccgcccaaaggtccacgcgatttgagtaagggacgcgcagcagaatctctggcgcaatgtattccggcgtgccacaagtgtccgtcattttctcgtccggagaacgcgattggtgctgaaagaggggaaaagcactttaaaaaatggaaaatgctcggaggaattgtcaaaatgtttgtttgtttttctgtcaacactcaccgccaatccgaagtcggtgatcagcagccgcgcctcctgcctcgtgtcgctgtacagcaaattctccggcttcaggtcacggtgggttatgtgcatactgtgggaaatgggacacggattacggtatttaattaattgattgattatgccgatgatggcattctctctgggcttacctgtgcagatattcgagcccggtcagcaacattttgatggccatccgagcttcgctttccgagtaccgccccttggccaccacgcggtcgtacatttcacccccggaagccatttccatgacgatgaacagctgaaaatgaggggggacgatgatcgcactgatcagtctgatcaaattggcgccaataaaactgagaatggcacaaactatggtccaatacaaagcataaaattcataaaaggcgtttcgaccgagggaattcgaacccacggccttccaaaccacaaaatgctcaaccgactgaacttcggtgcccttttttgaggtcctttcgcccttttcctttctcttcccctcggccttacttttgtggcacttcgaaacacttcctcaagtcgaatgacaaacggatgctgaacacggctgagaatgctcagctcgttgttcacagcgccaaagtcttgctcggtactgaccaacttgacggcgtagaagcgtttactgactgacaaatcaaaaaatgccgtttttggaacaaactgtgccaatcattgacattttgagactatgagaccatttttgggagatggatcatttttagaggacggacatattcatttttagtccttttttttctggcattttccactcattttcccattttcctttacattattttatcattttggaattttcaactcattttccccattttccattaaatttgttggcactccattttcctatatattatttgtcatttggcatttccactaattttcccaattttcctttatatatttttatcattttggcattttcctctcatttgcccattttcggcattttcgctgtctctccctccgcccgcgtctcctccaactcacttctgtcctgcactcgcagcacttgggagaatgagccctttccgaccacggacagcacttcgtatttgcacactaatcgcgagtccaaccgaatggccggtcggtcaggaagcaaaacgaagggctgctgctgttgttggtgctcaatttggggggccatcgtcggctgtactgaattggacgggggcggtggcgcggcgaacgctccgttcggcgattgttggagatgctgaacggaggaaaaacgacgagtttggcatttagttaacagcccgatttgatcagcagagccttgactggcaatatattctgatcacaccaaaagtgatcgggaaaccttttttgatcggcatttgataatcaacagattctgattggattgtgataaaaagggcttcccaattgcaagagggggggggggcagaaaggtaaacaacgtttgatactctaattagcagtaaaatataaaataaaatcggaatttatggtcagatcgaaacattggcactctgaccaagaacataaacaaattgtgatctaaacaatgatcaatgatacgcaaatgcaaatgccaatttaagagaaagcattttcggcttgtggcttctctcctccatttgaccccccccccctccgatcggaattaattcgtcccaaatttacgacgcattgcaaaaggaaataaatgacagatggatggatggaaatgactgctgaattttgtcgcatttgcaaaaaaacagcccaaaaaagaatgaacgaaaaaaaaaagtggggggaaagtccttaaaaggaaaaagg

SEQ ID NO: 12539 - DNA, 1509 bp, Heterodera glycines
ccccccccccctagggggaacactgtccaaatttggaactttggggaggggggggggggtaaagaaaatagagcaaaagttctttaggggttcgttgaatttcaaaaatgaattctttcaaagttaaaattatgcagatttctcgaactcagaagagaccaagtcacagggcttctcctttctgtcgctgttaatattcccaaatgaatttgtcctccaattcccattggattatccccccccccctccaaattcgttttgatcacttttaatgtctctgatcagtcaataccatttcatttctcatattatgtttatgtcactatcattaagttaaggatatcctttcagtgaattttgcccactttttccaacttttttagctgtttttttgactgatttttccttttccaccttttcaatggtttttctgatcagtatttccccccccccaccttttctgcttcgattgccttcttttgttgtcgccctgttgaatggttaaataattgtgccaaaaatccgccgcctccgccgttttttcgccccgtcggtgtcgcgtcggccgaagcggcgaattgttcggccatttttggcgaaacggacggcggcgcaggtgcggcggcgccgtcaccgctgtgcatggaattgcgcgaggagggcgaaagagggctaaacatttggggaggaaaggcactgatcggaaatgaaaaagactaatcgaaatgatcatttatatgacaaatttaaaacaatcatttaatgaccttttcctatcaacgtccctttctataagctctgatcactttctcagatcagtccctttctttctctgttcattgcctccttttctgatcacttttccctttatcagtctctccttattaatcactttctctatcactttccctttttgctgctggtcattgcttgcttttccaaccacttttcccacctgttgctgctgttttcatttttctgcgtcgccatttcagtcccgctgttcctcttttgcttttgctgttgccttcggcgcttctgctgttgcccatttcgccacatttccgacggcatcgttccgttacattccgtgcccactttcccatttcggcacgtgccattcgccagcggtgggccaacatcgcccgagggtgccgccgcccattgttggagataaaaagccccacggggagaggccggaggttgctggtggtgcgggtactgcttgaactcatcaacggtagacgaaccgttcaatgagtgtttattgcccatttgggcaaaaaatgaaaaaaactaaacaaaaattgtaaaaaattttgaaaatttaaaatctttttagaagaagagtaacattcagacaaagaaacgaatggaaaaacatttaaaattgcttcactatttcaatttttcaaaataaaatataaatacctcctaaaaataaaaatattctaaaatattcaaattacttcataataaaaatcaaaaaatttaatattttacaaaaaa

SEQ ID NO: 12540 - DNA, 1306 bp, Heterodera glycines
aattcattaaaatgacacttcaaaaagtagtgagaattaaatgggtggtgaaaaggaaaagcggcggaagagaagggaaaaacaaaaagaaaatgggaggagggggtaattaagtaattaattggttgatggacggatgacgaaaaacagagattatccccctcgggggacgtcacgaacaaacaaaaggcaatggcaaaagtggcttcaaaccaacaaaaacaaataggcaaaatggcagacggaaatttgggggaaatattattaaattagcataattaaataaataattattaaattagcataattaaataaataattattaaattagcataattagtaaataattattattaaattattcgttagttgtcactaataaaataaagagaatgcgtgcgtttaaagtcagtatcaattaccaaataattaatgaattaattaatcggatgaatgaacgaattttgtcgcgcgtcgccgaaaggcgacaaaatttgagcccgaaaatttccggcgaggaatgagtacatttatttgaattgattacgtaaggcgcgagacagaaaattgggggcaattgggagagtgatcagagcagccaatgggaaaagaattgaaattatattccgatcaaagaaacggggggggggggggaaagaacggaaattatgggacagaaaataatgggacacaaaagggaataaaaataaaaatgatttatttaatttccttttgcaaaaaattattatttatttttttgggaattgcgccaattcgatggaatgaatctctctctccttcaaattcgccatcgtttgttttttctgttctcaaatttataaatggcggccactttttgtgagagtgcccaaaagtgtcgggagagcccccggggggcaataaatggcgaagaaattggcggcggaatgaataaatgggtggggcacggaaggacaagggagggatgccattcattgggcacacaattcgcgggcatataaatagccaaaataagcgagaaattggtagaggggacaaagggggggggagaaagtgtagcaaaagtgatgggcgagactgaaaaggggggagggagtcgagactgacaaaccgagaaaaataataatcccaaggttcgaaatcaaaaccgagaaacagtgaatggaatgatcgaagtggtaaagcaaagagatggaggaaaaggaaaagctaaaaaaagagggaaaaaaggaaggaaaagcaaccaaccttttgctctaatgtattttgtgatgaaaaaacaaaaaaagatgctttgcagttttga

SEQ ID NO: 12541 - DNA, 3830 bp, Heterodera glycines
tctcgagcatgataggaagtgcggtgcgcaatcgccatttaatttcacagagaatttttaaatttatcttatatccaagaaaaatgactatctcttattttgagaaattttatacgttacaaatgctctcgagcatgataggaagtgcggtgcgcaatcgccatttaatttcacagagaatttttaaatttatcttatatccaagaaaaatgactatctcttattttgagaaattttatacgttacaaatgctctcgagcatgataggaagtgcggtgcgcaatcgccatttaatttcacagagaatttttaaatttatcttatatccaagaaaaatgactatctcttattttgagaaattttatacgttacaaaagcgctcgagcgtgagagggagggcggtgcgcaatcgccatttaatttctcagagaatttttaaatttatcttatatccaagaaaaatgactatctcttattttgagaaattttatacgttacaaatgctctcgagcatgataggaagtgcggtgcgcaatcgccatttaatttcacagagaatttttaaatttatcttatatccaagaaaaatgactatctcttattttgagaaattttatacgttacaaaagcgctcgagcgtgagagggagggcggtgcgcaatcgccatttaatttctcagagaatttttaaatttatcttatatccaagaaaaatgactatctcttattttgagaaattttatacgttacaaatgctctcgagcatgataggaagtgcggtgcgcaatcgccatttaatttcacagagaatttttaaatttatcttatatccaagaaaaatgactatcagtagtatatggcgtcaaaagcgcacggttgcgcacgggtgtttaccgcacaaacccgtgcctatgggaggggcgcagccctttgatgttgccgcccggggacattttcccgcacaatcccaagcctataggaggggtgcagtcctttgaagtctgccgccttgtagattttatttcctcaaatccgcactggcgattttttttcactccccctctccgcgccgcgcagcgccgcggaaggtcatcaatcatccacctgtcaccaaaagtgacaggtgaaggaaattcaattttttcttttgcaaatttaaatctttttgatcccaaaccttttgggccggttttattttctcaatcctgaatttttttatgatgatttttcggatcctgaaattaaaaattctttttgaaaattagccaaaaccgtgcggtttttatcacctctcccctccctccccgcccgtccggcgacgcgatgccgccgccgcgaaaaaaaaatcgataacggaatttggaagaagtgaaaatttaattggtaatgcagcaaataatgccatgaataattattgaattgcacaataaaattgattatttaaaaacgaaatcgaaaatgaataaataaattaaaaaacttttccaaaagtaggtcacctgtcaaccaaaattgattgatgggtttttatttctcttccattatttcgaaatctgcacgtgactttttgttccattatttcgcaatctgcacgtgactttttgttcaaattatttcgcaatatcttccctaaattaggtcaactgtcaataaaatgtgattgattggtttcttatttaaatgtctccattatttttagttttctgttccaactatttcgcaatatggcccgtaattttgcaaacctgtcaagaaaaatgattgatgacattcgaaataaagaatatccagacgatttttttttgcagttttgaataaaatgtgacagttgtctacggaaatgattgattaccctcaaaattaaggcaaacccagacagtcacgtgactagacccctcccccctttttgcctatttcgcacacccggcccaaatcgcaaatcattcaactaaatagttggatttcattaaactctcttcacgctctaattttatttctctccgctctatttttatttgcattaattaaatctattactatttacctacgtctttttcttttcaaatctgctctctttaattcttctgtttcaatttcttgttttaaaatgtcttttaaacgcgtgaactccttccaacccgccgtgccaatggccaaaaaatgggatttccgatcaatcgggtaagtgatttttaataaattaaataaaaaaataatttcttaaacaattataaatacaattataagataataccctttaagaattatttcaaaaaatttttttgttcagaaataattttgctgaaaaaatggaaaattataaattgatggattaccaatcgacaacttgcgaaaaatttggatttacgaaaaatattacggaatttcgtgtcaacccggatgtggagcgccccgatgaagcgatgaaggatgcaatcgacaacatgataaaggtggctttaaaaaactacggaagaaaaaatgaagcgaaaagtgcggatgtttggagtggcaattacgggtgctgggcttgcttccccggtttgggtgccgtatcgggcgtacccgcagaacaatgcggatgttatcatgcaggagattaataagttggggcagagcgggaacggagatgaaaataagaaaatgcttttattatctgagccagttacgatgaaaattacttgcgtgaccatgcccagtggagaggggccgaggaatgtccataaatttgactttggattcaaggaacaccagcggatagggtaagtgtttttaataaaataaaattaaaatagaaaaaaactaaaataaaaaaacaataaataaatttaaaataaatacattaaatttatttaatgaagcaaaaattctttaaagaaaaaatgaaaaaaagcaacaaaaaacctaaaaataaattaaaaatattaaaaaataataatttaatgagccaaaataaataaaaattaaattttaaaaatcaaaaaaatatatattaaaaaatattaaataaataaaaaataaaatttaaaaaatcaaaaaaaattaaataataattaaagtaaagaaaaaaaagaaataattatttttaattaagcaaagcagcaaaaaaaaacagaaaaaaaaatttaaaaaataaattaaataataaagaaaaaataaatggaaataataataattttattaaggattacaaatgcggataaattttgtttgttttatgctttggtggcgtctaaattttatttggaagtgcatcgaaacatttttaatcgatttatgaacaatattatgagacagagggacgcagctattgagcttttacataattgtggaattgatattaacgaatatagctatggtgtggagcaattgccgaatgttcagaaatattgggtgggtttaaatgaaaaaatgcaaaattaataaatttttcaggatgagatttaccccggaaagtaccgggttgtggcgtttgaaaaatctgcggatccgaggaaatcgatacgtgttttgtggaaaggtcctatggggcgtgaaaatgtcgtgccgttattcttggagaatggccattgggatggtctgaagaatttcgtctgcttttttaatcgagggaggaaattctgcattgattgcgaatgtttttacgacaaggatgttaagcatgcgatggagtgccgggcgagatgttattattgcaataaagtgtgcggagtgccgtgtcaaaaggagagtggagtgaagattgaatgcccgaagtgtcgacgttacttttacaattgggaatgctataattatcatcagggacatcagacttgcaacttatggaagcg

SEQ ID NO: 12542 - DNA, 959 bp, Heterodera glycines
cttcatcccccacagcttttctctttcaacaaatacctatgtcactttacacatttcaatcgatttccattctatttataatttatttttgattttatattaattctttaattgtgtaaattaatttgccgttcggcccttctctccttactaaatttgtgattctcttcaattcaaagggtgctttggtcattcttcgttccttggtcatcatcataagcaagcagtccctcttcctcaacaatccctctttgacgtgctttctctctcccccagagaaacgcggcttgactcacctccccccccccaatcattgcccctaatagcccttgcttgtcctgtttgtttgctttttctcccccactaaaggccggccgataaacgattgagaagcaaacaagctggtcagcgaaagaggggcaccttctctccccccccccccccccccctaatacattgtgcttatttgccgttgctttccaatttccccctttcccttccgctccttccatcacattccttccaccttcttaatcatttcattcttgccaagcaatttattctgaaataaagaagatcaaacttttggtcgtcaaattttgatttttggaataaatgcattatgcaatttataaatgtaactgatctgaaatattgacttaaaaatagtttccattccatttaaattatgcaattctccgaatttggcttatatggtcaacagccctttgaatgttttttaagtaaaagcaataatagatattaatttaaactgttcgtttttctttacgctatcatttaaatttatgaagtcgatcactttctgaaaaagaaaatgccgggccgctcaacgggtaaagcggacaaaagcaccgacgaacgaatgatatttgttgatattaccctattcataggcgcatagggcgttgaaacaagttgaagcataccacgcgttgctg

SEQ ID NO: 12543 - DNA, 2266 bp, Heterodera glycines
ttaagacatccaagaattttacgacaacactttgctgaacgaaagagttccgttggatatgaaaacaaccgaaactcgcaaattggccgagagatgggagcaggtgggcgccgaagtccttccatttgcctaatgagtcgctttcctccaaagagtccccccttcggcgccgtctcccgggcattcactccgtcctccttcgaccgtcctgtctttcccgccacaacaactgcaacacctcacacaaatggcttcaatggcgaaatggaaacagccataacacactcttctcattcatattcgtaccaggagcagagcaaacaattggtgaggcggagagacaattcggccgagaaagccaattcgaacctggcattccatttggcaaccattggcggcatacctgtgctaggggggggctcagccaagaggtcttactatcgactttgccccccccccatgggggggtcagagcccatttccattacgatcgaccattattccaattttttgcctgctgaagaccttttttttaaaccacttttttttgcggcgtgcttttcaaaaattttttggggaacatgggggtccggcggagaagataggcgcggccaggaaaattttaaaatttgagtgcaatttgttaacagattttcacgagaaagtgctgcatttttgcgtttttaagccaactattttaagaaaaattaaggatttttattgacgaaaggggaaaaatcgaggttagtcgatcgtagaaaaattgcaatttaatggaattttttttaaaccggcaaaatttttggggttttctacccactctcctcttacgatcgacaatttttctcacaaatcggtattagtcgatcgtaaaaatctggaatttttaatgaaatttattaagaaataaggcaattttccgaattgccaatgagaaaattttataaagtttctgtttcatgttaacgatcgacttgttcgctgactttttttctctcatcccttttcttcttccctcttcctcccttcacccccccccacctcttacgatcgactaagagaccctcctgtgcacaggtatgattggcggtaattgtccatttcttagaccaaggatggatggcatacgcaagagtaccggactcaaacggtggacgggccgagtgggtttcagacggagacagtgaccaacaacggactgattgacgaccagggaaaggcgtgggaggtagaggacgtggtgctggagaagaaccaactcggactggtcagcctgcatttgtccacaatgtccaccgttttggcctctttctgcagggtttctccatttctggcggcaatgaccacagttccggcccttatatccgtgtcactgacattgcgcctggggtactttccatttccaattgcttctgccaattcggcttacgcccttaagggtggtgtggcgagggacggacgaattcgaattggcgatgtgattctgaaggtgaacaacacggacaccgtcgacgtgccgcaccaagtgccttctcaaccgactctctctcctttctgttaatgccctttctgtgcttaggtggctgtgaatgcgttgaaagttgcgggcagtgtggtccgattagtgagttaattatcccccccccccctcgggcataagtgaacctctccaattttagctcatcaaacgaccaaagacttcccaagcgagtgcgtttcgtccctcctcggccgaaccgctctcgcgcggcagtcccccggagggtttcggtttcggtcccccaccgcccgtccccacccatcagcagtcatttggagaaagtgaggccgtgaaagagttggagcaaatgccgggagtaaggcgaatggatttgatcaaagtggagtcggacggaatacacaagggattgggcttcagcatcgccggaggaaccggaaaccagcactatccgggttagaccgtgtcggacccacactctctccctctctcttaccattgttacttaccctcaggcgatgacggaatttttgtgacgcgaataatcaaaggaacgccagcttattacggtaggatgctgctaccgtaacaccgtcaaaaggcttttatttcattttcattcagacggccgactccaaaaaggggaccaaattttggcagtggacaataccatctttaaaaatgtttctcatcagtttgccgtggacactctgacgaacactggggaccgagtgaagattctgttcttgaaaaaccctcacccggaca

SEQ ID NO: 12544 - DNA, 3031 bp, Heterodera glycines
taaaatattttaaatttgattctttgaatttaaattgcaataaaagttttttaaattattgaatttagaatttatatttgaataatttgatttttttaaatttaataaaaattaattcattaattattcaaaaatgaatttactttcatcaaatgacccatttattttgttaattaatgtgtacatctttctcaacatatatccaagtgtttgatccgcttgttcaattgattttaaaattccaattttttcctttaaatgtttcttttcgtcgtccttttcggccttcgattttgtttttgttgaaaatttaaaacaacctaggagaagcaattggcaattcatttaatttatcgcaaaaaaaaatatttttagatttttatcatataaaatttttgtgctcatatagttccaagaaatctgctaaaatgcgtttctgctttaaatttttttaagctttaactaggttgttcacggttatttaaccgaaccaaaaccaaaaccacttttttgggcaaaaacagaaaccgaaaaccgggagtcctaaaaccagtctaaccgaaaacctgggggtaccggcttccggttttttcggttttaaaaatacgcccatgacacctcattctgggaattattgatcgcaaaagaaatgttggtattctccaaagttttgttcactaacagggatgggatttatatgtatgtaccaaacactctgaagatttttctaaaaatatttccacaagtatatttttaattatttattttgtaatttgacaaaatttgttaagaaatcacactcaaattttcaaaaaattttcccagcggcgcctaccggctccgccagcagaccattttctttccctttcccataagttttttaaaatgcgcctttttgtatcactattttccatttcgccccttttccactaataaagtatgtcctttttcagcaaatcttttctttcttgttcatattttcttcgcttttattaataagaaacaaaaagaaatttatgataatgccccaatttaattttacatgatttttttgattttttagcatgtgccgttgtggtgcccactgccttgcctttagagtgtgtctgattgtttgtgtggtggtccagttccatgccgaacaaaatgtgccatcggcttagatcgcagataaattgcttcagctaaaaatgcaataaaaattttttgttgaccaaattcaacaaacttggtatcattcgaaagcgcttaacagcctctattggatttccaaaatcacaaatatatactgacatgtaaaaagttataaataaaaaatatgtaaaaattctaagtcatacataaaaaatatgtaaaaattctgacttttttttgcgattttcatgtttcagctttttattagttttttaattgcttagttaaagcttatcagtagcttatagacatgtggagctttcgaataatgtaaaatttttgaaatttggttaatcaaaaaaaagttatgatgctttaaacggctcagacggaactggccagacagaactgtgactcctacctaaatgtaaatatatttaaatgttaataaattaaactatatttttctaattttgtataattgagtctgaaatttccctattttcttggcactttgtttctgcaccacctcattgtcaccgccgttttcttttgtcgcaagaagaccaccgttagtgtatagcttcaccatcaaattgttgtcaggtacatcaaattcttcgtcctccagcacatcgtagcatttgaaatcggcaaaaacgccgaaaatccaagccacaaaaatatttaatatcaaaagttttatcatttgttgtctgtttttattatttttttcattaatataagattttagtaattgcaaaaagcgaaagattaaaataatatgaacaatttgtaaaaataaaaatattacgcaaataaacacgtatattcgttggcaaatcaataaacaattttatgttgccattatttttcaaaatctagtttatacttaaatgaatttttttgtttttaataatatattaaatgaaatatagccaaattatgctgaaaaatgataaaaaaaaattatgagtctaaatatctttatcatttagcattcttggaccatttaaagaaattttgtataagttttgaagtttttaaattaatttcttttcgatttatttgacaatagcaaagataaaagttaataatgcatttttatttatgaataaagctactatttttgagtgttttctgtttgtgtatacatgtttttttcttgcttattttttcatgcttaaatagaaaaaaatttttgtgtttcagaacaaaagtagtgattttaattatcgtacttttacacagttcctgaattttgcgtattaaataagtaaatatttttatacacatttcaaactcacaaagaaaggataaaatgcaactttggctttctgcaaggcattttgcctcggtaaaaatcccattccaaaagttagaaaatagacaattaaaaggtttgttctgtgggtttgtttaacaaatttggcaggttgattcattgagaatggtggtatatattattttttttattacttttgtcaggaatttaaaatcaatagtctgttattaattattaaagctcgttaagtagcaaaaaatacctggacctggattccaaaaattaattaatcttttgtatttgcttgaatgaatttgatttggtcatgaaaatatagaaatattgagggacgcccattctggcacttttacgaatcgattcacaattagcacaaaaattttggcgctagttaaaaacttcttctcaaaaaaatttatttattaattctgaaaaaaattgttgaagtaaaaaattttctattagttacccattttaagatagaatttgattgttatttgtttgccaaaaatcattctgtcctcaaatgaataattttgctgaattcggcactgatcgtttttaacaatacaatttgttttatcagtgcgcgca

SEQ ID NO: 12545 - DNA, 3822 bp, Heterodera glycines
  unsure (1)..(3822): unsure at all n locations
tgtatcatcatcttcaatttcatcatcgcatcctcttcctcctatttaccaacaccttttttccgtcactgaaaagcacatggaacccccgaacatgagcatggtcgtcggcgatgaggaaaaagactcccgcatttgtggcaacagagcggcgccggcattggcacaccgccacaacaacggtgccgactcggccgctacaacggcacacatggcggaagatgatgctgaagaggatgaggagcaggatgaagatgaggatgatgccgactcatttccgggcgagttggagccccgcgggcgctgctacacatggccagtcccacagtttggagccgtatcaacagcacaacaatcgccgctttcctctctgcatcctccgccaccgaatcatcatcacctccaccaccaccatttgttttcgggtgctcctaattctgcaacaacatccgccacttcgtccaaatttccgtcattgagcagcatcattggctgtggaggtgcgggtactgcttgctcttcctcctcctgttctttgctgaccggtgtcgaacaacaacaaccatgcacttcctcatcacatcactcaccattttccgctctgtccatcgacggtcaacaacaacggcatcagcatcattctcaagcagtacaacagtcgttgttgctgtcctcctccggtggtccttgcggtgtcaccgcgtcatcgtcattctccaccgctcaactcggcacatcctctatggcactaatcaggccgaagccgaagcgagtccgtcgacgtaccgctgacggcggaacggcgcccaccggtgtcacagatgatggtgctgttggtagtggtggtcaagcagcgcagcagcattcacacaaaaagccgaatccctggggcgaggagtcctactcggacttgatcgcgcgcgcgctcggctgtgccattgacggacggctgaagctcagcgagatttaccagtggttctcggacaacatcccgtactttgcgcaccggtccagccaggaagacgcgcaggggtggaaggtaaaggcgcagctaagcgcggcgcgttcgaccccttaatctcatgccaattgcgctccctctctccctccctactgcggtgtcatgacaactcgtacaaaaacaacgcctacaatggtttagatttaagcctaagctttaggctttggcttaagctttaggctaggcttaagatttattttataaaaatgttgttattgtacgaattgccttttggtacgagttgccattgactccctgcttccctgtcttgcatttattttccgtcgatttgcagttgccaaacagtgattggttgcttatctcagaaccaaatcctttacaaccctttaagctctctatccactcacccatggtcattaagtataggatttcgttacttccacttaaaagatttagttggatggttttcaatttctttgtatttaaagaaattgaggaattttttaacactattgtttaaatgaggtctcactcaatggggtgtccttattttctcgggaatggaatgagagttcggtttataaaaattttttttttctaatattggtagggggaccaggaatttaaggaaagcctgggattcgggaccggaaacatgtcataaaatgggtcaagaattcccggtgaaaaaatcggtacttctaaaactatttggtcccggtcccgaggccttccaacttaagttgtttgtgttttgcatcatttaaaaaaaatttcactgctttcagaactccattcggcacaacctttcgctgcacagtcgcttcatgcgcattcagaacgagggggctgggaagagctcgtggtgggtgatcaacccggacgcaaagccgggccgaaacccgcgccgaagggccaacacaatggaggcggccacgaaggtggacatcagagctactgaaaatatttaataagagtcgggcggtggtcccaataagccaattttcttttttttaaatttgaaatcgttagttttgggtttctcgaataaaaaagggtcgtcggttcgtctcgccattgtgaaggagttctttcgaattcgcaacatttaaataagcattcactaattgcccccgtccggtcgcttaattgacttccttccacacttgttaattggttttaattacccataatttgatttgccatttacacctcctcctctcctcctccgcaggctgtcattgacaagaagcggcgtggtgcgcgcaaacgtgtcgaaaccctcgtccaacagaagggcagcaacggcggctgttccgcctccatggcctccattctcagcgctcagtcggccgccatgttcccctcgggcaacgacgagctcaacgagcaaccgcaacagcaacaacaacaacagcagcacatggtgctgaatgctgctgcaccgaccggggggcccaacttcgacacgttcaggtgtggtttggctggctggtggccacgaaaacattgctaaattttcaaagattaaaataatcaaattaaaaattatgatattttcgagaccgaaaatttctcgagactctaaaccaaacaccagaaaaatccgagacttttctcgagacgaaattccgaactgagaaccttggtcagcaaaaagggacttttttttattccttttagtttcctaacctaaaaaatgaagggggaaagtgctgcgccgtacggcgcctgctgagaatcaacggattccctgctccacattttcttttttcattgctaaaactacatttccaaattgcatttttcgtcatataaaatttttcaataaaaaatgcccgtttttataaacgttttgataataaggcatgctattgtgaatataggccccgtgctgagtcgacactgtccgtggtcggtgggccggcgtcctgctcgcgcctgtcgccccccaacgagtcgtccatggaatttcctctgtggatggatcaactgcagcaacagcaacaaaacggtgccgacacggcggcaacggtgccgagctgttcagctgttgtgcttccaacaacgacggcgacgacgacgacaggagcggccacggcaccgccgccggtgatgaacccgcaggtcagcgaactgctcgaccggacggaccaaatgcgactggaggcgacgacgacgacggtggagcagtgcagcagcaacggaaggatgatgagcagttgcaacggtcggttgtgtgggagttatgacgtcacaaacaaaaaccattaaaataaattttgttggcttataactttgctaaaaagcacttcgaaaacatggttttatgatatgagttcatctgaccgtaattttttttgaaagtttgcgaaattttttgaaattttccagactaatagagaacacttagagctatcgaatgatatcaagaaataaaaatttgattatttttaactaaacttatgaaaaaattttgtcaaaaagtttccatttgaatggattttgagtaacgccctttttttatatgggtttgagtaatcgacgtttttccttcaactccaaaaatttggcatttaattatatatttactggaaaatggaatgttttacaaaatgtatggttttgtcccacttccaggcggactgctcaaaatggagatgggctgctccaccgcgtcgtcctccaccgcctcgtgctcctccacaacgtcgtcggttctgctgatgccaaagtgtgaaattggcgccggaggcgacccgtcgttgtcccttgtcaaggtggacacataatcaagggatgggatcgatgccttgtngaatttcatataaaaaattttt

SEQ ID NO: 12546 - DNA, 2054 bp, Heterodera glycines
  unsure (1)..(2054): unsure at all n locations
ttaattntgctgttaaaatattgctccatgaaagtgtaaagttcgggcggctgttctccattattgtcagcagatgatttctccgtgtttgaccatcgcattaaaattgcttccaacactttgtacacctcgtaatatgacaatgtgaattcactgagtttgagcaaaaagttgaaattttctgaaatatttatggaaaggcaattgttagggctgtcaaaaatatgtacataaaatatataagaaaaataccaaaattgtacgaaatatgtaaattaaatgttaaaatcgttatttttggaaaaaaaattctataaacattgaaataggcacaaaatgccataaaaatgatataaatagggcttaggattatgtagggtttccagtagggtgttgacgggtccgagtccaacttgacgctttggcaccctgtcaaggacccgcggtccccggtcttcttaacacaggatttctcgaggcttacaaaaaaacagattttatggtaattttaaagttattaagaaaaaacttaaaaatcccgatttttggcaattttgatgttagaacttttttttaataattgccaaatcaccaagggacagcttagaattcgaatgatattaaaattgttgaattttgtcgacaaagaaaaataaaataattaaaacgattaaaaatctttttttgtacaaaaattaaattattgaaagcagcttcataatcctttgtaatttaattgtaattaaattttatttaatcgctttgttcacccaccaataaattgcggttctctcgcgctgttcgctttaatttcatcccaaaaatgttctttggtttgcgcgtcaatgcgaatgatttgaaaaggaaatattctgtaaattaaattaaattctttaaaaaagtcattaatagcaaatcacaaaattaaaaacggaagaaaaatattttacccattttcgttggtgccgcctctttgtgccgataaaatttgaaaagcggacaaaagttgttccaattgccacccgccgacatcataaaaacgcgagaaataattctcataactaaggatggtatttgtaatgtgaaaaaaatatatttaaattgccaaatattattgataagatattcaattaattaaggattatttgcaatggaaaaagtgccaacaaaatttgtgccaaaagcccaaaatttaataaggataaaaattaggaattgttctttttgattatttcaatttcaaaactcacatcacacaaagcattatccgaatggccaatgagaaggtcagttgcaaaatttggtcgacaacccttttggcaatttgatttttggcggcacaaaacactgtttcgttgtacgctttggcaatgtgatggcccaatttttgatcgtagtgcaaaaagccaaggaattcgttcaccgggtcatcttctctaatcacattcaaatttggcacttcttcgccctctccgattttgttgtccaacacctgaaagggatcgaccgggggacaatttagcaaagcagcaatttggcacagggacaattgggcacagggacaattgggcacagcagggacaatttagcacagggacaatttggcaaagcggcaatttggcacagggacaattgggcacagcagggacaatttagcacagggacaatttggcaaagcggcaatttggcacagggacaattgggcacagtctttggctccatgacaatccgtcagtaaattttttatatattaaaacaccataaattctaacaaagatattttcattttataaaagttttactgaagtttctaaactgacgattatatcaacaaaatgatgcttaccattgaattcattagtccaaattaaagtcaactaccgtttttccatccaaaatttaaaaaatgtcgattgccaaaagcgataaaaacaatatttagcatttttgtttttgccatgtgaataaaataaaatttaaacagaaacttttcaactgcactcccatccctttgnntttcttgtctctcctaattttgttttctttattattta

SEQ ID NO: 12547 - DNA, 1306 bp, Heterodera glycines
attagtgtaaatatcatcgatgatttcggcgaatgttttcacatttttggacgggtcggccgagtcccattgataagacgacgaaacgccaatggtttatcagcaaaaaatgaaggaaaatttgaataaaaagcaatggtaaaattggattttgcattttctaaacggatgaatgaaataacagaaaaataagtttaatagtctcggcttttgatctcggcaattcctggtcaagatttttccaaaatcccggtccctttccaacgtcttttgaaaataatttaaatacaaatgacagttgatttaatataggtaaatataaaaattggaattaataataaatttatttaaaatgacgttacattaccactagggatgccatttttaggtttttacctatttttttcctgagctccccgtggcctgaaacgcacgaaaaccatgtttttttgggctgttgttaagctacttttcgagttattagcacctattttctaggtttttatttttagcacctaaaaaacctaaaattttttgaccaaacttatttaaatgaaaaattttctcaaaaattcatctccaaaatttatttgtttatttcttgacgagaatttttgattttgaaaattatatgtatccttccttaatgatatggcataatatttttgttttttgaagaaaattttcgattttacacccctaaattcttaactttttggcacctattttgggagttttttagaacttaaaacctacctattttggcaatttttagcacctataaatgtaatccctaattaccacccactaaaattcaataattgattaatttttattgtcatattgcgcacatcaaaacatatttttaggtacctaatttataaacaggggaaagaaagccgttaaacaattgagtgcctttttttcttcataaaattgaattttttatgtacatttttttaaaaaaagcttaagtaagagggggcttcgtttgtgctaataggcgccgtctaggaaaaaattagaatttttaccaatttgtcaaagattttgcccaagaaatgcacatttttggggggattttgaatgaatgcaaaattctcaaaaagttacattaagtttaaaaaatgttatgaccaaaaatttttaagaaaacttgcttttttgaatttctcaggtcacataagttttttgaatttttattttagattatataaaatgtgcttaattttgggcgaagttatgaatagggctgggatttttagacacaaaaaatcgcgaaataggcacctaaaataggcagaaa

SEQ ID NO: 12548 - DNA, 5557 bp, Heterodera glycines
ggggggggggacgttcaaggcagcgaaacgggcgaccaaaacgccgctgtttttgccacctgaggcggaaataggaaaacttttgacgccatgggcaattggtgccctaaacaatgggaaaagcggaaaaagtgaaaagcattgaacaaaaaggcatcaatcttcagctgaaagaacaaaaagaaagaacctttcagcaggtcgaagtcttctcaaagaaccaatcaaataaaattcatttacttttttcgtttatttatttatttatcctaccgaatctttcatccgttaacatttgtgttcatttgttttctttgccgccctttgcccatcaaatccgaccttttgtcttgcttttgtttagtcatccattcttttattgatgccaaatatctgagacccctttcattgagaatgggattaggccttataaagtgagagaaatttggcaaattgattgactaaaggcattgttgatcgatcagagataatttggctgatcaaattcccaaaaattcctcaattcattgcattatctcattttgttgatcattttttggttgtttttctatgcaaaagccgcgatcactgaggagaatttttggaggagagaaagggtttaaaaagaaggcaatgagaaaaaagagaagcgaaaaattgactgaataaagagaaacgaaccaattgggtttggttttgtttgatgagtgggaaggagaaaaactcatcaaaagagggaggaaaagcatcggacaaaaagcataaacaaaattagggaagcaaagccgaaaatgctcttcaaaagtcaactaatgaatgaaaggaaaatgctatcaactgaaaaacaatcagtggcaaacgaaagattgatcagtgaatgaaatgataggggaaaaggaagtgatcaagggggggggcaatttaattggcaagggaatttgaaaagaaaaagcaaattaatttgaaaacaaaaatgccaataaaggcaaaaacagactcagaaggatggcagcattgactggatatatgtttttgtccgcacaattctcgctagggtccagtctctcatcacagtctgtttttactagacaaaaatggagtaacgccaatgagaattgaacaaaggagagcaggaaaggaaaactagagggacaaccaactgaaccatccccaagcaatcgtgaacgacggaatatttttaaaatatttttatatttttaaggtggataatattgggagaaaacatttgggccaaatgagtgaactgatccattcattctcacttaaatattctgtccaatagcagtgctaatttgtaagtcagcatttgttcgtttctctcatctctaattagttttgtgagatgaatgattagggcaattaataatttttttttatggtcccttaattaccggataaatgttaattagtaaatgaatctgatacagtcactgaatcaaatgctaataaagaagttgcgtctttatgttaattaaaattgctttaaaaaacatcgtcaaaatttcacaccttttgcaattgaaacgtgcaaaagcaacggccgtgggaggggaaaggacaattgtcggatcggattttcggtttgaaatgcaaagggccaattaatcgctcaaaattggagacggtgaagtattaaaagcttagcagaaaacagagacagttgcccattcccattcattctttgtcttcaagggttttgatcagaaaaacggaaacaaattaaagcgaaaagaaaatttagctaaattttattggctttttttctcgagacggaaatgccgaacggcggagagaaagaaaagctgtcataacaaatcatacaaaaggcaactcgtacaattgcttatgttaggcctaagctttaggttaggccaaggcttaggcttgctttggtctaggcttaggcttattattttcaaaaatatgagttgacattgacccaaaagaaaagcgaaaaatgcaatttgaacgaatctcaaatgttaccaaatataccaatcaaaaacgaagtcattctgatcaaatcggagtgatcagaaagtgccgaaagggctcaatcctacttttacactttgcaattaatttattttggcttaattatatagtttttgttccattttttgcttcactcacctgtccatgcaaattctccgcaatgattgtgtactctccgctgtcctcgggcgtcatcatcgacactttgagcagtgccatcgttccgctgtaatgcgtttgccagcgatgagaagtcaccaatggacggccatttttaaaccagccgatctgaaataagcaaaaaggatttattggcatgccattggtaatgccaattcgtaattcatgctgtattgtgtccagcaggcccattttcttctgtcccaaccaggagtttttgaatctgttcctctcgccacatcccccaactcactctcggctttggaacaccgaccacggaacattgcaataccgcgtcagtgccttccgttaagcgcaatccgcgcagtttgttccggaagagcggtgccatcgctgctggtggttgatcgcccacaaacggatcagacatatcggaggcgggcgacataaagcctagcaaatgctgcgccggttgtacttggtcaagttgtcgttggatgaaggagggcgtggcacgcggggaaaagccaatttgctggggggtcctacttgcaaaagcaacagatttaaattaatttaacttgaaaaatcattggtttatatgtaattattaatatttattttcccagcaggtttcagttcctctattgtagctatttatctgaacacgctgattagcctgttaatcagcagttcctcctctccttaatccttttcttttatccttgatcactctcaactaataattttggtcattttctgatcatcttcatctctctgattagtttgtttgttcttttgattagtttggtgtttgacttaatcaacccgatcatttgatcaaccccccccctctctgttttccacctgtactgctgctgctgcggttggtattgcgactgttgctgctgcggctgcgttttcgctcgctgcgcggccaccagtcgctgcttgcgttcgcgcgtcaccattcgcttttcatccgcaaaccatcggtcgtactgctcctgcggcatgatatgtgcacgggattcagccttgcccgttgcgttggtggcacggcaagtgtactcgcccaaatcctccgtgaacagttgcggcaccgtcagcacgcaaattcccgagcgggcgtcgtactccgtcttaattctgctcaggaaagagtgggtattgcttttaaaaaattaattaaaagcttttaatgacctataattatttatcggttttccgtcctttagccactcaatttgtggcaacggaacgcctgaaaatcaaattcattaaaattaaattaaataaaaaagataatttaaaaattacacaccgacgactcgtgcctccaacaccgcagcttcactgggcttcattggctgatgcttaagctctttgaggaacaaaggcgcggaagggcccaccggcgtttgtgggggcgcgggtgagctactgtaagtgcgtggcgggttgtcatacgataacatgtaccaatatttttgaatgtaattaaagtgaaattggtagataaaaatataaatccgagcaatgcccctggccccattcattggcttcaaaaatgccagcctgatcgacggtttttttggcttttctctaaggttaaaacacaatatgccgtgcttacgttatgctcgtcatgcccccgggcactggggttggtgcctgtgccacgattagcatgcacgtggactgtttgatgcccgccgcattcatcgcctgcaccgtaaaccgaccgcagtccgcagcctgtgccttacggatcagcagccggtacgtcttgccctcctcttccatctgaacggcaccaaaagcatgagatttaaaattttaatagcatttaatataatgaaaaaaaaattatatttaaaaatagccttttttaattgaccttataatccgggcattggctgacattgtgcccgtcctttagccacttaaccaccgggtcaggatgagcttcaatttggcactccagcacaatgttctgcccgatcaaagcccttttgtcccggagaggcttaaaaagagatgaatgtatggattaattaattttttgatgctttgaatttatagcatttttagaatatttaacaattggataaagcatacgcgaataaaattgggcggtgtctgattcgggtcctctttcactccgcgtggcttttggaatggcatttttatgaccgacaaaaaatgctaatgcaataaatgctaaaataattttaaaaataaaaattatttatttattttagtttttgtaatcaaacgaggaaaacaaaaataaaatgaggcgaatctgttcattgtccgcagcagcaaagtgtgaaatgggagaagaagaatgaccgatgggaaccgatggacggacggaggaaaaacgaatcgaatcggacggaaggaaaaatgaccgacggaaaaagcggacaaaacaacaaaacaacagctgcaaaagtgagcacaatgccaacacagtggcgaaatttgatcttttggaaagaaaacaaaacacacaaaaagaaaggaagcaaatggaaaatgaaagaggcgacaaataaaaaataaataatacaaaaagttgagggttctcttaatgagtgcgaattttaattccatttttgaacagtcagttgaaatatgaaaagcaatacgaagcatagcaaaatacgttaagccatgctaaacactcattgggaaaaggtttgtcgcgtccaaatcgctaaagttcagcgagtgccaaatccgccgaccgtctcgcctctcaaaaagcaatgccctcttgaaaaaatgaaacgagtcgcaagagaggccgctgatttgcaggaaaaacaaaacaacatggtctaaagcagcgggagggaaatctcgagaagaaacattgggccaaatgctcgggatcacctcgagaaatgcgaaggatcgatcgatcgactgacttttgatgggtgacgatgagaagggataaagcgaaggcggcggaagccaaaagcctttggatatattacagttcaacaaaatgctttattaaattggatgaaaaacaagatttctgatttcttagaaagtaatttaaataaacaaatccaaggctttgaaaatgtttcaaaaacacaaaactgtttttatattttaattctcataatattacttttatttatttacatatcatctttccctttttaataataatattttctctgatttataaataatatttaacaaataaatttataaataatttaattaatttacaaaataaataataatcaaacattggaaaagggattgattgaacattccgaagaaattcctgttcattgggggggcctgggtttctcgaaaaaaaccaaaatcagttaatgctttcaaaaaccaagtcactaacttccca

SEQ ID NO: 12549 - DNA, 3618 bp, Heterodera glycines
tttaagaaatacactccaaagaattaaaaaaattttcttaataatagatcgccaaaatttcatttttttatgataaaaaattttaggtttaaaaattttcattattcgaaaaacattataaaagattgaataatcatttaaatgaccaaaattaagttatttgattaaattttacgtgttttgctccctaaaaaccttaaaaaaattttttaatgccctttttgatgcctttttcgggatttttgtgcctttttttcaattttttcgtgcctattatagtgcctttttagtcggtctctattgattattaacaaaaaatgtggtgaaaccgaataaatcgatatttttggccaaatttactcatagaagaatgtatggggtaaagcccattcaaaattcaatttatacgaaaatgcaaaaaaaaaatttcaacttagatacctatagtaattaatatatgataaaaaatagccaaaaaattttgtatttttttttaatgataaaatgatttagaagagaaatatatgactgaaaaaatgtaataaaatgggcgggaaatcgttcaaatgaatggcattggctaaataaacgtagccgcgagaatggcattttgtttgcgttaatttttacctctttttttgcggtgttgtcaaggtgattttgtgctttttcaattttttttatgtattcaaccgcttgcaattaactgtaaattattatcactaaatttaaaatatcataattaataaacaacaaagttaataaaatttcataacattcagcaaaaaaaaatcagttgttttcgtttgttttcgttttaaatatttgataatttgcgacaaaatgatataaaaaacacatggacccctctagggatgtgcgagagtttcggtactcgattctcgactgaggaaatttctctggtttttcgcttctcggtatagattcccggtctcggctttttagtctcgtaaatcgagaattttttataggcgcctgcaggcaccgccggactcccctcccaagtctaaaaaaagttttttgaaaaaaatgcgccgcaaaaaaagctttttaatgagctgttttccgggtaagtttgtactttatcgaacctatggaccatttaatatctcaaaagtttactaattatttgaaaaagagaaaattaaaccgcaattttgaccactttgttttggactgatataaaagagaaattgtcaaaaacaaactggatctcttcaactcgggttcgcaatttctgaaattagtttttcagaatcaaattgaaactgtaaattttactggtcgatattgaaaagggtggcaaatttttgatactcataaaagttcaaaaaattatactcacttattcgacaagaaatgggacaggtttttgaaaaaatttgccatgctagttagtgttttctttaggtctaccttttgaaattctttagtacattacaaaatgatttttaaaaacgaatttatatccacaagcatttaataggggcttgcatttataacttctgagaatctcataaatttgatgaattttcaattttatcattggcaacactgcgaattgtgcatttaattagttgccatgattctatgagctatttattacagcaatgggtgaattttaaatagatctgaaatttttaattaacgccaaatatgggcaaagtttgtacggtttaaaggcagatttgcggaacatatagggcccctcatcgtcttatcaagggctttcgagcagtttatcatattgtgttcattgtttgagtgtttttattattgtctagccattcaagaaaattggctctttaggtttgcagattcttaatatttttctgatgtggtattttggcagtaattcctttttccatcttctcataattcccaatttcttggcaattatttcgtcacccatttttgggtttctttcttttatttcaaaatattgcttcatcatttttaatttgtactcatttgtatatttatttgctgcttaaaaatattttttatttaaaaatcctactccttttataatatttggcaccaattcttttttccatctcataaaattttctctggcaataccctaattcattaaaaattttcaaaatttataaaattaattacgaaaatcttttttgattcgttgtgctttgatttgctgctcgtctaatgcatcgtttcccatttgtgagtccaatttctgcagattttctctttgggttttataatcattgtttttctcaatcgtaacaattggctaattggattttaaaattcccaatactttttcaattttattttcacgggcctctccaatcaaacatctggggcctctgatgatgatgacggaaaatgtttataattggggatcaattaattttgtttcaaattttgcgatgggttcaaaaatggcaaattctctctgtgttgatataacttataaaatgaattaaaacgaaattaaaattaaaaagccacaaaaatcatttacattagcatgttaattgcccattcattggggatcaacattagcatgctatcatcggattgatcattcaagttgcagcaatttaagtagtaatttccattataaattctaatttttgcttaatttgatagaattagctataatatactcataaaaaatctgaaagcaatattgattaaattttgatgcaaaatttttttttctttcatatttccaattctaatctaattttaaaattatttgagggttcctatcggataaactcactttccaagtacagggatgccaatttccaagtacataatgggaaaaattcgtgaaatccaagtacattttttgaaagttgttgacttctaattcagggcataggtatctgaaaaatcaggacaccttcgattttacattgatgccaacaaaatgaaaaaaataagctttataatattattggaagtctttatacaaattttcaaattgaaaatgtttttatggtatttaatatttattataattttctttatttataaaatttattcctgcaaaattcgaccaaattttgatgatatatttggtgacggatgggacaaaaaagaaaataatgaaattgtgataaaaattaaactaaatgatcaaaatgaaaatttggaatttattcattttcttcatcaaaacaatgattaaatgggaactgacccaattgatcaaatggcaaattatggtcagaaaaatattaataatcagaacaaaaaaaaacaaatgatgaacaaaaaagagaatttgttaataaatttgatacaattaaagaaaagttgagagaaaaaggaaaatacaaatggaaagaccaaggcaaaattgagagaaaaattgcaaaattattaggaacaaatcggcaattaatacaaaaatggaaaaatgaattaaatttaaataaaaagaaaatgaaaaaacaattatatgatgagaaaaagagagaattcattgaaagatttgatgaatttaaagaattttatggccaaggcaaacagaaagaatttgtgaaggaattgggcatttctgaagaaacatttcgaatatggaaaaaagaataacgccaaaatatcataaaagtaaaa

SEQ ID NO: 12550 - DNA, 1605 bp, Heterodera glycines
  unsure (1)..(1605): unsure at all n locations
gcgcaagccttgctacctgataagccctcgaagtatancacagaagtcctcanccagttgaagcgtgccgttgaacccatccttcccataaaaggcaaaaaaacagcagattatcttcattaataattattttaagtgatgagcgacttcgagattggaatgctgaaagcgatgcgtcatgtcttcccgtcatgcgaacgctcgggctgcagcttccacatggcgcaagcggtgttccgaaaagccagaagcatgggcatttttaatttgttgaacgaagatgacgacgaagcaccggttcaaaggaaatccgttcacaaaacattcaggtgtctttcattagcttatgtgtatttatttgttttttcaaaatcagatctgttctctctttggcactcattctgccactttacgttcggcgcgctttttcaactattgtcagcgcggcaccgcttggagttcaaggatggctggcgtattttgccaaaacctacattgccaccactcaattcgagattgatcgcggggcggaggcatttgaaccgcatgctgatgtcggacactttcttctgcgtcgcactcgaagcacaactcgtaaatgcacctattctgtcatgaatttatgaaatttttcaattttaccgttcagtatttcccaggcatccataatgacaggcagtggaccaatacaattcggactgcattcgccacaaccttcaactccaaccattccattgtcagaagaaagcagcttgcagcttattccacgctgggaacaagacatcgtctgtcctccacgcttcccaatctcgttttggaatgtgtacaccagggctcaaatggcaattgagcgaacgaacaacggcatggaagccgcgcatggacaatttgcagtaaaaatttgtccgttggaagacacttttttgttaatttagtgtgaactcaatcatcatccgtcactgagtgatttcatcgctgcaatcatcaaggacatcgacaaacaactggacattggacgagcagaacgtctccagaaaagcacaaaacgacgacaacggtacatcatcaaagaacaaaatgtggtgcggatccttgacgaggccgactttgaatcggaagaaggattgacgaacgccttgtatctgatcgggctcgtaatgcaaggctttgtggagggacttcacgtccgtggaaatgaagatagtgagaagaaactgatgataccgatggaaattgaatttatgattttaacaatttttacttttatgatttttaaccttttacttttattttttctttggaatttaataaatatctatttgcttccgtgtatttttaggttaaatttaattattataataaaatagctaaatataaaccaatttagaatatatattttggtgaaactcgttgtcaaaatatatattttaggttagtaggcgaaatgaatgtttttgggttagtaggcgaaatgtcgagtaggcgaaatgaatgtttctggcttagtaggcgaaatgaatgtttttggcttagtaggcgaaatgtcagtaggcgaaatgtcggtaggcgagatgtcgagtaggcgaaatgtccatacaccgataa

SEQ ID NO: 12551 - DNA, 2010 bp, Heterodera glycines
tttttccgtaaaatttcaaaaaaatttcgttgagtttcaaagaagttgtggtcaaaaaggtttaccaaatcaatttttgaaatttacaagccgcaacttctttgaaactcaacgaaatttttttaaattttaaaggcaaaaagaggacacttagggctatcaaaaaataccaagtttgtttaatttggatgcttctacaaaaagttatgacgctgatcaaaaattgatcatttttatggtgatcaaattttcaaccaagcatatcttttcatgtaaaagtcgtagccccattattcaaaagtcaaatcagtagagaattttgtgctctttccagtgggcttgcctatttttccttgaaaagatttcccaaccccctaggcatttcgaaaatttcccgattttcagtgtattttgggtgtcccggtcactaggaaggagtgatctgatcaagttgatgtaagagacttttttgatcagcaccaaaagttgtgcaagcatgaattatttcaagtttttaaatgaactataagatggtttttaggtttgagtaaaaattttttgggactatattttctcataaaaatgtaatttgtttgggaaatattaaaataataaatctaaattataattatggtcagcaaatctaattataaattaaaataattatattattaattaattaaattcatttattccgtactgaaatgacccgccccttctgatcatcactcattcgcacttttgtcacttcgactcaccacgtttcccaatatttccgcatttttaaccggtttaaaaactggtttatatacgttgccgcttttttagaataacttattaatgcatgcatctattatttttcatgaattttcatttttgtgcctatttttaggatttttaaggcctaaatcccacctatttcgatgatttttagagccaaaaaatcgtatcccaataacactaacaaacccattcacgcatttttcgcgtgtgtcaaatgcgatttaatgtgcgcaaaatgatgaataaattattaaaaaataatttctttctttccttcaattgtgtttaaatgggcacttctccggaccaattgtgcatcttaacaagggatggcattttctgttcaaatttcgctctctctctctctctcttacccgtccggatggttttggtggaaaaggcattggaaagtgcgcagtttttctcgtccaatttccttctcaaatcgctgatagtccgagtgccaaaagcgcagcgaaagggtgccatttgagaggacgaacaattggcgttggctgtgcaaaaaggtcaaaaggccacgacggatgccggacagaaaaagactgaaaaaaacatattttttaaatttttaatccgttttattaatacaaaatttgctcaccggtgctcttcattcaacaccgtttttgcaacctctgcaaccgttgctgccccgccacaatgccaattgctgaaatgttgaattaaatagtaataggattttatttcatttgacaattggctaattaatgcctccgtcactaacaaatattaccaaaatttctgatcggaacccttcgaaatcagatgagaaataatgcgacgggaaaggtcgacaaaacattcgttggtggacatggtcttggcattctgtaaaaaaaagcaaaattaaattcttgatacagtattcattcgaatcaaccaattgcttgtctggccgttctttgctttgttttccgccaatgctctccatggaaagcaaatggtcaatgattttgtccaattcatttgcttttggcaatccgttgggcgacacaacgccaattaaacatttcttaaaaaggaattggagaggttccctggtgaggactaggtcgttgtggcgccgacgttttggcgccagcttcagtttacggattatagcttttttctttgtcgactaaatctaacgatcttggtatcattcgaaagcccttcacaagctctattagccttccaaaaacaaaa

SEQ ID NO: 12552 - DNA, 2699 bp, Heterodera glycines
  unsure (1)..(2699): unsure at all n locations
ggtttcagtttgggggaaaatgggtgcgtggcgaatggcgacccggcagtgagaaaacacgtccttttacgcagtcactcacgggtcatgcccagtgttagacaaaatcgctcataacgccaaatagagtaatcggcgtaattttttcgcgctaattcaaaattcacaccggtgaacgcctttttcggatcgtttattttcgatcagccataactcgcttcattcccaactaaactcgaacaaaattagtatctaaaaaaagtttttgagcaggagaatttttaatcaagcgaatgctaagcaatttgtcatctcagaaaaaagttgtgggagtttcaaattttattaggttatattttttattagacttcccctatccctaattaattaccgtattcgctaacacaagggaaccacccgaactgtaagtcagaaaatgcatatgtgttatataccattcgatagagcagggtcgacttctagtgtggatttttaatcttacggatgcattttgctttcttcaagagttatagggcctcaaaagtcgaaattttgtgcttgagggctcattttcaagctttttcactttacatcgatttttatccacttcataatgacagattacatttgttctaaacaaagaaataattttaatgcatttttcatatttaaaaatgtattttttaaatctttaatttgttaaaaatttaataaaatttatttatttttatgttggactcgaacccggacccccaaaattaggaatttaaccaactgagccaccaattttaagtgaaaactcagccaaaatttcgattttggaggccctgtaacttttgaactaggcggaatgcaccgctaaaattaaaaattcacactagaagtcgaccctgctctatccaatggtatatcatttatatgcattttcctacttacagctcgggaagtatccgaaatggttaattggataatcacagttcgatttgttcccttgtcagttcgaagtggcatttgcgcctatgcttaaaatcggtttcaatctcagatttaattgcatcttgatgcattataaattatatcaatttacgaaaccgtttctatcataggcgtgaatatctgcacacggttcagttttagtcctgtgaaaattgcattaccatgtggaagttcggcaagttctccgagggcatttcggggaagggcactctcggctgtgccgaaacatacgctgcgcacaccgccgtaatggttcgtagcaaaaattccggaatatggcccattaaaaaattagggataaaatcgaattattggaggaacgagttcgtcccctctcctcccatcattccccctcaaaaaaaagttttttcattttatttcagtttgcatttttttaactttcaccattttctccgtcccattttaggagatgccgcgcacggaaatgtggttcatcaaaatggccgtggatccgtcccgcagagtgagtttaggagaacgttgaatttatgcaaaaacacgagttcgctagctgacttgtcgggcccgcagttgcattattatttattgttccccccaccccatcttttaaatatttctctcatatgccattgtaattgtttgaccagaattggcgtccatttcgaccaatccctcacaaattaatatttncttccgtcagtttctcgtctgcggcagcgaggagggcgaattgcgcatttggcgattggacacagagaaactaccgaaccgaaagaggtgaaacggacggagaggaagaaacacttggggcgtcttttgactttagtgatttttgtttggtcgcgccgaccaaagaattgaggaaatgcattcggcaggtggcgttcagtccggacggaagggtaaatgcatttgttgggatgaaacgttcaaaaagcggacgaatgattcctttgccaggttatgctctctgttggcgatggtggcgttgtgtcgcggtacaatttacaggaaaaggaggagacggattcggacattgagttgatcaactgatgatctcaaccacctttcatatcatcgccactttatacccttactgtttttattgtttctttattattattatttaattgtattaaattaaatactaaaattgcgaatggatttgcatgggttttctttagattattaggtggaccgaattgtaaaagggcggagcagagaaaaagcctctgtgttgtttgcccagctactgacccgctcgctgatgagtgaatgtttgggctgtctcatcggtctctttgcttggccacaaacactcggaggggggggggggggaggaacagacggacggtctgcaggggacgagggatggccaatgggtggtccctttggcaattcacagccaaaagcctcgcttacccctgaaaactccgtttcccaaaaaaatgcctttttcgtttcatttggcgacggattatcgcatttgctaatctaattgagtggtgccagcggggattcgcctccgataactttggcatttccaccctcccctttggccccaatgcttcaaccctttccctcccccatttatttgcaattcttcccaattcattccctcccatttttgcctgggaagggactgtccgttcccctggaaacagtccatcatccggcgggatgcgttgatagaatgacaaccacgaccaatcaccgagatg

SEQ ID NO: 12553 - DNA, 1573 bp, Heterodera glycines
gaggggggttgaacaatagaggccccgggggctctaatcgagtaaactacggtattcaaatcgtatccgaatcaccttcgtgtgacatttgactcagatttccccccgctgcgggttgtcccatgcgacaactgtgcaccacaattctcgttgcagctgctggtctctccattttcttcttctcacgtttgtcatcgatgatgtcatcgtcacccgcaaccgtatgagaagcagactttcgttgtcgacgaaccaccagcacaatcacaattgtcaggacggtagccaaaatgaggagaccacctctgaaagtgggatgggggggggggggggatcaacagtttgtgccattttcaagcaaacagcggaagttggcacgcacccgaggaggccgtagaaaagcaaatccttcaagttcaaaatgccaccgcccttttgccaacattgctcaaccaacaattcaggaccgctttccgccttgtttagaagaaccacgacatcgtccttaaaaaattgtgcaattgccaattaaacaaataaaaaaaattacgatagttccttgttttgctaccccccccctcgaaaaatttaaaaaaatcatagatattttttaaatctatgaccagcaggtgttcagatgtcaaaacaaacgccacattcgtgagattgatgagacgagaccttgacaaatccaaaatatgaatttttaatatttttcggggggcgcgggtagcaaaaacacagaagtactgaaatgacacggacaataaacgctttccatccgcactgaaccaagtcgtcatcatcatccgagatgtttttccacaaagacattgtgaaatgacgcgcattcggcaagccatcgaccggagtcatttgaagaaggttgcacgtgacattcagaaacgcacatttgccttgaccacagttctctccgaagcgatcttgaccctgaaaaacaattaggaattgttcgtacataattaacactgatttgcaacacaaaaacactgactgaccgcacgtccctcgagggcaacagcgcgctcatcaacggcacaaccggttggcatttgaacacgagaaaggaaggatgttttgcaattgatgccgccaccatttgggaacagtactgacatcaccaagcgtttgtccgcagcgtcgtccaaacgaagcgcatcaatttttgcgttgccttcattggttgtcagttgcgatggatcaacacgactgaaaaatgccaaaaaacataaatgaaaaaggaaatttgaattttcaacttttgttcgaattcgggtccggggttcgaaattggtcgaaattaatgtgatattcgtgattagcgactcacagccgcttctctccaacaacagtgaacgtgccgccgtgcactgcggcatctttcttcgcacaggcaaagccgcgcaatgaaaaactgctgctgctggcatccgccgattgggagcagcaacgggcgaagagcaggacgaagacgaacactgacaaaacagaagaagcagaagcagacgaaggccacggttgaagagacaatgaataagccatacgatagaag

SEQ ID NO: 12554 - DNA, 3317 bp, Heterodera glycines
atttgtccttgccctggaaaatcataggcaacgcccatttgttgttgttgttgttgtttttgttgtagtgcagctttatatgatggcatgttgatgtcgtctgattggacacttggtacttgattagcggcgttgaatagattttcccatgtgtcaatcatcccaactttgttgtctgttttcacaatcactattcggttatcatttggctgtgggttgtcttgttttgtggtcggtaacagattgcttctctcacaactagcaatgtcgtagctcttcatagcttgctgcacgcttgtttcactatcatcttcttcactattatcactatcatcttcttcactattatcaacatcgctatctaaccattgtaggattgctaagtacctattcagacataaataatataaaattatttattattagagctcgcatttgaggcatatatatgcctttttgctgcgcgcactaattccgatatactaagcatggcttctttttcttttattatgccttttcttttttgcgttttccggattttcttgccttaaatgccttttttggcattttgccgttttggtgccgtttttggcgtttttttccgaaaaatactattacaacaaaatcgggaaaaaacacccccaagcaaatgacatgaaaatatttcagaaaatacacccctaagaattgaaaaaaaatttaaaaattgatcgccaaaatttcatttttttctagtgcctttttcgcgatttttcgtgcctttttttgcgagctctatttattattgacgtttaactattcagttgctcaaaaggcaaaaataaaatttagctccccaaatgtattttttgccgaaaaaattaaacttaaaaatgaaagatagccaatgacataaccacataacctaaaaattgcatccctgataaaggaattaaaaacaaattaaacaaatacccgcttatcacgaacgcctcatcaattttttttttcttttcaaaaaccattttgatttccataagacgatcaacaagttttacctaaaacatggaattttccctataattgttaaaaccctcttgacgatcatcttacttcagattttttgaatttcttgatggcatcgctgtacactttactaatttcccacagctgaactggagcatgcaatatgaacaggcgtgacgcgtcgttgaacgcatcactcaattcattgactttatcatttggtgtcttctggcctttcggccattgttctgatgcagaccagtacagacgttccaacttttcatgtaacagcagtgccagcagaaatggtcgtccatagagcgcgtcaatgaataccaaacgggccaatctctgaattttacagagttctagaagttttttctgggcttcggtggcaaatgcgaaatggatttttccagattgaaataataatgaaaattttcttgtataatttctgtgaaattccatccatactgggcgggggcggtggtgacccacaaatttggtttttataccgataaaagtgaaaaatatggaaatgaatttttcaaattgatggcaaaattttagaaaattcttcatatttcattaaatttaagctaaaaatatcgaaaatagttaaacatggtaaaaaaacaatttaaaaggaaaaatacaaaagaaagcgataattattgatttccaccaaaagttttcatgcgttttaggccggccttccacagttaaggaaaaaaaatcttcgtgccaaaaattttgaatttggataaaaaatttaaaaatttttagtccatattttttgctttgttttcgatgacggattttagcggatttagaaaaatctcccacttagccttttccattaccagcaatgcgagtgcgtcggctgggatttttttcttttttatttcttctgttatagtccgatccaaatcatcaattacattaccatgctgatgattataatatactaaaacacaacgcagtctctcataattgtcctcggtcagcattcgtacaacccggtctttgccgtccatatcatttataaattcgttgtttcttgtccaaacgtcgtcaaaattattactagcatctttgataaatgctttcaataaatcagcgtcctaaatgagaaatgttttttttgtattaaaaattggtaaatttgcacatgcatctatcggcacgtgtacagagtgcgtaattgcattttttttaatttttaaattcttagaattttttattttattagtcctaaagatcattgtaagcgtaaatttttggtcaatcgtaacaaattccaaattttcttcaagaacctaaaattttgcaccaccaaaaccaaacaaaaaagcatttttttcaatattccattacttttttaattgttgctggcgtatataaagcagcctccttttttccttttttactaaatggcgcaaaggtttgttcacgatttgtttcacaaagatttataatcacaattgcatatttcgaagctcctttgagtttgctttcccgttttctgaaataacaattaacagtttggtaaaagcaacaattttgcccaaaaagccgataatagccatgattttatttttgatagggcccggattcatgactgtaaccagaaaaaaagatgaaagattcttaagagagggacccaaagtcctctttttttacatactgtatatattatatatatatatatatatatatatatatatatatatatatataattttttattatttcttttaaagtttttaacccaacaaaaaatgtttaggtatatatataacccgcccgccaaagaagaaactcaccttaaatcagtgcacaagcctggtgcatcttccttattttttttcccatcaacctgttcatatttttttttgttttttgcaagctcggtatcatatattttatgatttgccttgatttcattacgttcttctttcgttaaagtaaccataatttcatttacgtcatcaaaatcactgtcttgctgcaatttgttatatatgtgattaaatagggactccatttttatgcaaatgcctaaatttctgcgcacttaatacgctcagataagcacgaaaaacgcgttttccgcttgattttgggtgtctacgatgacttttataatgcctatttggtgcctattttagaatttttgtgcctttttaatgcatattttacgattttttctgccttttcctatttcgcaattttttgtgcctaaaaatgaattaccctaatgattaaaaatgattgcatatttggaaaaataataaataatttatatttga

SEQ ID NO: 12555 - DNA, 2225 bp, Heterodera glycines
  unsure (1)..(2225): unsure at all n locations
ttttttaaacatttattttaccattttattcatcattattattacatacagatcaaaatttgtcgatttttccaattttctcaataaaattttaattgaatgaccttacaaaataatgcaatgtggttcacaagttgttacgaattgagacggatacgggacgtacattttttcttagacaatcccagtccatttcggtccactgtcgttatggtaatggtgaagggttctctccacagcgtcacatctttcagttgattgttctgtgtcacttttttgtactggtacagaatgctgtcgagtgtgttgtttgtcatttgttgtattggggttgagatgtctccgcctttcaacagaggactgctgatcatacagccgaggtgtgtaggttcgatgttgcgctcacggctgtcagcaaatgcctcctcgatataatgtttgaaagtccaggtccacattgcctcaggcgtgctcggcaagtcggtaatgatgaattttgacttgactttgacatagtggaatttggccatatgctcgatgtttttctccaattttttaacgtagtctttggccactttcgatgctccttcggcttgttgaactgagtcgtggaagtgtactatgccatgttcattgatcaggaagccttgacggggctttttgggctcggagagaatatggtcaatggaaaagttagtgaagcgctttcggcgatgattgtccatatttttaaatctgtgcagggattgaggaggagtgaacaaaatttcggtatttatatgcgcaaagcatggaaatagtgtgaagaataaaaggaggtgaaagacggaagatgaataaacatttaagcatgctcatataattttaataaaatttaattatacggttccctaaattcccaattaaataatacggtgcccataaagcgcagaaaaacagcaatgtgcaaaaaaaaagtgcaaaatttttaaaatgaatcgggaaaatgatcgggtatacgatgtgtgcactttggccacgcccacttgcgcaccaaatcattcccagcaagaaatcgaaatcattctttattcaaattctagaaaatgaaacgccctaatcctttgaaccttccaacgagtgagaaaaagccaaaacttcgtcgactcctgccggctgaattgaacaacgagcagatcagtttcgtgccattagtctgcctatttgccaatgtgaagcggactccaatcggtcctgtttgttaccaattcgagtgtttccgtagtcagcgccaaaagtgctttgaatatttggtattttaccaaatttattattttattacataaattatttatagaagggtgttattgcagtattcgatgtgatgtttgaggagaaaaggacaccgaagaagaagaaagtgtggagactgcatctacaggaagaactgccgcatgagctcagccgaaatgagcttctacactacctcagttacggacgactgggaacgaatttgttcgagacttattttgtgatgagccaagcaacaaatgtaagcgaaaagttttaaatttttaatgacaacacaaaatttttagtcaattgccattgggaatttgtttgggcttctgctcgattttgcaatgagctcaccaactccttggctcatgaaacgaccaatttgctgtggaattttcttccgacaacatttgccatggattctgcaacaaccgatgaacgtaatgctttctcatggcttttttccggaggtccgaagtgatggttttgaatttttttggctgttcaacccacacttgaaaaagtatgctgggtatgtccgaattctccctgagcttagtcagcctgacaatttgcattttttccttagcattttctaagcattttacttgaccaatttattcatcattatcattacatacagatcggaatttgtcgatttttccattttctcaataaattgttgaaatgaatgaccttgtgacatatgatacacaaaaacaatacaatgtggggcacacgttgacactaattgggattgataggaacgaatattttttcttaggcccattggaaacttattcaggaatgatgacacaatgacagatggtattttttgggctaagctgtcataataaatcactggttcttccattcccttcgcataaattgcacaccaatgagaccctcccttgtaatgtgggtccctggttcacanattagcgctg

SEQ ID NO: 12556 - DNA, 1745 bp, Heterodera glycines
  unsure (1)..(1745): unsure at all n locations
gcatgagctcagccgaaatgagcttctacactacctcagttacggacgactgggaacgaatttgttcgagacttattttgtgatgagccaagcaacaaatgtaagcgaaaagttttaaatttntaatgacacacanaaatttttagtcaattgccattgggaatttgtttgggcttctgctcgattttgcaatgagctcaccaactccttggctcatgaagcggccaatttgctgtggaattttcttccgacaacatttgccgtggattctgcaacaaccgatgaacgtaatgctttctcatgacatttttccggaggtccgaggtgatggttttgaatttttttggctgttcaacccacacttgaaaaagtatgctgggtatgtcagaattctgcctgagcttagtcagcctgacaatttgcattttttcttcagcattttctaagcattttaattgatcaatttattcatcattattattacatacagatcaaaatttgtcgatttttccattttctcaataaattgttgaaatgaatgaccttgtgacatatgatacacaaaaacaatacagtgtggggcacatgttgacactaattgggattgatagggacgaatattttttcttagacccatcggaaacttattcaggaatgatgacacaatgactgatggtattttttggttaggctgtcataataaatcactggctcatccattcccttcgcatatatggcgcaccaatgagatccttccttatagtgggggtcccggtttacgattagcgttgcgggatattgtagagtgaccggagacggtaattggtcactggcgaagcagccccgaatttactttcacccctttggcttaaagtttgatcggcctttttatcgcattgaagaaacaatttttcgcattggcaaattaattcaaatttaaatattttgttggccgaatttcagaacacccgattcattgcaatgtcatttttagaatgtggcgacaaaaattgtgcgagattcgttgagcttttatagacaatctatcaaacaaatgcctatttttaatgcctacgcgctagagctgcaaaatttcttctcaaatgtttttctgctgctttcaatgtgcatacatttatgtttgaaaatgctccaaagatgacggacccatttaccattcaagcatcctaaattaaaattttcataattttttttcattacaaaatatttactttcacccctttggcttaaagtttgatcggcctttttatagcattgaagaaacaatttttcgcattggcaaattaattcaattttaaatattttgttggccgaatttcagaacacccgattcattgcaatgtcatttttagaatgtggctacaaaaattgtgcgagattcgttgagcttttatagacaatctatcaaacaaatgcctatttttaaaacacccgtttcattgcaatgtcatttttagaatgtggcgacaaaaattgtgcgagattcgttgagcttttatagacaatctatcaaacaaatgcctatttttaatgcctacgcgctagagctgcaaaatttcttctcaaatgtttttctgctgctttcaatgtgcatacatttatgtttgaaaatgctccaaagatgacagacccatttaccattcaagcatcctaaattaaaattttcataattttttttcattacaaaatatttactttcacccctttggcttaaagtttgatcg

SEQ ID NO: 12557 - DNA, 3255 bp, Heterodera glycines
agctatcgaacaacaccaagattgcttaatttagtttgacaattaacaaagttacgttccaaaaagtcttccgacgacgtctcggccgacgacgttttggggtgcaccggccaacagcaggtgccccagagaatttgtgaaaatattggcatttttcaagaaatttttaccctctgccgcagtttattaaacagtttcattcatttcgtctcgtcccacctttttcggttttgtcacagcagcagctatggcagtgccatggtcagcagaaactgcgtcttttgtcgctgttgttggtgccgccaacgatggttgttcagctgctgccaatgatttggatgatgacgaagccgcttcgtccccgtctccaccaccaccttcaccagcaaaagtgccgtcctcatcgttggcaccggttttgccgtcaatatccgttgtgtgcggcgtcatcgtcgccgtttcgttgatggacagttcggcttgcagacgggcggcaactcgcggttgaccttgggcaatttgcgcgagcgttggcccgccgcgccgccagcgtcgttccgcttcacaaattgcactgagcgctcctgctccaactgatgttgcagctgaacaacaaaagagaaaaggttaaaaaacaataaaatttttggtttcaaacggaatttttcggttaaaaaccgaaaatttgaaaaaaaaagtttggtgaaacaacgggaaaccaattaaaaaatcagtttttccgccccgaaaatatttgaaaaacgattttttaaataaaaatttttccaaaatcgctaatcaatttcttaaaaatactataaatgttttctggttcatccctctgtcatcaccactccctcccacctttttctcccggtacgcttcgaatgcgctcagttggcactgactgcgcgcctttttgtacgtgcccatgtccacgaagaagccgtgcatgtaggcacgcagcgcattggtgccaatcagtttggacaagcccagctcctccaactgcgacttggtcacaaatttgaagtcgtcgtacactgagaaaaatgggggcaaagtgattttttgtgggattaaccatctttttttttgtttaaaacagcgctttcaagggaaggagactcattttcttaattagtcaataattagtcagtcattaattggcttaaagtgccaaaaatcaaccaagaaattgtaaaggttttcaatttattgttttttgaaaaaatttttgattggaggcatattttttattgaatttttttttgtcttgaattttgagttatttccagaaaaaaacacaaaaggaggcaattaaaattttttttttggaatgcttagattggaaggaacattaaaattcaatggcataaatgtgccaagggacgggggtgaacgaaattttttagtgggttctcgtgtgggagacccctatcccataaaattttacgcaaaattttttcagttctccaacttgcactattgttaaatttaaaaaaaaattgtcgcttgaatctggaagccaacatgcacagtgtgcttttgaagcagtacattcgactgtggcggataaaagcgagcgaaacaattttttgcccaatttatccacactcgccagcagcacagttattgtgctggcaaattctacaaattggggcgtgcgcatcggcgcggaattgaaccaacgacaacaaatggggaaagtgacaaacgcacagaccactaagccaaaaaacgatgaatggaagactccaattaaataaggaaataagaaatgtttttttaaatgcataccggaaggtttttcggcctccaattcttcagtgatcgattcctgaaatataataatttttaaaatatttaaattatttaggaggggggggggattttaaaaggagaaaaaattcatttttaatctgccataaaaaaaattgtcgctgaccaaatgggagcaccagcgcggggcgggccccaatgaaggcacaaaaaattgttgtatttttggctcatcatttgcgaacatgatgatgcctgaaaaagaaggggggggggatataattaaaatcaaataaattaaaaatggtttttaaatggaatggatgtggtgccgtcgaacgaacccacccgagttgggataacgggcaaagtcgcgcaggtccatgcccggctcaatgctggtgaacggctggccgttgtgttcgttccaagcctggcagcaaaaaaatgggaaaattttttctcacgaattttcaaaataaaatttgccataaaatttgatttttataccagaaaatatattttaaaaaataaaaaagtgaaaattataatttacaacgacttttctatttttaaaaaattagaaaattatttttgtttgtattttttgtgcaaggctaattgtaagctaatttgtgaaatgtgaagctaaatgagagtgaatttgaattttcacttttttaatttactttcagtgcccgtccgtccatgctgagcaccagttcctgttcaggtgcaaactgtagtcgggtgatgggcaggccgaaattgtgatttttgctcaaatatggcttggacgaacggacatcgtacagcaacacctgaaaatggaaggatgggttggtggacaaaaaaaatttgactccctacaaaatttcaaaaataatttagagcccttacaaattcaaaaaaaaaaaaaaaattttttttggttttgcgcaaaaagtaaaaaaaaaaattataaaaaatattggtaaaagaaaattcaagaggaaaaaagcagtaaaagggcaaatttttaagaaatttaaaaacgtcgaattttttttttttttttttgccactcacataaccgttgctgagcccaaccgccaaatgcaatgcgtccttaaagcaaatgctggacacttcaatctgagaccttaaaaaaagaaaaaatgcaataaaaatttaaaaaatggctaaaactgacccgccgccgctgtccaggtccagctccaactcgatggccttgttcagcacacagtccagcattgccacgcgtcgtcggcaccgctggtcccacgcctccacccgcgcgtcaccggtgccacagacgaacagctgaaatgcaaaaaaaaaaaaaagaaatgcggccaatttgaacaacccgccgtaattcacgaaaattaaatttgaaaaaatggaaaatgttcgggaaaccgttttttaaagtttttggtgcataaattttttgaaactcaaactaaattt

SEQ ID NO: 12558 - DNA, 1855 bp, Heterodera glycines
cggcgggatcccggtcccgtccgggctctagaaattattgcataggactgaattggcgagctcatcttataaatccaataaatccagacaaccaactaggtcaacaggtctctgtttttctttcagcttttgaaatcataaaatcaaatagagaaatattgtctcagtcgcataaccattttttatgcataaaataaaaattaaagaaaaaatgtttatgtaaaacaaatcacagcgaaaaacaattacaaattacaaccaaatttaatgattactcaaaaacaaaataaagtgaaaatagtggttatgatcggggataatccttgaaaattttgtgaccgtccgattatttttgtttggatagattccgtaaaaaatttttttcaatgattactcggtcggcggagcagtaaaaatgtaaaataaattaatggaattattgcgaagaaatggagacaatgaatgatgatgtgggattgatcgtatggtgttgcttttacgacggctcagttgcagtttttcacgacaattttaatgcttcacaaaatttcaataaattcggttaagttacaaaaattatggcaaaaatcctttccaaacgttttaaaaataacataattttttcaaattttgtaggctaaaagaagggattttaaaacaattggaagacacgaggaattttacaaatggttgtttaagcgaaaaattataaagcgctaaaccgctgaaactgagccattttaccggggcaaggaggtacaggagagcgaagcagaggaacagagcattttccaacaaaaaaaaaccgtggagaaattttcaatttgttattttttgaaataatatcgactacatctcggttgggaaatgtttaattttttacattttaattttgttggaaataaaaaaaattcaaacggttactccgtagggcaatgttagttaaattgtaaaataacaaaggataacaagaaaaacaaccaaaaaaaaagggaaaaaaagattgtcatgcccttccaaggcaattcaaattccgtaaaaattggcaaaattcgacaacctttttttcttttttgcgagacaaggcaagaaatactaagaaaatgaatgaaaaacaattgataaataaaaaaatggtggatgataaagtaattaaaactcaattagttaattaattaaataccatttatttgcatcataacaaccatatcatattattatcataatcttcataatgagatgaaaaacaaaaataacatacatacaattacataaaaacaaacacagagatagagagaggcattattacaatataggtatgaaaaataattaaaaaaaccaataaataaataaataataatacaaaattaaataataataaattatgcgcacaattcttaagtgatgattttggtgaaagtacgaaagaaggaatgcgggaaatgaatgaagttaattaggtaattagaacaagaacataaaaaaaggagaaggtggaggggacaaataaaatttataaatacaattaaaggttaattaattattatttttgccatttaaattcaaaggcctccgccatttttgtccgtgccaccgcccctgatcattgcgtactcgcgcgccttggcctcgttgtactccttgaaggtccaatgctggtacacattgtccacgtcacaggcactcatctggcaacaattaaataatttatttaaaaatgaaaaaataatttaaaaaataaattttttgaaatttgtataaaaatattgccacaatattctacatatattgcgatatgatataagcaaacagcagcctcaccttcaatttggtgccatccctggtcatttccatg

SEQ ID NO: 12559 - DNA, 3121 bp, Heterodera glycines
  unsure (1)..(3121): unsure at all n locations
acggaataatttgtttgttgatgggcaattaagccacaagggggtggtgagagtttgtccgtaatcggcgggtgggcacttacaaaagggggtaattagcagggttcccagatcaaaattttcaaaagcctcatttggcaggcaaaaaagcctcattttgactcaaaaagcctcatttctacaaatttattcaaaacacatttaaaattttcaaatgttatattttttattgtgacggaagggctcggagaaatgcgacccaaaagcgaaaaaccgacaattcccttttatctttttcgtcgtcttctaattactgcaccttgccacatccttctaaaattctacgccattatttaatgcctttattaacacttgaaaatggtcatttgtgttttggccactttgacgccctttcactgctcatccccatgattagaagtgggtaaaaataatttgttagttgatgggcaatttgcaactgctgaaaagccattaagtgggaggggggngggggggggtgagtgtttacccaccctcgccgggtgagcacttacaaaagggggtaattagggacggtgggggcgggggggggcagtgatttggagttgcctctccactgctgctgctaatgctgatgacgattattgttcgattcgcttttgttgttcggacggacgggcgaatggacacggaaattgttgcaccaaaatgcatccgtccgccacaatttgcccaaattctgctgccagaccatccatcatcagtaacggacgaatttcctctgatgtatgccgtcaaatgtcgtgccaaacacagaaaaatatggccgcccgtcgtcctaattaactgattaacactacaactgaacgacaccggcggcgcctttgatcagtcaattagcccagcgctgctccaaatgataagaattttccaaattctgctgctgtttgttcttaagtattttcgccctgtcgcttctgtcagcacgcgactgctcttcagtgataatgatgacgcacttctccaggcttggcatgaacttgttgcgcttcaggtgctcctggccaattgcaatttgtacaagaaagaaaaaattgtttgaaattgagtaatccgaatccattccaagtgcaaattccgattttttccgcctgctatgaaattattatttcgggactgtgcccattggttcgacatcccaaaaccgtaccgcaggccaaacaaagtgccattgcgcaccgtgaccatcccgtggatgaacgacttctcagcccactgcgcaagtgtggtggtgctgctgcttcatcgccccggcacggcacaacgccatgggaccccaatgcttatattgacaatagtgatgccaataatgatgatcatgctgataatctgttgccgatttatgccgtttcttcttctgcttcaacattggcaccccagcgagtggaaatttatgccgaaattggacatttgacccaattttgtggggcggaggaaccgttggcaaaacgaacaacagttgacatccaacgattggcagaaggtgggcgagaggattgagtaagacaaactttgaaagcatttagtcactttcaccaaattttgaagcttttgtccatgtgatcgtccggtccattttcaaaatttgttatgatcattatcaacttctaaaaacagtcgaagatttcaaaggacgggataattagatgctcctaattacaaccaaaatcttatggctaattaccagaatttctgtcgacgtcagatcgattgagcccaaattaagtgaccaatcaataatcagtcaatgcttcacacagaatttcgcaacaaatgctctgtccgatcaccgtctccgtcttcattgtcgtcgtctctgtccgtctcgtcaaagtttgttgtgtcgtcgctgtctcttgcacaaattttcactgtaatgggcgcccgagttgagacagtagtgatcagtgccgatgagaacgccaccaatagtgccggtagtgccagtgccaaccgcaaaaacttgcaagaatggacgcgccaaatggtggacaaagtgcgccgcaccgtccgggcccattccgagcggtggaaattggtgctaattgcgcccggacttcacgtaattagtaatcacattcggcttacatgaaaggggtggccattgatcagtttagtgatggtcctgatcaatttatgattgggtcctggcaactgatcactgaccctaacaaaccctaattaatttgatgtaaaaagagttagaaaaggtcatgggcttagcttatgatcagcgtgtgatcagagggaatgaatattaactaattggaaaagccttacaattaatcgaacgtaagaattttgattgtgaaattctgatcagttaatggcaaagcaaatgctacaagtgatcagagaatgtcccaatcaatttaaaggacattccgtacgggcaaagttcggccgtacttgcccaggacgtgctccaaagtgtgcagctgatccgccatggccttccccgccgcacttttcttctcgtccttcgccagtccaacttggtcagtgctgctcattagccatggatgcttcttcaaaatgccaaattactctttgtgttcttagaccttttggcgttctgttgccaaggcagccgccttctgttcaaaaatgttgtccctgtgggagcttggcgaggcggacgatgacgaaagggcctgggacctggtgagagacatttgggtgatctgctgatggtctaactgatcagaagcccgcctaatgcctcgttattttccgatgaaacccttcctaccaaattgctttcatattaggattaattagatggtttaatattctgctggtgattagttaatcatttcttgttgttgcatcttattaatccctgagtgactcctacatttataaaaccttcaatcaaatggcattatggaattactcccggacggctcccggaattttcgacagtaaatacaaaatcaaattttcttattaaaattatttatattgtttgtctgttttactaaatttcttttaaatttacatattaatgtgtgttgctaagtcattattactagggaaacggttttttggtttttaccta

SEQ ID NO: 12560 - DNA, 1119 bp, Heterodera glycines
tatttctgtcgaaaagtccggcgcccctcccgggacaatctatcagtaattttttaaaagccaactgttttttcgagtgtaatattggataggtaattaattaattttcttacatctattaataatttttagttttttccatttttaccaaacctaaacataattcatttattttaaaaaaaaattttgctgattgaaaaaaatttaaaaattaaatttaaatcaacaatataaaaagaagatataaccctaattttttatttgtctccaagctaggtttgcatttttttgtctgtcaattttatcaaacagttggaaacacgtcttcgaacagtgtacggtgatgatgaagagtttcatgtgcaagtggtggatttgatggagcacgcgaggcccataattagcgcaggcaattagtgagctttgcccgtaattagcgcaggcaattagtgagcttttgcattaatgaaacgaataaaactcggcaatagcatttttttattaatttactgaccggcaattaaaaaaacccattatcatgatcatgggaaaatcccccgtctcttcacactaacccatgggaaaatacccgtcagatatgtcaggaaatcccggcagactccgactgattcctcccgatcactaattgcctttttccagcgctgatctgtcaccgttggcctccgattgtgtgcatttgtcaccgcgtggcctctccctgctgcaccttcagctgtggaattggctggttcagccccgtcttcgccactcccaaccgttcgttcattcgttctttgattgatcactgatcagcgttttgcgtattggaacaaaaatgaaatcacttgcgtaagctctaactcaagctgctatcaaatgatcaatgctggtcaaaaaatatatgaattttttatgtaagccctcgtaaatttggctttatccccccgtgcagtttcgtgccacttcttcgtcctccgctttgccctcgtccccattgtccgtttttggcaactccgcgcaacaccatttcatgcccacgggtgccgccagaccgagctaatgttcgttgtccttcatgaaggatgaattggtttcgtcaactttcaaatcttatgatag

SEQ ID NO: 12561 - DNA, 2239 bp, Heterodera glycines
aaaactagggtaggtcgggaccgggaattttaggcaaaaccgggaccgggacttttcgggttgaaaacccgggactttttggctgggaaaaccgggaatttcccggtcccggtcaaaactggttaaaaccgggacttcggtactcagttgtccgtgttttggtccaggtcccgacctaccctaatgaaaagcgattaaattactataatcaacgccaaataggtatgttataaatacaaaaaaaatgtgctaaagatatgaccatgcctatgtattattcatctatctatacattaatataactaaccattatacatcccgtcaacatcaccaaatgacatgaaaccaccaatgagcaaaagcaaagttgaaaatgacacaaagttgttcattttatggaagataaaaatagaataatttgatcactctaaatattatgtattaatgaaaaaataatcctatggtctggcaataaatttggaaaaatgggccctagccaaaattgtctacaaaatcgcttttgaaaagattattaaaattttttggcggtcggtttttcattaaaaagttcgaaaacgccgaaaattgttttcggtttttttaaaaattcttttcaatccattaaatttgagttgtttaaaaaaattaagtaaaaaggggtaaatttttaagaaattctgttaacatatgtggccaaaactccaattttttcccagacggagcctatagacacagccggaccttaactcgttaaaatttccttcgaaaattggccaaattcgcagaatttggacaaattagttaaaaattacactaaattttcataattttggggcggcttttacgcaattttagatcaattttgaaaatcaagtttatttttttgcaaaatctaccagaaaaaactaatttaatgatgaaaaaaatcacattaaaaatcaaaaattctcaaaaatcaacattttttatccaacaattctttgattgttttttcgggtaaaatttgaatagaaaagtcggaaagaccgaaaaaaatgaccgcgccgatctcaggttaacacaaatcgtctaaaaatatttcagttttcaaaatttaggcaattcgggaatcaaaaaatgaatgaaaaaaggcagaaatttaaaatgatatggcaaaagagtgaaagcgcttggcttttaaatgcaaaaattcggtaggaaaagctacttaatcactcgtaatttgcagccaaaaaaggaagattctttctttacatttgcatcataagattgccacttttgcataaatattatttttctcattgtttctacaataagcgcgaaaaattgaaaagcctcattgacctatcaaaaaaccacaaaatgaggctaaagcctcagatctgccagccctgtctaaaaataataacaaaaaattcaaaaattttgctaccagcacttgccatagacaaatagagaatcaaaaaaagtcagaaaattaataatgaaaaatggcattttattgaatggcgccgttggcttttaaatgcaaaaatttggctggaaaagctgcttgttcactcgtgataaccagacaaaaaaggaagggtaacctttctttacattgccatcataaaatcataagaatgcactttttaagataaattttttgcactttttcataaaaaatttttttcattgtttcgaaatggggaaaaaatcaattcatacacgcgtgaattatggctaaatttttttagatttgccctttttaatatacaaaatgattttttaaatattttttctaaaattacgatttcccagcataaatgtttgcttaatttgtgtttcagcgggttctcattcattcaaattaattgaaggagaaaattttggaactcaaaatccaagaaaaactgtggtgcctgtggatagtaaattgaataaaaaatttcggcacgggtaaaaaattatgcccggtacaatctgggaaaaccggggcgacgaggcattttatggaaaacctaccgggaactggaaaacccattaaatttcccccatttgaagttgcggcaaacaatttttgaactgccgccgatcccccataattccggaccctcgaccatacaatttttgctagtcattcggcatcattgaatcctttcaaaatttttatgaaactcctttttcgacttcgcttgaaattttcaaataaaaagtcatttctggggtaatttgtggcgctgatcacgaatatgac

SEQ ID NO: 12562 - DNA, 1177 bp, Heterodera glycines
aaatgccaaatgtggttaaaatttacatatatgtggaaggaaaggccccaatcgttagtttcactttgctttcaattttacctttatttcctaaacccaaaatggattattataattatgaccgattaatgaccgaatgtcccaatgaaattgaggcaatcaaatttttccaaaccaatggcctgctacacgcgcaaatgtccggggcgcaaatgtggggcaaccattgaattgtacgatccaagatggataaagtgttgatgagatggattaatgctaattgtaattcatcaagttcgaaaacttctgatttttattccggaatatgtgtattccgacagttcattctggtgccgatttgtccatatgggcgactcattttggtgataaccgtccgtgggcttggagtttcattggccggcatcatccggcaattccagccggtataaaaaaaaagccaccaaatgaaaattttcaacaaaaaactacccataactttgcttaaacccaactaaaattttaattctttatatcattcgatagccctaagagagtactctattagctctccttatttaaaaaaatttggtcgagtttgaacaaagttatggccaaaagtaaacaagcaccaaaaatttttggccataacttttttgaagtagacataccttttttgaaacttacaaattttaacaattttgcaggctagtaggaaacccagggggtatcgaatgagactcaagattatttaatatgatatttctaagaatgttttgatcagtattttggtgaacaaaattattttatttcgaatgaaaatattttaaatataaattgctatatattttttattttcttgttatacataaaaattttttatgaaaaagtgcaaaaaatttatcttaaaaagtgcattcttatgattagggtcgcgacttttagtgacaaaaaatctcaaatagtaaactaaaatagtgccaaaaaagtgccaaaatagtgaaaaaagtttgaaatagtgacgaatagtgatataattttcagccaaaaattgagcaaaaataattttgttcaatggttgcagttgcaaatgagaagagaacgagccgagcccggtactgggttttcccgggcccggcaacccggcccggcgatttttgggaaaatccgggttgaccgg

SEQ ID NO: 12563 - DNA, 3448 bp, Heterodera glycines
  unsure (1)..(3448): unsure at all n locations
ttgctctaaggcaattttntcgctaaaatcaaaccctgacgagttatgggtccgggactgaaatgtcccgctcaggccaaaaattttttctatttccggaaaaaaatcgaaaattttctaaaaatgtcaccaatcgatagagctcgaaaaacggttgcttgaaagtggtctccgtttttctgggaaaattcgttaaaaaatcataaaattcaaaaaccaaaaaatcgttttttaggcctagctcgaaaatttttgaaaattttcgaaatttttaaacatggttcgatagccctttgaaagctctacaaaaagtccgctggcgactacccgctccgagcaaaccctggcgcggcattcagctggtactgaagtgtccaaaaaaagtagttcttacgttgccatttttccaggccaggcctttggtctgatcaaaaaacttttgctggcaaagttgtagagcacagttggggggtgtgccttttggggtccgctaagctctgaaagcaaaagcaaaaaattttgtaacagtgagactgtcggcaaagttggtttttgagccgctggtactcagttggcccttggaccggaaaacctatatttttcccggattctcctcaaaaagttgtaagacccttccactactttcagggcgctcccggccttcggccgggagattttgtttttgcaaacgaaactccttgtcaatataacatatatagtaactagcgggtgcgtgaaccgtcggctatttagctgggcaaaagcgcttcgcgctttgggagcttcgctacctagactgtgaagcgattcaaattgatcgaattggttggagatttttttttgaatttttaaaaaattattatgggtttttagtccacatcgaggctcaagatgggctcttcgcgcccttcgcgtcctcgaacggcgctttgcgcccgtttctaatttttgttgtgcttttcggccgcttcgcggcctcgaacgggcgcttcgcgcccgttttttaaattttgttgggcttatacgggcgcttcgcgcccgtttctaaatttgtttggctattaaggcagcttcgagacctcagacgggcgcttcgcgcccgtttctaaatttgttgggctattaaggccgcttcgcggcctcagacgggagcttcgcgcccgttttttagcttgttaggccgcttcgcggcctcagtcgggcgcttcgcgccggtttttcaatttttgttggccttgaacgggcgcttcgcgcccgtttctaaatttgttgggctattaaggccgcttcgcggcctcagacgggagcttcgcgcccgttttttagcttgttaggccgcttcgcggcctcagtcgggcgcttcgcgccggtttttcaatttttgttggccttgaacgggcgcttcgcgcccgttttttaaatccgttgaactcatacgggcgcttcgcgcctgttttttagcttgttaggccgcttcacggcctcagtcgagcgcttcgcccggtttttcaatttttgttggccttggacgggcgcttcgcgcccgttttttaaattcgttgaactcatacgggcgcttcgcgcccgttttttaaattttgaggtacaacagcgattagaagagtgattagaagaggtacaacagtgattagaagaggtacaacagcgattagaagaggtacaacagcgattagaagagtgattagaagaggtacaacagtgattagaagagtacaacagcgattagaagaggtacaacagcgattagaagaggtacaacagcgattagaagaggtacaacagcgattagaagagtgattagaagaggtacaacagtgattagaagtggtacaacagtgattagaagaggtacaacagcgattagaagaggtacaacagcgattagaagagtgattagaagaggtacaacagcgattagaagaggtacaacagcgattagaagagtgattagaagaggtacaacagtgattagaagtggtacaacagtgattagaagaggtacaacagcgattagaagaggtacaaaagtgattagaagaggtacaacattggtcagaagaggtacaacggtgattagaagaggtacaacggtgattaaaagaggtacaaaagtaaatggaagaggtacaacagtgataagaacatacaacagtgattaggagaggtacaacagtgattaaaagaggaagaacagtgattagaagaggtacaactgtgattagaagaggtacaactgtgattgattagaagaggcacaacagtgatgagaagaggtacaaaagtgattaaaagaggtacaatagtgattaaaagaggaagaacagtgattaaaagaggtacaatagtgattaaaagaggaagaacagtgattagaagaggtacaaaagtgatgagaagaggtacaacagtgatgagaagaggcacaacagtgatgagaagaggtacaacagtgatgagaagaggtacaacagtgtgagaagaggtacaacagtgattaaaagaggtacaactgtgattaaaagaggtacaactgtgattaaaagaggtacaatagtgattaaaagaggcacaacagtgattaaaagaggaagaacagtgattagaagaggtacaaatgtgatttaaagaggtacaaaagtgataaaagatacaaaagtgattagaagaggtacaatactgattaaaagaggaagaacagtgattagaagaggtacaactgtgattaaaagaggtacaactgtgattaaaagaggaagaacagtgattgaagaggtacaaaagtgatgagaagaggcacaacagtgattaaaagaggaagaacagtgattagaagagatacaaatgtgatttaaagaggtacaaaagtgataaaagatacaaaagtgattagaagaggtacaaaagtgattagaagaggtacaacatggtttaaaattaaataaataatgaaaagtttttataaaaatcgattgcattttaatttaaaatttttttataataaaatactctttttattcattaaatataattttgaaaattaataattgaatatttattttgaaatgaaattcattttttataaattcaaaaaataaataatgaaattaaataaattaattaaatatttataaaaatcttgaaattaattaaacattaaaaataacccaaaaatacaagaaaataatgtacaccgcccggattcgaacttcccccccccctccaaatgatgcctcagaatcccaatcacacagggattctgaggtctgaacgatgtcaaaagtaaaatctgatcccgtatttcgggatcagcgtcataaaatcccctaaagaattgtgttttggaatattttcggtgaaaaaatttttccccccaaaaatcctgttccccccccctttggtcccgaacccaaaaatcccttttattttt

SEQ ID NO: 12564 - DNA, 3710 bp, Heterodera glycines
  unsure (1)..(3710): unsure at all n locations
ttcaagtgaccgatgtttttttcacgttttcaaaaacagattaaataaatttaaaaacacattattattatttattagatatttttagatgcttctaagcaaataattaattttttcaaacatatttttgatttttaaaataaatttcaaaaaatccaggtccatgcctggatccaggtctcgaggagcctgaatttttcctggacctggattttccntggatttttgtcaaggaaatccagnngttccagggtcccaaccaggaatccaggtccaggcatttttcaaaatatcgagctctagtttttggctctggatcatatgacctatattttgcaaaatatcgtcgcaaatcacggcacgatctctgctggtgctaaacatatgtataagaaaaattgtcaatttatttatattatgagatttacaaaattttaattatggaaaagtcaaaaaaggacgaaattcatctggcaaagatggaaaatattaaccgacttttaactttcgtagcacaaaattttgacagaaaattaaaaggtatcaattcgcatcagcaggatgaccagctgaatgactaatttcaatcgaaaagccatcttcggcaaaaattgggtgaacaaaatgagcatcaaataatttaaaaaatttatttcaatttacttaatccgcaaaagtcggcttgtccaatcagcagttgttacccagctgatgctttttcatccgcctgatattgggggaattatcgcaatttcggagttttcttccaattcgatgcgattttctgtccctccgagggcgtctcttccttcaaaacaatagcgatgattcactgccaaaatacacgaatttcgaattggcattaaagcggggaaaatctgcgaaaattttccaattagtcttattttattgcatttttatataaaaaagtatttttgaaattttaaaaatactttatcaaaaatgtggttgtaaagttccgtgctggtcaaacttttcggcaaaatctggcgaatttcctggcattctgccatctcccgagcttttccgaataataaaatttgcacttcaacgcattccatcgaagctcgaaaagcacaataatatttatttaaataatatttgtccaacaaaattgggaataaaaaatcaattaatgctgggaaaatgatctttatcttttcctcaccttattgactacttgcagagaatgaatttatgttgaagcaaagtaaaaactagacaagacaatgaaaatatttaattgattacaatttaattgattaggcaaattaaagggtttaaaataaataattttgaattttgcaatttcttcaaaagaaattttctggaaataaaaatgctgaaaattaaaccataaaaataaaattgagctgatcatttttaatagggcaggtcggttcggttccaacttgacgcttttggctccgtttcaagaaaccggtttccaaccctttcaaaattggcagaaaattggcacaaaaatatttagattggacctctttaagttgcaaaatttaaaaagtcgcttaatttccaaactattttataaaaaaagctcctgcacacaccgaattaattctaggctcccagttcaaaagagatttgcatgtgtgacgaatttgtttttgtaagatagcaaagggataaagggcggcggttagagtccgttgtgaaacatgtatttttatttattttttgaccaaacagttaaaaaatcacggttttcaaaaattatttttgaaagtttttgccaatcaaattggacaacttggtatcagtcgaaaagaagcttttttaagcaaatattaagcttttttacatataaaagtaaattcagttattctctaataatagagataaagaaatagtaccccaaaatgagagatgtatttttctctgcactctctatttattggttcatttctcgttttttgtgcatacactaaaacttaacaggctgcaagacgccaaatttttcagtttatgccaattttagcctattttgaaagtgtttaagaccgcgggttctttatcgggcccaaaagtatcagaatccatgggaaaatatcccccggctaaagttagttttgaaatgtccaaattatgaccaatttattactaagaatttattaataaaaataaatttaaattctgacataattaaaaagaaaatggttatttaaatgccgtttttttgccattttttaattataaatatacttattacttttgttaatttatttttgtccctttttctaccaaattatcgacttaattagaattttccagctggcctattgtgtgtatatgtttttctataaatattaaagcgtaattgacctgaatcactttgttgtgatgccagaaggaacggagtgtgggagaaagtgggataaaggacctgagagaacctctaaaagaggcgcccgtagctcagttggttagagcacggcacggattgctggggtcgtgggttcgagtcccaccgggcgagttaccttttatgttctacatggcgctcctgggtggatcccctccacactgccgggaccactggaccaaggagagtccaagtccgtcggtgaagggccaaggagagcccgagggaccggtcttccgagggaggcggaatgtgatgccagaaggaacggagtgtgggagaaagtgggataaaggacctgagagaacctctaaaggaggcgcccgtagctcagttggttagagcacggcacggattgctggggtcgtgggttcgagtcccaccgggcgagttaccttttatgttctacattgttattaaatgtcaaccatcaaacaaataaattccaatatataataatataatttttattatttttatttcacatttttaattaaaacatagataattcttcgttttgcatgcatttccatttgaaatttcgtctttctttctcggttcatttattatttaattattgtctcttaatttgataatgaaccattaaatgaattttccgtccatttctttaaatttctctttgtcagatggcgtgccaaaaaagaagccgaatttaattgcatttgaagtacaaatgcggattcaattagcagcagcaggtgttctcggcaaattaatttcccgatttccaattaatgcatttcattgacatttgggagaatattatggttaaagcaggcaaaagtcagtcagaattttttttagaatggcttaatttttcgtaagtcgaccaaatgtttgaattaagttgataaaattcgagatgatgcagaaaatattactcaggcaaaaaattctgaaaaaatttctgctaagctagcttttgatgctgatcaaaaaagtcttttacagcaacttgaccagatcactccttcatagtgatcggcacatcacaaaatacagtgaaaatcggggaaatttttgaaaaaaattcctagggggttgtgaaaattttttggaaaatttgaaccagcccattggaaaggggacaaaattctctaccaattgccttttgaatgatgagtctatgacttacatccgctgagatatgggcacttcaatttcagtgtctacaaaaagtactgtatttaaaaaaaatagtgcattttacagtaaaatgatcctgactgaaattgaagtacccatacctaagttggtttaagtcgtagagacttgaggtctttta

SEQ ID NO: 12565 - DNA, 3773 bp, Heterodera glycines
  unsure (1)..(3773): unsure at all n locations
ggggatctctagagcggaaggaacgattgatgagtcacacaatcacctcccttcattggtccctcaattccccccccccctccccccgcgggccctcatttccacaaaatcattgcctaaacaattgcggagacaagggggaagcataacgggaaagaacacataaatgtggaatatcttgaagaggcggcgatgggaaaaaacgagaaattgttttttctgtttttttttgtaattaaaaaaaatttttaaatgttatatcgttagccataaaattggaaaaaactgaataggtaatctcataaaaattcgagcatttcaaaaatgaactttgaataccagggataaggggttttacatataattaagatagagcccttacttccgctttaaaactaccgactaaaatatatttttgagaaaaaattatatttgcttaatttgcatgagagctttttgcaaatgtttttttgttattactctttgtgagatgatcaagaaactgatggtgacaaattaagttttgttttttttaagtcattaattcgcacaatttgtaataaacagcccggcgggtcatattagttgtatattgtcttgcaattgaaaaaataattatttaagtaaaaccatacgaaagctctgactatcagctttaaaataagctattaaattattcattgtcattaaaaaaatacaaatttttaaatagggttggggaaccaagaaaatttgctcactattttacaccaaagggtaccaccactaaagaaaggtgttgaaatgaattgaaacttggtcagtctattanattagatgtgctaaacaaaatagttgaaagaaacttttctggaacggaaaccccaattttagggccaagtcagaggagattggccaaaagttcacccataaaactggacttaaacatagaaacacagcacagcataatcatacttacactgaattttttctggcgacaatggcattgccgtgtaaattggtgaaagtccactgtcattatttggcgttggctttaagcctaaagattttgtattataaaattttatatatttttttaggatttaggatttggatactcaattcatttccatctgaaaacccagttttagtgccttacaattttgtcagaattggtcaaaaactccaaaaactcaaaccatgccgttatgacgttggttaccaaattatcaaaaactttggcggatcaattaggcaaaatcaaatcaccttttaaatcaagcgtcagatgacttctgtcccggcaaccactttcagccatcatgaatttttgaagaaactcgcaaattcgttagttattattttgtaaaatttgcttaattttataaattatttattattattattaataattattgttagaggaataatatgtattgtataatttattctgtaagaaaatttctttgcgaaggaaaagtccaaaaaactgaaggtcaatcagagtcaatttacaatgtattaaaacttccaaaaagcctttctctccgtaaagttttttcctccaaaaatcaatcatcacctcacaacaatcagaggatagtgaagtgatgatgaaaactgtgttccttacaaatgggtctttggcatatgagtccccccaaccatccgttttaattttaaatattttggccaatttaaacaacaaaaaaaaatatgaggccatacactttgtacagctttttaggggccaataatttttgttttaagaatttttgtggattttagaaaattttataagaaatttggtaaaaatttatttaaagcttttgaattaatttcttcataaatttcattcatatcctatataataaagttgagtgtttgtatgtatgtatgtatgtatgtgtccgtgtttgaatttgtgtggcgttttgtttgagttttgcgttaaaaatgaatttgaaaaaaaagaaatatttggtttttgttttctgcgttgcaaaaaagcattctattaaaaatgaaaattcccacttttttgtgctgtcaaattttttatttcttatttatttatgttaaattgatttattttttgatatgaatggttatgttttgattatgtaaatgattttggagaattgtttgattagaaaactgaattagaattggtttgatatgaaaattgtttgtttcttaaaaagctattggtacttttttgattataatacatacgaaaaaaatctgatttgatttttgatatttgtttgaatgaaaaaaatgttttgtatagtaaaaagagaatgaacaagcctttaatggattgaaagaaagcaatgtaaatctacatctcaaattttcctgttcgggtggataattatatgcagttgggatatattacgtgccgcttgctgaatgaccgcttgctgaatgaaatttatatggaatattttaaattaacgtttacaggtcagtttttgttttgaatttgggggtgggtgcaataacgattctcttttatatgtttttttaaaaaaaacccctcccccatctgcaaactattaacttaattactgctttttttgagcgaaaaaagaaaaagttgaaatgcttcttttttttgtttttgtgtacattcttttattctcaaagtttgtttcaaggtttaaaatatctaccgctgatttttgtaatgaatttaagacctagaattggaattcagatttgattgtgtttgtaaatgctaatgaattgtttgtgaaaaaagtcacatttaatttttttaaatatgaatttaattgtttggttatcagcagaaatttttgtttatgttatgattaattgaaaacgaattgttagtaaatgaaagttttgttgtttgatatgtatcatgttgtgctgattcaagttgcaatttttttacaaatggatgttttacgatatcgaagccaatctacaaaatgtgatgtttttgaaaattttaaaaattaacgggataacaggtcagtttgattttttctctttttattgagagataatttgaccttgcattatttttgacccactcatttttatttttaatcattttattaaataaatattcacacttgcttgaatatgttgtttggttcacatttatatatttgttattttgtaaatgattttgttatgtaatgttctttcaggtttaaactttctactgcctcctttgttataatgaatttagaccgagtatttgtgaatgatagaagtaatgataatgaacagaatttggaatatgcatatgtttttgataatgattatgaagtagttgagagcagttatgatatattggaagagcataattatagtaaacggtcaagaatggatgttgttggtggcgaaagccaggtatctctgaattcagatattggtattgctggaccgtcacgtatgagtgatagtcaatttgaagaaaggagaagaactgagtatttgaaaagaaagagagaacgtgagagaatgagaagagaaaacgaatcacaaaaccagagagttttgcgtttagaacagatgcgagatagaaataatagtcaacgaacggaagaaaatgcaaatgaacgtcgtttgcgtttagaacagatgagaaatagaaataatagtcaacgaacggaagaaaatgcaaatgaacgtcgtttgcgtttagaacagatgagaaatagaaataatagtcaaagatcggaagagaatgcaaatgaacgtcgtttgcgtttagaacatatgagaaatagaaataatagtcaaagatcggaaga

SEQ ID NO: 12566 - DNA, 2355 bp, Heterodera glycines
aaaaatgaataatttgtggagttggtaaatttttaccttcttaaaaagtttttaaaaatttaatcttaagttaaaaaaataattactaacgaagtcctaaaattataaggttaaatgaacaaattcaaatttaacgaagataaatattggtttcaaaatattaaataaatcattattttctaaatcaaatataaattaaaaagaaataattaaaaaaaactttgtattataaaaaaaacaaaaataaattacaataaataaaaaagttataatagattcattcaaaacttttgtaaaactaacaaaaaataagtgattttatatcagtcgatagcccttagaaatctctacattaaaattgtaatttataatatcgtgataattaataaaacaaaaatatttatttgaattttttaataaatttttaattttttctctttcgccaattattaaagaaagggcaacttaaccacaaaatttcaaatataaattttaagcctaaatatattttacacattctataaatcataaacaagaataagttttttgatgtatactgataattatgaaaaagcagaataattttttagtaaatattcaattcaattaaaattattattaaaatagatattaatttacagtgtaaacaaacagaatatcaatatattttttataaccattcatattattaaaatgaatataaattaatatgcatgttgtcagttaatttaaattattaatgattatgacatataaaaaacgactagtgaataaaaaagaaaataccgtatttgctctttttatgtgccagtctccattaaactgccggtctccaattatgtacccctttctgaggaggttgaaaaataatctaccagtctccatttatgtgccaggggggataaatagaattttttaataatttatttggcacattttccaaaaaaaatcaattcaacagtaaaaggggctaataaatgaacaattcgttgtcatctccgactccatccagccctgcatcatcattagagtagggtcgctacttttagtgacggaaaatctcgaaatagttaactaaaatagtgagtaaaaattccaaaatagtggcaaaaagtccgaaatagtgacgaatagtgacctaattttcagtcaaaaattaagccaaaataattttattcactaattggagttgcaaatgaggtacttttcctttgaactattcccttatcaaaatactgaacatttttaatcaaaatttgtcaagaaaaaaaaattgtgggaagaatttttaagaacattttccaattcttagtggtatttttgaaaaattttttagaccgattctcaggggtgcattttttgaaaaaatgtttaggtcgtttcttaggggtgtatttttttggttttattgcatttttgttaaggaattttcctaaaaatgtcgaaatagtaaattttcactattttagtacgaagcgccaaaataggtagtgatttctagtgcccgatagtgacatcagaatcgaaaaatttcaacgaaaaaatacgttttttgagctcctttcttcaaaacaattgagcaaaaaaattcgttaaatcactaaaagtagcgacactaatcatcagaaaagccaaaaaaaaactaaaaatttttaaaattaaaattaatattaaaaaaaataaaaaaaggcttcttcgtgatcgtttcgtccatctttcaccattaaaaattccaatttttatgcataccggaagcaagaaaatgatagatttttgtcattttggagtcattttcagaagttgtttaacagaaatgcaataaaaatgttttttttttgacgcgatgacattttttggcgacatgttcaaaaaaatttcaaaaattttccactaaataaatcaacgaaaaataatctcccagtctccattagtctaccaatctccaattatctacccccttctgaggaggttgaaaaataatataccatggcatataaaaagagcaaatacggtatataataaaaatcaacacgtacatcatatttttaaaatctttatttgtgaaaaattgaaagaaaaacaattacttagaggggaactaatctaacgcaaaaatcaggaacggatccaagagcacaaccatcccccgctaggaagtacggatgtgtaaaattatgaatgataaaaccgaaaatggctcggccgcttcgcggcctcgcacccttcgcttggcattttcttatggcacaacatttttaacatatggcacaacatttcttaacatttttaacttcttggtatttcttattgcataacatttcttagcattttcatcgtcctttcctcctttttggc

SEQ ID NO: 12567 - DNA, 1711 bp, Heterodera glycines
  unsure (1)..(1711): unsure at all n locations
ttaattttaaaattaagatgatgtaattttnttaccaatttttcccgtcagagcctatcaatagctgatcctnccaaattaatttttcaaaaaaattagttngaaaatctatgaaatagtattttttgcttatctatcagcaaacctgttcaaaaatcggcacccactgaccccctcatacttattttttgaaaaaaaaaagttcgaccaaaaccagccacccaaaagtcatattaggtaagtctcgtgtacattcttgaaaaattttgcctcaaaatttccaaaaaatttttcggcggcttttagcagcaacaaacccnctcatactctaaaattctcaaaaaaaaaaaaagttttctcaccacttggcctgtaactgtaagattttgctgctgttcgcccagttgcgcaattgtttgattttcctgttaagtaaaataatattattaaaaatatgatagttacaaaaaaaaaaattatttttataaaaattataaaaaagtttttcaaaatttattaaacaaataacaaacttggtcagtaaaattccattcctcgaaacctaaaaaattaaagattaataaattttttaaattaaaaataagatttaaaaaattattttgccccttagaagctttaaacagtaagatatctatttttccacctttttggtgacatttgccaccattttttgaagattttgtcatcattattttaaataccaccatctgtcactaatttgtgtttttttattttttagattttttgtaaggagggtgaaaaggaaaatttttgaaccccacccaaaaacaggtggtgcctgtaggtgtcacaggacccaaaaacaaaaaaacctactgaaaattttaattgtgccttttttgcagaaaaaattttcagccccctagtatttttttatttgataattttccgtattttaagccaattttcgggtggtcctatcaacatgaaggagtgatttgatctgattggtgtaaaagactttttattattcagcatcaaagttagctaagatggaatttttttagattttttcatagcttaaaggcgagaaaaattaagattacaaaagtggtgctaaacatgtgcaccacttgaaatagggtgtgatgcatgaattcaaatgtacctaggcaattaatcattctttcacctaatgaaaggtaactttggaatcctattaaaagtgctacaaaaaaaatgtaaatacagtaagtctctatacatcatctaaaataagttattcagagattttcaataaaattcatatgggttagaaagggaggatgactgcgagtgtcaaaaggtgcctccgaaaaattaaaaaattgttttgtactaaagcataacaatttcccgggtactgattttaggcaattcttttctcgataatataatttaccgaaaataatttattattaaagaccggtaaaaatatgtacaaaaaaatggaataaaaaaagacgaaatatgtacaaaaaatgtcctagaagctagaaaaaatatggaaatccatactttgccagtctgtaattataatattttttcattctgcttacaanaatctggtgcaacaaaattatttaacaaaaaaaaataagattaatctttaaaaataaggacattttctatttctaattcttagtctccaaaataaggacatttgccacaatatatctatataattatt

SEQ ID NO: 12568 - DNA, 2374 bp, Heterodera glycines
gcacgccgaccaagtcgcggccacggtttgtcgacgctgcaatttgttccttctctcgaatccatgccaattcgtcgtcgatgtcgcggaacagctggtggccaagcagcgactcggccaacttttgcttccggcgctgcaacggctcgcgcaacgcctcgaagcgggcgcgtaacgcctcgaactttttaccgatcaacggtgcgttgaagtggcccgtgtcatgaaactcgcgcgtctgatgcccgatcgcgtcaatgcgttcctgaaatgtcgaaaaagttcgctctgatagtgataaatgtttaaaaattaaaattattaaatacaattttagactagtaaatcaaagtcgggcctcctgaattgacatttttgatcttattggcaaacaattatttttagaacaaaatattcaatttattcactcaaaatgagaaaagaaaaataggggtctcaacccaaagatttcaccagtttcgataaaactataccaattatttcccagaaaaaacccgagtcgagtctcgaaactttttctatattcctttacttttctcccttccctcccattgatcattttccccgtttctcctattatttttcccatccctcacattgatcatttctcacccattgatcattttccccgttagtcccacctggtgcgcgttgtagtcactttcgacaaggccaagtttcttctgcagattttgcaccgagatcaggtccttgccgaagtcctcgctggccaattggccctccaattcgctgagccacagctccacgtcttcaatgttgcggttgtacaattgctcctggttggcctcctgcagcttggcaccctttagcccgctggcatcagccagctcggtccacaactgttccacctcgttgagacgggtctatatgatcagaaaacaaattttaatttagcgatggcgtaatcgtaattgtaaaaaaagaaataggcccatgatacaaattagaaattctaaaacgattaattgcaatgagcagtcctaattagggagcgggaaatatatattttttcggtctttaacaaattttcaaaaatttaggcattccttttctttaaaaagttttatttttgctttccccacctgaatgtgttcgttggcatagtgcccagattggatcagttcttgccccgtggctttgatctcatccagccggttgcgatttgcgcgcaactcctgctcaaagttgccgtgcttttgtaactttccgcgaatgtttgtcgggtccaaatagctctgtaaaaaaaggaagaataatcattttaggtttaaatggttatgattgcttgatcggttaaagcagttactttctggtttgatctgacaaactcaaaccagaagttaaggtgtgatccaattgattgtgggtttaaagagaatagattagggaccgcttgatcagttcagactaataagtgatcggaaatcaaggacctaattaataataaatatccaaagtaaggacaactcaagaacaacgcaattactttggtcatcatatattcggatcagaaattttggtctttattttttttattgacctggtctttggccgtcttcagcttctcctggatccagcccagcatttcgtcacagtcgcggtcaaagctgtgcaggcggtaggactccttgagacgctcccggcgctgtgccatccgatccatcagatggcgacgacgggcgagcaactgaaaaggcataggggatttaataaaaggataaaatttagaaaaataactttcgatgttattaattaaaatttaatttggccaccttttcacgccgtttggccacatcttccgctgcgtaatgtccgccctcgatcagtttggtggcaaattcgtccaaagcatggattttctcctcctgggcggccaacgatttctcaaagtcctcgtgtttcttcagcagcgactcaaccgcgtccagcgaatcaccgaggtcgtcgttttggagaaaagccttaaaaataattaggaaatattattaaaatcgtaaaattaattaatgcgaatgttctattctgatcaggttgatcaaaaaaagctagaatttgtttcaaaatccctgtccgtccttcaatctaatcaacagacatccaaaaagctagagttccgggtgccaaacggaatctcaaatccgacaaaccattcattttaattagtaatcaacttaatcctacactgcgggggactttttcgcggattttgccaccccctgaaatagctatattttttctagggtaatttaggcgctgaaaacgaatctgacgtttatttgaggctgtcacgtattttatgaggtacatgaaaaaaataaacgtcagattcgtg

SEQ ID NO: 12569 - DNA, 880 bp, Heterodera glycines
tgcctcctgcttggtcatccacgactcggcctgctcagtgtccctgtagaacaactgcaggtccatgcactgttcgtacagtatgcgacgctcctcccacagattgttcaggctcgtctgctccatggccaaattctgtgacaaaaaaaaaattattttaaagacaaaatgaaagccaaaatttcaattttgtaatatgatcatttaagagttaaaaattttaaaaaaaaattcatcaaacggtgaaaaaattcagaaattactttttttaaaagatgttttaggttgtctcataattatgttcgtatttcttatttgctttgagttactttttccgaatatggcatcagatttacagaatgacttcagagatctatgattttgtgaaatttatgatttttgatcaattcatcgaaatcacttgtttttaagaattgaaaggctaaatactcaattataaacattctccaaacctttctctatattcgagatgttaaaaattaaaattaatttaagttttataaaaaacattcaaacatattgtttgcctttaatatttatgccatttaaaatatattaaatatttttccgccacacctgaaggcactgtcgaatttcgtccgactcgtcaatgtcttcgtccaacagacgttgtcccgtttcggccgtctgtttgaatgagtcggttcgggcttcaatctcttaaaatgtttagcatatattgcctatacagtatatttgtggttactgtatcctatttatcacgctactgtgtgcatttttttttactcaccgcccttgtgctcttggtgctgttccaacaacgcttcggcgcccgcaacatctttggccaattccgacgattggatgagtgcctttt

SEQ ID NO: 12570 - DNA, 2616 bp, Heterodera glycines
cggtgcctttgcaaaatgccaaagtttcacctttttatttcttcgacatttggcatttttgtacaaaatcacattaaatgatagtcaaaatcaaaaagtgcgatcagccgaagctcttttttcttctcgacggcctattcattcagtgaaacacccgcgcagtgtttgcacaaccaccgacaatcgccttccaaagtcttcccgcggtgtttcgtcgccccctccgcccgtcgccttcccctcgtacaaattggccaactcgatcgcacgcattcaatgccgaacggaccaagtcacgacggcgttgttggccaatgcccgtcttcagatgcagcaattggttgttgcactcgattgtgagaatggttggggaaggaaaaccgatggcaaaagcaatgtttttgtgcttgctttcaaaactcgaccagaattaggccgtacagggcttgggcacttggcgcgagggcgagcgaccgctcgtaataggcacgtgcaatctcgacattgtcgggtccacccaaagtgtagcgaatttcagccattttgagcaaataagtgggattttggggctaaaatatgagaacagacaaattccaaaacgttttgttggaaatttaggcatcggtccaacatttgaaagaagcaattcctcgaaacaaaacgcagcccggccaaagtcggcctcctgaaggaacagttcgccctgctgcagccacgcctcggagtcgttggcgaaaatctccaaatatttgttcagttcgcggatggccaactggcgatcaccgcgcgcgatcagaatggcaatgcaacgcttgcggaaaagctgagaaaagcaaccaaagggaaaaataaaattgcgatagtcaaatatgattaagtctcgagaactccgtttattatttaccggattcgtgtcgtccccttcgatcaggcgacggtaaagctcttccgcgtcttcgtaattgccaatggcttccaaacgcattgcctaaacatgtaaaggacagggaatggctttcttaagtgccaaacttgaagctttgttacgcgggtactcttcggaaaacggcgatgcaattgctgcaggcattcaatggccaagtcatgtcttgcctggtcgagcgcggcgatggtcacctgaaaagcggcataaaggtgttgttattctgctgtaatttaattgagaatgttaggagatttcaaaaagctttcatcaaatcttttcagtgacctttttgaataaaccttgaaaatcggaatggtagcaaaaaccttgaaaatgctataccccatcgttatcccccccccccctccttccccacctgttccaacaccgcccacaattcgcccttaagcgcagcggcgtaccgactgagcacaaactcccaaatttccacgacttcttccgagcgtcgcgcgtgctcttcccgccactttttgagtgtcgcatttgcctctaaaagttaaattagcgccccatttggtaaaataagttcgaatcattgaccttcgtaggtcaaactccgccagtcgtcctgcatttaatattaaaatttagtaaagcagttcaactcaattgttaaatgggaaaagaattggaaaaagaagtttcgttaaaataatccaacattttaaaataaacagacatttagaaaagtcaaaaaagaaaacaaataaccgttgttaatgaacagaatatttatttattaaattcagaatcaaaaattaattcccattgggaaaagaaaacatatcgaaacaataaaaagaatttgtgcgatgggcgtcagtggtaaaggcgggatgattatgcaatcaaagaaacaaaggacattgcgacaaagaaattaggatgaattcattacatatgtaaagataataattgcctatttattccatttattatgcgacaattcaatagaatagggaaaaacaaaacatcaaaaaaagatggggcgatagggagagaattatgggagaaattcaaaggaaattattggattgaatggagggaaatctcgctacatgaaaaccacgttggtttcaaaagacaataaaggtctcccatctaatccatgtgcgggtagcgccattcggtaagcggcccaaaactctctttgatcacttgggcagaagtccatcggaggacgtaatgggggcctccggccttgtcattagtgccttaattttaagcgattccataagaaaattggcacaaaaagcctactaaccggattgacgcgctccaccaaaaggctgctgaccaacaacggaaccggtacatttgtcattcaaatacaaattgccttaatttgcaagcgattttttttttttttaatttatcctgaccgactgcatcacggagaatgtcttttgcttcataaagaaagtcccttaaaacaagaaaaaattaacattctttaaatgtcggttcacttgtcctggctgaaaactgcgccagtcagtccgaacggagtttggtccttcagggaacgaacgagctgaccagcatccccatcctagaggttaagacgggtgggcgtactttttcggaaataaaacgaacattgtacacgtaaacagcgataaaaggtccaaatatttcctaaaaaatat

SEQ ID NO: 12571 - DNA, 1865 bp, Heterodera glycines
  unsure (1)..(1865): unsure at all n locations
tcctttttggatggatgnccacagactttcgggcacgaccatccgcgagctaaattnggatagtgaagcncaaaaggcgtaagtttatctgaccatgcgctgcatttctgtccttgatattcgaaagccgcgcgatgcgtacaagcgacgactgatggaacatcggcggacggatggacaaaatgaaagtttttgccgccacattctgaataaacccgaattttattagaacaccatgaaaagcacctccgatgagacgagggaaagtggcataagtagtcaaattctcagaaatctgtttccataggtgttggaacgtcggaacagagcctgtaaagattttattttccaatgatcatgcactatccgtgcacaaatggttggagtttttctgggtttgaataacttggtttgggctcccaaccagtttcccggttcttccccaaattgtatcaaaaatatttaatgctaaaggttgttgatttgagtgcttcacaaacccgtgaagttgatgcccgccaaatctttactgttcgtgacggcattaccaaaagtgggcccatcggatggcaaaaaagaaatgacgccggatgaaagtccttaaatttagccacaatgtttgatggttatgtattttgaccaaccagcctcttcgaagactttgtaagccacataattgctcgccactgcggtgtccgacggtttccacatgacgacattcccctaattagtcatcattttgtgtttagaacaatgtttccgtataccataagtgcgggtgcagaagccaaattaccgccaattgcggtgaaattgaacggagcaatcgctgcgacaaaaccctttgaaataatatgaatgattaagggctaattatactgaaacagcacctcaagtcctctgagaagcatgctgttctcgtaacccttgccactgatcggctgatactttgaattttgaagtgcgaaatacgcattgaaacgcagaaaatccgccaattcacaggccgcgtctaaattcaaagcaatggcaaaaaagagacaaattttgagaccaatttcggcttgttgaatgttcttcgcttggccaagcattgtggccgcgtttatcaacatccgatattttcctgccacgaggtcggcggcatgcagaaaaatatcagccctctttctgaattaaaatcgtattgaaaaatcaacatagttgcacaaacataagcggaagtcgctcccattgatgacgcgctgccaacccaattgaaatggcattttgaatgtcttccgttgtcgcatggttaaacaacgcaatgggacggttgtggtcaaagggctgaaaacaaatgaaaaagtctatcctttactgacatctcaaattaaaggttttctgtttttgtgaacctattcaaatgcactcgccatgggctgtctaattgctttttccttgcgaaatgtcttctccccgccaatggccaacggcacttccatgggctctgcccacagtttctgcagttccttctccaaagcgtcgctttccgcgcttcccttgcgatattcgagcaccggctcattggttgggctcttcatgaactgttccgaagtgaggcctctaaagcgaaactcacaagtagtcaatgtttgtaaacatcgatggattgaaagcccacgtgaatgaagaggcactccgtcgcagaagacacgggggaaaggagcggccgaagggaagcgaccgaagcaacatatcgaagagaattaaacaaatttcctatttcctatttaaaattcgcgcgtaataggccatagaaagttaggagaaaaggcacatacaaacaatgacggaagtattttaccaagaattaaaaacttgcc

SEQ ID NO: 12572 - DNA, 1092 bp, Heterodera glycines
tgcaggtcgaaaaagaaattatttaatcagaaaaatggcatagagagcaattcacggcacaaaatttttcggttaaatctctctggattgagtgatccacgaaaaaatacattaaaaacttaaaaattgcccccccactctttcgtgtgatcacctccaaatgctttgactcgatcagtggcgaaatgatcgcgtgtttcagcgccgccgttgccgcactctccgcgttcactttgttcagcctcgtcagcggcgagttttcgctcgccctcagcgcggtggaaagcggcggcggcggaatgccccgcgagggggcgaagcggccgccgtcggacgcgccggtgggacggaatttggtgattctgcaacacaacacgacatgtaaacattggcaaattagttcggcattttcattttgtatttatttcaacaattcatggacgacgatcgatcccatggggacaaagacatttacttttttatcttaaattaaaaaaaaactttttcggtggtaattcgtgtgatttttaaagattttatccagaatattttttagcattgtcaaggacaacccaagaattgagctcggaaaatgtataataaagccgaatatcaagggccataaccaatacacaaaaattgcggctttttaattaaaaaaatgcaaaatttttaacccgcccctgacacgttgcatgtcgcaaagattgtaatagaggaaattcaaaaaaaaaaaaaattgttttcaaattcgtagttcgggtctcttaaaaaattccacagagagctgcgcgttcaactccgtccccaccgtttcccactcccgaaaggtttttaaaaatttaataaagtataagacgtttaatctaaaaaagaaaatttaaatcaaattttcattttttaaagaaggttggcgggtcgcagtgcaaaacacccaaaaaagggcaaccccaaaacagccgaccgaccgtctccgctcgggagtgattgctcgacggtcgtcaatcgctttggcctttttgaccggcgtgctcacaatgttgtagtcctcttgctgcttctgctgctgcggatggtcgtcggaaatgcact

SEQ ID NO: 12573 - DNA, 3807 bp, Heterodera glycines
taccacgaaaatttttgatgtgcgttaattaactgttttgttttctattagccgattagattcagaatatttagttgccttgcaattagcccggtaactgttaaaacaatttttatacctttttggttcgatggatttttgaaaacttatgaaatttacaggcgcataaaaaataaaactttcctttttccgataccgtacctcgcaatacgaccgtatcgatgaccacagcatgggacagctgcgaattgcgtttgccaagtgtagttttgcgtactcgacccggtttgtctcgctggaaattggtaaacccaaaattaatgcaacgcaacaattggggaggaggcggcgacatttgtagccgattagaagatatcgaaaaggatgccatttttgggtgtgccaatcccaacattacagtcagtatacggtttgtgccaatcccgttgtaccgtagatgggtgtgttgtgtgcacataccgtaaaatgttggccagcagcgaatgtgcgtaagggagcgaggcagtgcccacaaagacggggtgcaactccactttgtccgtggccctctcatcccggagcatcgactccgcttcttgtagtctgaacaaaaaagttttacaaatctaaaccaaaaaaggcgctgtgccaagtttttgacgacaaaaattgtccccaccgtccaaaaagccaatggaaattagaaattaaaagattacctaacttagtaaatgcaaaaaatgggactaattataaagggaaattagttattgaaaattcaattacaacagtaagcattttgtaaaacatcggtgtgtgctcgaaattggaatatgttaattacatttccttattattactcgccaaatgctctcaaattttggaggggggggggggggggggaaggtaattattccatttaaaactcgcccaaacccaaaaatggagctaaaaatttttaccggttttgtgcaaaagcacaccgggcaaacatgtaccgcgacttggccatttttatacattggggactggacagcttcaaaaagtggtaagcactttccaaattctgtgtccgcgttaagcagtgggccaacagcagcagggaacgctcggagccaactgaaaatgtttttataaatcacaacaattacaatgaatttgtttgagagacatttatgaaatgattttgaaatagaatggccaatttgagaattttgaacccacttttggaaaaacttaggattttgagttgatttctgacccgaatcttccaaaaaaggaaattgctttaaaaatgttggtaacctaagggctatcgcctgctcacactttactctcttttcagactaggaacctaagccatgaaagtgtgtcaaaataaataaaattcaatttggtcggttgaacattggcagattggcacacctcgactgcagtaagcctcggcgagtgcgacggcgtcgtcaatggcaaaatggtccaaacttgtctcaatcagttcctggcaaaattggcatttgaaatgaatgatcgaggcttgccactctcccgctcacttcaattgttctggaatggacacattcgccgttttcaccggaagaattagaaaacaaattggtcgtcgaatcaattcccttcagcattttgtgtgtctccaaatacaaatatgaaaatggaaagctttatgtaggcctatttgttagatattttgggacaaatggacaaacacataattaaaatttttatattttaggtatttttgatattttattttggtttagataaattaaaataaaaataaattaaatttcagccaaaggtatgtaaaatagaacaaaaaatataaaattttatcaattttttgagaaagctagacgaaacgacggtaaaaagcaagcaaaaaggctatacataaggctaattccgtaaaaaataattctaaaataaaacaccaaaacttcaaattcttagagttgatagtgtcacgggaccggggcgggaattcccggtcctccgaggtcccggttcccggattttgaaaatttatttcccggtagggctcccgggaaaaacaaacacgggtaagaatggggtattagcgaaaaattaatgagcgaaattgggggggaaaggaaaactttttgataaaaatcaattataaaatttattttttaaataatatacaaatggtccagtggttaatcttcctgctggtttcttacttctttcccttgtttcaatcccacttcagtaattaaatgtattttgtttttttctttttgtaatcatttttaatgtaccttcttccatcagcaatactatagtaaattaatttttaattcgaattttcccgaagatgcctatcggtattgcggcactcaaatcaagcaaaattttcatggtttagtcaaattttcaagttaccaaacaagataaggagatttatcaatatgcaacgcgaacaaaagaataaattaaattaaaacagaaataaaagttgattggactcataaagtgaagtagagccagaaattccacaagttttttcagtccgtctgctgcatgttcgctgataagtccgcctcgctcactgtgtcgcccgccctcacctgcgcagctcatgcttcattttctgtgcttgctggcgcagtcgctcgtaccgccgcttccattcctcatgtagcttggcgctcgccgtgaccggggtttttcatagttgaacctatttttgaggtttttaggacctaatcctattttgacagttttaagacctaaagatagccctagttcggaccgctttttaccgggactacccggcccattactcaaactcatattattattattattactattaagacaaaaaaagaaatgactgaactttgccaattgctgaaaagcgaaattcggcgtttggaaacgaaaatggactatggtttcaatgaactcggcaaaaaaatcagtggattggagaccaaaatcggtggattggagacaagaatcgatggattggagacaagaatcgatggattggagaccaaaatcggtggattggagacgaaaatcgatggaatggagacgaaaattggtggaatgcagacgaagatcgatggaatggatatgaaaatgaatcagtttgaggtttgttgtttgtggagtggttatgcttttggttttgctctcattgtcattggatttatttgtaattgttttgtccaacggattttgagtccaaccgactttaatgtgcctatagtgctcggacagaaaaatttccagccccctcattcggggcctcttttttgaataaccatggaggaatatcaaccaggacttactagtccggaatgctctccgggttcatcttgaaatccggcatcttgtcctggtccctcgtcgtttctcaagattcgggctcaactaaaaaaattttttttttcttggccatctctataatgttcagcagaatgtacatttttgatatcatttgaaagcacaatttctgaagaagtcaatagtacaacaaacaaacagaagtatgcttttaaaaatatagaagcgtaaataatcacatttttctgacaaatgcttaaacgcagagaatttgcatatttcgacttcatcagactttgtgctttctttcatataaaaatgaaaggattattctgacattccttcaaaggattgtgctgattttatgttttttattgcttatagacacgcttccgtctcctcgaacaaagcggcagaaaagggacgccaggagcaatcaaggttgccaaaagagaatagggggggggggggggg

SEQ ID NO: 12574 - DNA, 3400 bp, Heterodera glycines
  unsure (1)..(3400): unsure at all n locations
gcagttgattttttatattttaatttaaaataaacaattttctnttctgtgctaattcataaataattcagagcgcgactttcgatgatgggaattatcgacggggacggagtcagccgagacaatgacaagggcgagtactttcgatcaaggcgatggtcatcactgtgaagagtgaccaggccatctatcaggtcagacncaacaacaaatagactttgtatggggaaacacattaaattgaatacgatttcgacaaaggcataaatattcggacgcaaaagccaaataaaactcactttaaaccaccaattttgtgttttgccaggcgtgtcctcagcagggctgcaagaagaaagtgtccatggagggcaaccagtaccgttgcgagaagtgcgccaacactttcgacacctacaagaacataatgatgttgcaggttcttcttgttgtgcaatgcgattccccactttcctttcaggtcgaattggccgacttttctggagagacctgggcaaccatttttgaggacaaagcggaggcattgttgggggtgaaagctgaccaaatggcacagtggcagagagaggacgtgagcacaaaatttaatttcatatttatattaaagcacattttaccacggggggggaatgagtcgggtagcaattgcctattttcattgtaatttctgtgtccgaggagatttttcaatacatggacttcccttcatcgtttttcctttttgtccagcccgctcggtttgattctgcatttaatgtcattcgtttccatgagtttttgttccgcgtcggagtcaaatacgaaatgtacaatgtgagtggacaaataaatgttcaataatttttgaaactgttattttctcaagggatgctttcatacttttgcctaaattgccgtcatttatccaacacgtgcctctaattttttttcttctcttccaggacaaatcccgtctcaaatggtctgtgttcaacattcagcccgtcccattggccaagtgcaaagctttctttgagcaatcggtgcaaaaattggaaggaatttgatgccaatttcgaatttgataaaccgcaaatacacaacgtttttgcttctgatcaggcgatactcattttatccaaatatgatttcacttatttttgcaaatattttgacattaatgaatatttaaattcaaaaatgggctaaatgttattaaataaatgtcatttttaattcactctatccaatttagcaatatccctattggacctgttcttatttattcaacttttaatagcttccataaaaagggataaaaatttgttgaacatcgcaagtaaagtgctttttcaatgttagttcgtggtttttccgatttgacatcatcagagaatggattcgggcatcagcgtgtccaacactgtgactaagaaatgcacccccatcggcaagtcctccccttcggcgtgcatttggtccgcgttttgttgatttgtccaccaatcgccgcccgccaattgccatagccccggggcgaaagcggcgtagtgaaaattgtggccaaattccctcagggcgcgccaccaattgaaaaacgtttgctgcagcgtttgcgcggccaaattggcgtgacagctggccaaaacaccgttgaccaaaatgtttccgttggcagtcaatggcgcgtaaatgccatggccacgcacctaattagtgccatttacacctgattaggcccaattaagcctcgttgccttgtcaatgtgcacaattcggctcaatgccatcctggtctgcccccttctttctccttctcctcgtctctccgtttgccgaactctctccgtcccgtctccatcccttccccacactatttcctcgcccattttgccgttttctcctccctccaatgcgtaaacgcattgccccgggcgcaattcattggccctaattagccgcagtcgccccgcgcatccgacccaaatcaaatggagggcggtgagttggagttggtggccaaattcggtgaaaattcgcatgaaaagggccgattctgacggcttccgatggagaaacatcagaacgggagagaaggaaagcttaacggaatttgaaaaaagaaaaacggaaattagaaaaatgaaaaaatgatattgttttgggaaccttctgaatttcagaagaaacggtttcgaaattcggatttaaaccatttgatcaatttttgaattttaagaagtgatcaatctcaataaactgaaattcaaaactgattgccatgttcatcaggacagattggcaaaaagatattattaattgttaatgccgtctaccaatgactcgtccatggacagcaccaaatcgccgattcggagctgatccatgcggacgggtccccgggctgtccggaccaactgatcaccgctgaaacactgcagcgaggcgaaggcggcattaagcgccgtgccgccaccgtaacctccaccgttgacaccgtaaccaaagttcggcgccttagggagtaattatgacaaataaacttaaaataccatatgagagggtcgctgtattttttattaaatgtttaaatttaaaatattttccactgactctaaaataataaaaaaaattttaattaaataatttatgaattaataaaaggacggacggcgtaatagttctgcgatgtgccgatttgctgttgctcattccatgacggaatgtactgctgttgctgcatttcgacggccttaaacaaaaaaacgtgcacataattaacattaattacgacaataattgatatttttaatcacttggctttcccctaattcgatgccattttcgctgttttgaatgccattgaatggaggtaatgatgccatcgagtcgcagccgcattcggtcggacattggcacatcgacgggcaaaagggacaattgggcccattgcaggacgagggaaggctgaggaagaacaaattagggggaaaatgagggcgaaaagcgatggtaaattatcaaattgacacaaaccccgaacatttgcattgggagcacgaacagagaccacaggacaactgaaaatgggtaaattgatggaaagtgaaggaacaaaaataacacaataaaaaacaattaatggcaaaaaaaagaaaatgggcctagtgcacatggtaattgtcgccatttatgaaccaaccaacaaacaaacaaatcgaaatcctacgagttgaatattctccaccaccactcaccacaagtgccgacggtgcggtgccgtcgcatccgtccgatcttccgcttcgaattgtggcgcaattggcagccaattgcggggcgttctcgtccccgctggcggnaccctctccgaccgttgccttttgagctcccgccgctg

SEQ ID NO: 12575 - DNA, 2929 bp, Heterodera glycines
gctgctgctccttcaccgattgcaactcgtcctcttcgcttttgctgctgctttccgccgttctgccgatgtccatctgttgcacatttttcaatgctaaagtgtaagccgcgccggcactgccgaatgtctttggcctttcctcccccattcctcgccctttcttcgcttcatcgtccccttcctttgcttttcgctcgttactcatccaattcattggcccatctatccgatgacgaattgttgtcagtctgaccaaaaattgaacatttatgagccaataaattctgatcgttcttcatttgatcttttatttctctttttctcttctactgtctctttcggtgttccactctctctctctctctctttctctctgtatctctctctctccgctctctcctttcgccctttctctctcaccccgtgtattttatccgatcaccgccttttttgcttctttgtttctgtgccaatgattgcgtttgtgttcgcctgttgtactgttttaggagtgccatttcggtcgtgaacgatgcttcatttgattggctttgatccgttggcggcgttggctctgtccgtgtgggcaatgtcgaaaagctatcaatggaagtgccgtcctcgtgcccattgcggcgaccattcaacgaaattggcggaagtgacggagttacagcttcaatggcgaaaaattgattagtggaatcttaaaagtttttaacgctaataaaagaaattttccaaacaccgcgcccgggaaccctcacagccaatcactcgccgctctttttaagtccccggaatgccactcaggcggatcagtcggccaatcagctacccctatagatccatcaatctcttttcacgagttttatttttttaaattttcgatattttattaaatcccttcggttcacttttccaatcccacttgtgcccctcttcttctgccattgtgccactttttgttctcattgttgctgcagttgttgtcgctgaatcgtggctaatgtcaccaatgctttttccgtctgtctgcgattgtttcgcgttgcgaatgccgtccaaatcgacgacatttttggtccaatttgtcggtgccaataatgaatcattatggagtgaagatggacgtcggcgcctttaatgcatccaatttgccccattttttcctaattgtgccaatgccatccgaccattccttcgctttttgcatcgctttgcgcatcagtgcgaatgacggcctttcgcgtcgtgcaaatgcgctgcgctgagaagcattcgccgcggcgacagagacgcccgcgtcagcgtcgtccggaatcaaacgcacgcccgacaaatgtgagaatattgggcgagcagagaaagaggaatcggcagagagtgggggagcagaggcgcagaggacgcggaagacggagagaacgaagcggacgctgaaagccaaaaggtgggaatggcacaaaatgtgccaatttaaacaaacattaaacaaattactcgttttctgtcgtcacatttttgcggacttctttgatcacatcgtacgccaccttaagagcacaataaaatgtttattttattaattgatgtttaaatttggcaatttccaaaaaaaaagaagatttttcctcacagtttttccgttgtgaatcacttggccaccactgaactgctcgccgggtgcaagcacaacttgtttcagcggggcggcccattcagagagacgcgccacggtacagcagcgcatcagcagggaaatatgggtgccgttgttcacctttcattatggcatttaattcaaattttcccaagtctttaataagtgcccactcgcctcgaccaacgcgacggtccattggtcgggcaaatcgcacaccgcggcacttaacgtcccattgcagtgcttaaaaacggtttgctcattttcatttttgtaattcgaatttggcctttcggccgattgactgaccgtctgccggtctcttcgccctccaccgttcgcttcgtctctctctcctcccctctcgtcctcctcccttttgtcctttccttttcttccacttttctctctcccaatttcgcccctttgccatttctttggttcctccgccatttgcttttcttctgtccttttctcgtccgattctgtggagaggaaaaagtggacgaaaacagcggacaaagcggcaaatggcagaacaattctgagaaagggtgaattgggaagatatgaaccaaagcaaatcaaaaataaagtcgagagtctcgaaattgacatgggaaagtcaagccaaaaggtacgaattaagttgcaagtgaatcgcgagagtctcgaaaaatcgctaaacgtaaactgccatgccgacctggcctctcatccggccacactttcaccaccgttggcactttgtccttctcacagtttccattctgctgctgccttgcgacaattgaggaaagaaataaaaacggaaacagtaaatgcaaaacagtcggaatacggtagtcaacttgcatttgtgccgtacagaatgaaagagacgtacggtatgagcagggtaaaagaaataaaattgtattaaagtgcccttctcgacaaataaacgatttaaagcaacggtaagctaatgcaaaaccttgcgcatattcagcagcccaattacagcagataattgtgcacggacgggggaagggacacccatcgcccgagggattgactcgggcggagggattggtggagagggttttgtgccctttttggattggacgaaagggcgggcggaaaagggtcaacgacttttctttttgaggagcgatcattcgttggttggaaatggtggcaagaggggattatttggaattgatttccaaagcaaatgagaagagaaaatgcaaatggaggaaaagcatgaaagggaaa

SEQ ID NO: 12576 - DNA, 2644 bp, Heterodera glycines
ttgtttagtaaagtgatttatcaaaaaaaaaatacaaaaatatttcatcaatatgatcgaaaatcatgcttttccttctcttcttctcagctcattagcacctaattatcggttttatgcttcttgcacccaaacaataacgattcaagagtgtccacttgagggtactcaaactcaaacagtgagtgatatgatgatgaactggcgaagtcatttgaagaaggattttgcggagcattgaaggaatttgaaggatttaatccggaattgaattgtgatgaattgtctaaagcatttaaagaagcgttctgtggcattttgaaggaatttaaagcatttaatctggcatttaattgtgatgaattggcgaatgcatttgaagaagggttttgtggcactaggaaggtgcctgatgagttaaatctggaattgaactgtgatgaactggtaaaagcatttgacgaagtgctctttggcacaatgaatgatggtttagccacggaagttctcgaaggatttggtctcaaaaaggtgccgctggattgtaatggtctacttgatgaaccagaggccaccaatggttgttggcccaaatatgctttccccaatggcacagtgcctaaaacatcagcaaattaatttgcacgtaatttagctaaatttctccatttcagttaattttcagctaattaagcacagaatctgttcgactgacctgacccaaattggtttgatgggaattggtttgaactttgaaatggctgtggacttcggctagaagaggccgaatttggcccattctttaccaaattatacatttctttttgttggtttggtgggagttgttgaaatgttgaattccaacgcatttcctgggataattgttctctcacaggatcatccttacttgccgtcatagcttggatcgtgccgcgaaagccctcaggcgcgacattaatacggtaaggttcgataccgtaagaatcgtctcggaaataaaattccttatctctttcgtcttcaaatgatccttttgagtaagttctctctactctttttttgccttttctgtccatacatttgtaaggtgtaaatatctgtgccaaaatgttcagtgttatgagaagaaaaagatgagatttcatcgctaaaagtacaatggaaattactgcttttacattattagtttggccattttaccatttggagaatttttgtcaaaataaattcatttatgtctaatttcaataaaaaattcacaaaaagaaaaatgaaaatagagaaaagggaaatatgatgatgaaataagtgttggaatgggaatattgatctttttaattttctcatagagtggatttaagaagcatacagtggcggaaaaaagtcttgactcaagatgataaaatttgtagaattttaaatttcgactggaaatttagctgattatttcttgtttatgtatatttaattcggcagataattttgtgctctttccaatgaacctattcaaaaattcccgggaaattttactaactccctaggaattttttcgaaaattttcccgattttcaatgtattttttggtgtctcgatcaccataaaggagtgatctgatcaagttggcataagagacttttttgatcaatatcaaaagttatataaataggattttttcagatttttgggtaaactattaaatagtttttcaagtttgagtcaagacttttttccgccccttttttgaacaaggtctgattaggagacttattcacgagaatgataaagcggaatgaaatgattttgtggtatatgaaaggcccatatatcggggtaaataaatatacataaacaaaaaataatcagctaaatttccagtcgaaatttaaaattctacaaattttatcatcttgagtcaagacttttttccgccactgtatttgttcaggcaaagaaaatatgtaatttgaaaaagaattcaattttcttagctctctctcactcgcttttcaaggcagcctctttctctccgtttgtttgagaatccaccaactccgaccccgttggaggagaaggttcatcccccattccaattacatcacaatgtcgtgtgttagaaattcgttggtcgattgccggtactaatgcactttaccagacataaaattttttttttgtcttaattcgtgtaaaatggttttcatactttctagagccccacattttgattataaagcatggacctgggtttatgcttatcatgggccagtaaaatttttgtgtaaattccagctaaattttagttttaagaactcctggaacttggcctgagctcaaaagtccttaacccaagtccatttccaaaattactcaataaaaccagtaaaattaaaatttctaaaagtcttggaacttggcctagcctgggctcaagaaaggacccaaatccaggtccaaaattacccaataaaaacccagtaaaaaaaatttaaatttaaaaaaatccttgaattggtctagacttccttgacccatgtcaaggtctaaaataatccaatctttttacccctaaaatattcaaaattctttgcttactctttcaaaaataggttactgaaaattgtgagcacgggattgggatttgatt

SEQ ID NO: 12577 - DNA, 1988 bp, Heterodera glycines
gattacgacagtagttgatttcgacagtgcccactaatttttaaaaatagtgataagttgcaatgaaaaaccgtaattcgacagtagtgagttcgattatttaatatttttaaattattactaattaaatattctaatttttccttccgcattgatataaaaatgaattaaagggtaaaagggcctaattatattgaataacctttgtgaattatttgtttttaccccttgagaacgtttttttgtttgtcttccttatcaatgaacgaatgcagcaaagatggcattctcggaggaaattcgccaaacccatttcccatcacccataataaaccaaaatggctttccatcgttttttggaggcaaaatcaaatagggggaaaatgcttctcactaacaatggctacgaatatgcatttgaggtgtcaaattttttgtagactaggccaatttccgagtttaggccatttccaagacagaggatggttacgagtattggagatgtccacgtcgtccgccgtattgtcctggtcgtgcaattgttttgattcggtgggaagtcgacaatgatggggaccaattcaaagaaggacgagtaacggcagatcacaaccacccccctactttgggatggcatttggtattttataaaaatagacatttgccttaaggtaatcataattataacaatcttaaaaaggtgagagaagcatgtgagaaagttcggcaagaggcacgcaatgattttccaacgacaagccgaaatattgtaagagaagtacgtgggaatttgccggtcgatgtccgagtttcgagtgcgccatcttcttctaatatgcagtggaacttcaattatcaaaagagaaaacagcaagaagaagtggggttttaatatataaatagaatgcggccaaatatggacaaaaaaaaagtaaaaatacggacttaaaaattcacaaaattttttatttatttgaaaaagtaattttttgagatctgtttatatttttggtttaattttccaaaaaatatatttttttaaaatttttggcctcttttttacatttttgctattatccgaaaatagcaaatacgggcaaaaagggcgaaacgccaaaattggcaaatttttcaatattttttcataaatgccataatatggacaaaaaaaagtggacgaaaaacgtaaatgtgaaatatgattgaaaatgtgaaatatggaaaatattcacaaaaaataagctaaaaatgctttttatttgcttattagaccgaaattagtatccaaaaatatgcaaatccatacttgccgcactatttataaaataaacaaaaataatatttgatggttttgggtcggagacgttggaatcgacgcctttcctgccaccctgattgttatgccggggagattggctgactgagttagtttcaacgaaattgttaatggacaacagatgattgttttttgctcgccatttggccgtggaactttggctgcgcacggcgctgacacggcaattgacgggacctttgaagtagaattcggggtcactaatcagaattcttatatccatttcgaaaataccgcttcccggacccgaatttgaacaaaaaatgggaaaatcaaattttgacagtttagataagtaaaattggtttaaattttaaatttattataaactgcatcaactaaattgtttagacgagccctagggggttcgaacaagtgtacacaatgtctgcaatcatccagaattgtgccgtgccgtgtgtgtatggattacttccaggtaaaacacaagcaaattattgccgcttttttcgtgcaatccagcaagcagttggcaacgtttggtcaccagatgcaattaccgtatttcctcgattataagccccggggcttctattgttcaacccccctccaaagggggcttatattcgagggggtcttccaatcgagggggggcttttattgttcaaccccc

SEQ ID NO: 12578 - DNA, 1834 bp, Heterodera glycines
ctcccctcgcacattcatcaagtttcttccttagtgtgccgcaggaaaaaattttttaaagatatgacttttaattttccttgagtaaattatgataatttaatatagttaaaaaacgaaaaattgatcggaaaatcttaatttttggtgagtatctgttagaaataaatttaaaattcacccctatcggcacgccgccccccccctcaaaaaaaaaacgaattttttcttaaaaattaccccaaatccctaactttggttattttttagtcaaaatctgtgcaaattatgtcaaaatagatagaattaaggcgatcaacgaataaaggaatgtggaccaaagaaatcattcataaaaaatattttttttttatgagattttttggagctaattcaaagcaaacccccgcccccgcccccgcgggggcggaattttcgtgcccccgtccccgtccccgcgactctgacccccgcaatcccccgcccccgcgaaaagccacccccgcccgcggggctcgaaccctactagaaatcactattttggcgttttgtcacttaaaataatgaaaattcactattttggcattttgccactattttttcactatgtatttcgacattttttggtaaatttctcaacaaaaatgcaataaaaacgaaaaatacacccctaagaatctacatttaaaaaatttcaaaaaatttggaaaattttctcaaaaatcatctcccaaatttttttttcttggcaaattttttggattaaaaatgtcaatatttgccaataaaatattagaaaggaaacttacttcatttgcaactgcaatcagtgaataaaaattatttttgatcaatttttaaaaattatgtcactattcgtcactatttcgcactttttggagtaatgtatgaaatacaccggattccagaaattttcataagtgaaaaagaaaattatgacgaccaaaacgagttcagaatgagtataaatgtcataagaagtgaaaaaatgaagaaatgggacaatttatgaaaaataatgagcaaaataagcagcttttaggcctaatcgagaacatgaacacgaaaggcagattaaacgagcccaaagaaaagaacgggaaaatttacgaaagccattcatttttcaagatggaattgttatcgaaagaggaggaagaatctctgaagaggttgaagagaaagctcgaacatcaacttctgagggtccagcaaagtctgaccgaaagcgaaaaatgaaaatccggaacgtcggatgatgatccagtgggaccacaggagtgggaagaaaatgaggaagaaacgacgaaaaagggcgaagaaatgaaggaaaaagaggaggaggagaagaaaagaagagagggaaaagaaaaagagacggaaaagaagaaggaagagatgaagcagaaggacgagacggaaaccaaacgaagcctcagcgtcggaacaacgaaagacgatgaaatctcgattgtggattctgaagaaagagaaagagatgccttcgaatacccgccgaaaccgacaaacgagcgaatggcattttgggagtcgactttgaacaatgaggcaaaaaaggatttgcgagaggacaaagagaaagccttaaaaacacaggccaagctattgtcgtaagctccagaaaacgaacgataaacgaagtcgacccgccaactctggcaaatgaagccgccacgaaattcggggaaaaaatgcggcaaagcattgaacaggatcagaacacgaaggaggcgcgaacagtgctctccatgctcctcaaaatcagagaaagggcactgatttgggagatgag

SEQ ID NO: 12579 - DNA, 1760 bp, Heterodera glycines
taaaacaaagttaattttttattttgttttttatttaataaaatccaaaagttaaagctaaattaaattaatgaaaattttcaaaccaaatttatttcaattatttcaggcaataatcatttttgactagtgatcgaatattattagaaattcagatttgcttttcacagcactttttttcggcgcgctttttccaaaaaaattttgcgaaagacgggggtccggcggtgccgataggcgccgccggggaaaattttgaaaatttgagtgaaatttgttaacagattttcaacaaaaaagactggtttttgggattactaggctcaatttgtacggattttctttaaaaaatgataaaatatgtataaataaataaaaaagtatgaggaataatattttgtcgataggaaaccaatgaatatacaaaaagaaaattcaaaatattttaatttctgtagagggattgaaccaggtgaaagaagaagacaaaagtcaaagagactagcgccaataagccatttgaacaattggtagtaacacttttaaagaatatttttatcattttttggcatcggatggacaagcggtgacaaaatggcttcactccccgtccggacaaagtgccaaagttattgaaatgctcattggacaaagatgatttgcatttcgagttgaggattgaagccttcaaagcgctgctttcatttatcatttcgtatttcttattcaattttcacacctttcaggcttttgcttcttcacccgtcaattttattgtcgtcatttcgtttccgttgcattttgctttctccgttgtgccattcgatctgatcaatgaatttactcgtgaacaattggcattgaaaataattgacaataaccgccgttttctgctgatccgttgtccaattgcgcgagacgaaagcaaatggacaaaatgggaagaggaagcgattggctggcgaatttataaccagtggagcagtattgagattcgaatttatgatgaggatgaaatcggagacgggtaactgaagaatgctttttcaaaaatgcgaatgatttgctgcgaagtgatcaacaaatttgaaagatggaattgccaaatgaatttgaggctattttgacgtgcttgtaaaaattgttctccttttttttgttgttggaataatctcataataattaaggcttcgacatttagttaatcgaaataataactaaatagtgtgacaaaaagtcctaattagtagcataattttcagccaaaaactgagcaaaattattattattattactggttacagttgcagggtctccctgttcttaaatgttgtgaaaatccatgccgaaaaaatatcattgatttttttttttttgtgtaaaaaaactttatttttgcggtagaagcatagttttatttctccgggcattgttttcaatatgaaaattttggtccgtcaattttttttgttttgtttttttatagatttctaacccaagtggccaggccagaggtgatcaaattaaaaatggcaaaaattgttatatgaaaaagcagtactcaaattaatagaacacaaaattgattaattacctaactaccagggatggcaagaattccgatttccgacatttttggggtcggaattccgatttccgaaaaatttttgggcctcggaattccgatttccgaaaaattttggacccccggaattccgatttccgaaaatttttggggcctcggaatgccatccctgcta

SEQ ID NO: 12580 - DNA, 4363 bp, Heterodera glycines
  unsure (1)..(4363): unsure at all n locations
aaacgttcgaggtgcgttatgcgcttcggggtggggtgggctgcagcaaaaaaaaaaagaattntattcgacagttacaatcgaataaaaaaaatcccttttcatagggaaatttaattgttgtgccaaagatgntattcggtttagaattaaaaaacaaaccgagttttatctattttttaagaattgaactgcatatgttctgtatcgggtgcattacgatccccacatcgaaaattgaaaaaaaaattcaaacaaaaataatattaaatttaaggctatattattatttattcaaaattgttttttattaaaaaatctaacaatatgaatttttttaaattttttgggcgaagctgctcatttgaaatctctggtgcacattgctctctgtataatctgtcggtgttttaggcgtggaattacagacaaagtggccatttgatcgtcgagtttggctcgttggcttcggtggaattttttgttgagatgatggccgccgatcgcattccgtaccttcacaagcccgtgggcttccaggatctcatcacggtacactttttcaaaaaagaaaaaaatatttttttttcctggcggttggcgattttacacccgttgccatttgtagtatttttcctttttgtgcatgtgggttggtcaaccgaaattttttggtcaatttctttttaaaaaaataaaatttcgggaaggaggggccctgcccttgaattttctcaattttcattttcttttctttgcgctgcacagtttggtcggcgtcagttcttcgagttggtctaccgcgacacgggcgtcgatttgttgggctgcgatggcaatgtgagcaacaccagcacattttggcacatccatgcctaataaatcgattttgttgccacaaaaaaataacatttttagccaccttcctcggaatggaaccggcaaaggccccgtgggatggccgttcggagtgcactcggcggaggtggcaacggtaagcaaaaaaacaatgaaatttttcaaaaattcccttaaaatttttcaaaccattttttcttgaaattttctttgtacaaaaagttttagagggattcaacttaatattttgcatatgatgattgagtctgtttttcacaaaaattttcctaaaatttgctgaaaaaattttcaaaaatattcttgtaaaaaatttattttttttcttgaaaaattctaagtttttttggggggagggaagaattaagaaattccatcatctcaacattttgtacatttgcagcctttccgcgtcgggccggcaagccgtacgagcgcgagcgtgggcgcaccggcgctgccgcgtcatcgtcgtcgagttggcgccgtcggtccgagtcgccgtcgccagtgattgacacgagtccgttcccgagcgccgccaccaccaacggcactcttcgacgggtaaaaaaaattttttttttttgatacgacaaatacacaaacagaggcccgtagaagaccaggatttcggccctggcgatgacttttttctttttttgcagcgatttttataaattggtgtgtaacctatataggcgccgcttgggaaaaatagaaatttttaccattttttaaaaaccatgaaattaattatttgtacagtaccgaatatgcagcgtaaaaatattaatttgtttgaaaataaaaatgacaacaaaattatggttcatttttggctatttccctctctctctctccatctctctcttttccccttctatctttggactctcattccaacacatgcactctttttctccacacacaaacactctctttcttttcccaggcttctctctctctctctctcatcttcccgcttttcttccctcggcttgctattctattctattctatcgcttactatgtttttttataaattcattttcttttggtggtccgtagccgaaaacttttttttctttgttctatatttcttaatgccaattttgtctttgcttttttttcaaatggctacgggcctctgttttattgtttgtttgctgtttttcattttgtattatgccaagtgcgacccagggatgactgaatactgacttttttgaatgatggcattttcatgtcaaaattggtttgaaattctaattgctaattcatccctgtttcgccaattgtttgttttgctgttctattatttgttggatgcatttttccctggagctccgtccacccaaacccggcaaaaatctgaaaattttaaaaatttatttttacggagaggaccgagacaaaaatggcatgggtcagtgccgtaatgcatttattgtaaaaaattttgttataaaaattcaaatttttttaaaattttataaatttcttttaaaaatatttttgaaaaattgcaacaaaaaaatataaaataattttctatttttttatataattttaaagtttttttatgattttttacccaatttgccattgattgttatgccaaagggggacggaactgtccaatttttggaatggcacttctgccaccacccatacacttcatcatcattttgcacaaaataaaaaaacaattattgtcgtgagcagggcggcggtggtcgctcgctgtacggctcgtaccgcctctactgatgtgtgatggatgatctgcggcgctgaatacggattttgtgcacacggatagagaggagggcattggcactgcgtggggaatgaatgatgagcctttgtgtgtgtgtgtagcaccaatgaatggcacacgtgccgagtgcatcgatttcattttacaaaatttgacactttttttttgttgtttttgttttgcatcatttgctttgttcaaacggagtactatttcttcattcccctctcatctctccaccctcccgcaacagacactattattattattattatattattattattatttgattttatgttagggttgtgcgcgagacttccgactttctgaaaaatgaattggttcgagaaaatttttttgtgtttccatttttttaagttttcatggcagtctctctttctctgtcagtctcctttctcttagcttacaattatctctctcgctcgctcggtctatttctcgctgtcttttggcattctctctttctcgatcagtctcttcttttctctctgattttgtaagtgtcttgatcggtctcatttttttggcacgaccgattgatcctcattgttttgtttctcgacatggtcattgtcctctggtccatcctttgatcccatttcaaattgccattatttttttttggaaagcttcgcacagccctaatatttcctccccgtcccctcccctccccccacatttaattactctctccatttcatgttaaaactgcaaaattcgaacgaattccatgttttgtcgtgttagtcgaagccctaataattggacataatattttttcatttgttgggcaagcgactgacataaaagcattttgtttgacatctcttcaagttccactattatgcttttttccttttatgtaatacacaaaaaattcattttttttttgcatttttttctcatctcaataaatgttcttcgttactcataataattttttaataaatttttttttcccattaaaaacattcaaaacaaagttctgtttcaataaaaaaaaggttatcaagtcgggtgccaatacttatattactcttacgccttaaaattacaacaaaaaaaaagttaacaaaagcgcgcaaaaaaaacacgattttttcccattctctatcataaaaagtttggttcgaattgtggcattctccaaatcatggcacgtactgaactgatttttgcgcgccctttgttgatttttttaaattttcgggcatatgagaaaaactgaaaattaccgaatgcgcctaatagtaccaattacttgaaattaggaataaatccgattgcttttaaatgccaaaggtgatacggtgcttttggggtaccctaataccgtccgtgtctattgttgccactaaaccaacgataatctcatgagtacgatgcttttggggtaccataataccgtaatcttcggtcaccattctcacatttcttgcaaattttgcaaacgcaactcataaaaaatctttgattgaattttccccagtttctgtggagcaccgaggccggacgaaagcacattttgaccgtcgacgaactgaacagaggcggcaccgcgacaacaaaagcgaaaacggcgggggcattccaagacaacaaaacgcaacaaaagttgtgtgcacgggtccaagaaatgaacattgaggagggcgaaattgtggaggaccacggcgagga

SEQ ID NO: 12581 - DNA, 2826 bp, Heterodera glycines
aaatcatttggtaatggattcaacagaaacggaacctttacgctttgtggaaaatattttacttacagatttgaacgtttcagacgcggtgtagaatcttaaaaaattaatattatttaaatcttttataagatttacgcgatacaaattaaggaaatagtaaagttcatgtgatcttgatagaaaatggataaagaaaatgtggtttattgaaaaaaatggtgttaattcgcgttcagaatctataaataaattaatattattttaatcatttaaaatattttagttatataaatgataaattgaaatgtattaatgctctgataaaaaaagcatttgataatggattcaacagaaacggaaaaattagcactttgtggaaaatattttacttacagatttgaaggtttcagacgcggtgtagaatcttaaaaaattaatattatttaaaacttttataagatttacgcgatacaaattaaggaaatagtgaagttcatgtgatcttaatagaaaatggataaagaaaatgtggtttattgaaaaaaatggtgttaattcgcgttcagaatctataaataaattaatattattttaatcattaaaaatattttatttatataaatgataaatcgaaatttattaatgctctgataaaaaaatcatttgataatggattcaacagaaacggaaaaattagcactttgtggaaaatattttacttacagatttgaaggtttcagacgcggtgtagaatcttaaaaaattaatattatttaaatcttttataagatttacgcgatacaaattaaggaaatagtaaagttcatgtgatcttgatagaaaatggataaagaaaatgtggtttattgaaaaaaatggtgttaattcgcgtgcagaatctataaataaattaatattattttaatcatttaaaatattttagttatataaatgataaattgaaatgtaagtagtatatgacccctaaaggttgcgggttggttgcgggtgtttcccgcacgagcccgtgggcgcagccctttgaagtagccgccgtggacatttaccgccaagaaccaaatcctaagggatggatgcgcattcctttgattccaaaacctattggaccactttgatgtagccgcctgaccaaatccgatttcccaaattgttgcgggtgctttttttttcaccgccgcgcagcgccgcgggaaggtcatcaatcatccacctgtcaccaaagtgacaggtggaggaaattcaatttaacttttgcaaattttaatcttttgttttcaaaaccttttagcgttttattttctcaatcctgaaatttttttatgatgattttttgatcctgaaattaaaaattctttttgaaaattagccaaaatcgtgaggttttttcatttccactcactccctgccgatgcgccgcgatgcatcgccgcgcaaattaatcgataaaaataatcgataattacactagcactatcctccctatcgatggcacctgcccgccagcgagctttgaaatgagcactcagacccccccgccccaccaacccccctgccccacgggcacctgcccgccagcgaactttgaaacgagcactcagacccccgccccaccaaccccctgccccacgggcacctgcccgccagcgaaattaataaaaaaatacacaacaggaccacaaattgagggaccgtcccaataaatgaaaaaaattttatcgtctctttaaattcttttgagccattttcagatagggaagaatataatgatacatttcatcaatttcagaattgttttttgttcccgtaattacgactttaccggtccagaaaattaacgctgtcctgcttttaccccgcttgaaatttaaaccgcaaaatatttcgggttcataaaaggcacgacgattttttcgaaactcgttcagttcaatttcatgtccgaatttaaaggtcgaaacaatattttcaaccgtgtgtccggtgtaagaagcccccggacaccccgagcccttaattatttctataaattttttaatagcattttcacagtctatcagacttttcgtccccagacatatcatttttccggattcccataataatgccgtggcgttgataggagttgtacatttgataaccgcggcattgaattttctagggttatacttaaattcgcattcggtgatcgtcagagagtttagtttaattccggtaccgagattagcgagagcaattatatttacgattatcggtttttgcattttgatacaatgtatcaatcaaatggtcctttcactccctttatataccccttctataaatagcaacccaaaataaaattaaattgaaaaatgaactgcccacataaaattaagtgttgtcattactgtccctgtcattacgagatttgtagcaggtgtaaatagcacagtcttttgcatttcggtacatcattatttgataatttctggctatgccccaaatgcgcgaaacatgttcctatgaaaatataaataggtcaaataaataagaggaattaaaaatgtttcgcggtccgttcactctaattctctcgggggctaccgggagtggtaagacccgttggctattacggtttttaaaacaccataagaatctaattgaaccatcgcccaccaaaattctttattgttacggtgagatgaatgatagtattttaggattaatcggggagggtgtcgagagttttaacgggattccggacatgaataagattaaagaacaaggaaaacccctcttactgatacttgacgatttaatgct

SEQ ID NO: 12582 - DNA, 909 bp, Heterodera glycines
tccaagtcaaagcaggcgccctgaatgtttgcattctgctggcccatttgacatcgtctaaatggcaaaaagggaatggctccaggcatagccatgggcccgattaaaacacacacaccgtttcaattttggcatctcagtcccaaaaagatttgaaaatgtggcgaagtggttcttgtaagatagttaagggacaaagggtggaggttcgagtccggtgtgcgacatgagtatttttattcattttcgtccaaaaattaaagaaaatacaaattcgtaaattatttttgatgtttttgccagccaaattggacgcttttggttccattcgaaagatcttaatgacaaatactaaggaatttgatcccttagaaaaaaaatctatgagcgttcgaaaatttgatgcaaaatttggtgcggatttaacgtactgaagtaaattcaattttacaaaaatagtacgtcaaaatgggagatgtttttttctctgcgctctctatttattgttcatctctcgctttttgaaacggtgtgcagaacacagcttttcattttcggtttacctcgccaccattctggggaccattttgttcgcgtgttcctgcagacgataaagtgccatcgatgggtcatggtccaaaatgtgggcacactccgaaagacgctcggcaacttaagagaaggaagatcacagaccaaactgaagatgttttgagccctcaaattcaagacgtacgctgtttggaccggaattgcaagtcgcgactaattggcgaattcggaggatccattgactggagacgaaaactcaatttagcacacaaaaatatgaagaaaaagtcgcacgatgaacaatcaacaaatgaggcaatataaaattttaggttattaccgtagaaaggtaaaaaa

SEQ ID NO: 12583 - DNA, 2560 bp, Heterodera glycines
tctcctctcccttcccttttcttcctctccctcccatttctctccttttcctcctctcccttcccttttcctcctctccctttcacttcccttttcttcctctccctccccgttctctttcctcctcccatttttctctctttcccccgttcaccaccctctccaacttttccacctgactgtgaatgagtcgctttctgcgttcggcccattcccaaaagtgtttcctttgcacttccatcattcgttcctcctccttctgcaaaattggctcaaatcgtactgccaacatctcggaaagtttttcggttgcttttgctttgttaatttcaaattcggcacttttttgctcaaataatttctgaataggcaatcgtgcgaatgataattttttgccattatcactttcagtgccattttctccgattcctccgaattttggtcgtctttttctctttccgtttgcttctccgccgcttcaatctgttcgtcaaaattcaaaaattgctgcatttgttccatggaggaataaatcatttgccgcgcattgtccgatggagcaactgtgataaacatctcttccgccaatgacttcgcttccgtccatttccgctgtatgctcaaccccaaaagtctgatcactctgatcagtgtctcgtcgtaattcgtttcgtcattttttgccaatttcaaatggtatgaaagccattcgagggctttgcctgccattcggtcggagtcattctcatcgaagtgtccatcccaaaaagggttcttcagaaaagggtagcgaaaaaggcgctgaaatgggaagtttgggggaggagggaaatgggacggacggagtgccaaaaacggactgaccacgttctcctcattgaagttagtctcgtcctccagagaaggtgccattttcggatggatttgctcatcgagttttcgttccccttgcgtccactcgagaagggcgcgagtggcgagaaaagtgagcaaagggaagtcgaacatttcctgcagcatcacataaatggcaattttggccgcatctgtggcaaatgggaaggataattaagcaaaaggaaaccggagaaaaatggacacagacattgcaactgagcggagccgagaaaatggtcgaggaacatgcagcaaatgtgctcattgggaaagatgccgtagttgatctgaaaggccatgggaatgacgcgggaaagggcaggggaccgaaccgggtcattaagcaaattcatgaaaacgccaaattcgccgaattccagtaaaagacggcacagagtgtatctgaatacgtaaagtatttcaaacggaaaaagaaagtcagactcagtggaagggagcaaatctcccgcagagtctgtatgtcgaaatttgtagcaaaggtcgaccaaatcggccaagtgatcggagccaacggggacggagcaggccaagtccaagtcgatcgcactcaaatggcacaatgggcgtacgacaaaagcaacggtactcacctagccttaccaaccccggtgaactttttctgaaccgcgacgatccattcgaaattgtcaccgccgagttgctccacgctcaaatggccgagccgaccgtcccactcagccggaagagcaaaattggagctgagaaaattgacagatggcgaattggacgaagcagcagcagaacattggcggaacaatgggacatgggaatgggagagacgagcaaaaacggacggaaaaggcgaaagaatgaggcgaaaggccggcatttctaagcagcagaaaagtgagtaaacatatggaaatggaaaaagtattgaaaggtttggtcaaacaatgaaagaaagaaaaacaaacattataaaaaatgcatttaaaagtgatagtaaggaaaagcgagtgattccctgcatcggtttcttcttctgcattagtctcgtccctcttcgcctgtcgtcaaattgcctcgcacatagcatttcgtctgaagccgaaagagaccatcttggcactttttgtactaaataataatctgatcgtctcacaatagtgttagatcagctcacatggaagcgagaaaacccaatgggtattgccaaatggtggactgttttgaagtgtttggagagtgccgagcctcgtgcatagcgagaattgcacaaatggcattcgtagggagtagggttgaaatccttgacagagagagagtcagtcgaacgggaaccgagcaattgcccccccccccgcatcgtaccccaccccgaaaaacaaatttttttttttttgaactttccggaaggttctctttgaaaacctaaaaatattcttttttaagaatttcaatcgaattttccataatattaattttcaaaaaacccaatttttcaaaaaacacaaataaattttttccttgaaaaaacttctgagaaattggaaaactttacgggcctgatcggaaaatccgtgtccctcgtaccttttggtgctgccttttgtgctctcgaagttgctttgaccaacgaaatttttttccgcacctgttcgcactcgtaaattaagtc

SEQ ID NO: 12584 - DNA, 2536 bp, Heterodera glycines
tgtcggtaaagctttgctgaaagttgttattgctcttttcctccgatcaaactccatttccccaccaaacacgagttccattcgcaaagcaaagggtcgccctgataaacgaggcgacttgatttttcgaagttgcaactgacattgagcagagtgaaaggggttatagaaacattcaaatgggaagacctcacaagttgcggacaacgaccctccaccacggaggcaccattgagcatccgttcggcatggaaaagatgcattttcatatgccgcaccaattcgtcaaacgatgagacaagaatttgacatcccctcacctgacacactgaataaatttctttttttctaaaggcggattttccaagtaacaaaaacatgccaatctcagtcaaaggttcaggtccaaactcaaacatatgttggttcaaatgcgccttgagttggtcagaatgctctattccttcttgacagcctgcccataaacaaatgtatgaaactttcccaaatccatcgctgacaatccaaagatttgagtgtacatcgggactggatgaagattgtccattctgtgcattagtagcacacgcaaaattcatcttcaatttaaaaaggccgaaacagaaaactaattgtaaggaattttatgaatcgaaaactattcgttatcataaaactttacagaaaagggaaattgatccataaaaattatctctacttttgctctttatttgacagtttaatgaaacatttacaagactaaaactcgattgatatcgtactatcagaagtttccttcaagcgttactgattgtctcgctgtagttgttaatgactgcttgaacaacttctgtactatgattcgtgccctgcaaaaaataaatgtgaaaccattttgtattaattaattgaggatttcaggtgaaatgaacaattaatctctaatgaacctcaacattaattgtaagtgaaatgggtttctttatttttggcattgaatttccattccttttttagttttccatggttgtgggcaggcacaggaataacttactccaatgtcgggagtatgcgttctctgctccgtcaatgctttgtaaagggcatcagaaagtttgtcagcataatcgtggagctcaaggtaacgcagcatgtcgatggaagctctgatgaaggcagttgggttggcaatgtctttgccagccaatgaggttcccgtgtttcgtgtgccctttaatgaaagtattctaaaaatgcatgaataaagtaaactcataaaatccatctccaacttgtaaggcaatatttaactttccgacctagcaaatgcagtaaatccctaacttactgtttcaaacacggcatattcttctccaatattccttaagtttcagtaaaaaaatttcgtagccgagtgaaaactcacattccagagacaaggcccggtcctccgacaagaccgcaagcaatgttcgatatctttaaaaagacgacgattatattgtacgttccacctggaagagcagtgtctttatttacaatatttccgtaaagatttggcatcagaagaatcccgttattgaactgttgaggaaagctgaccaattgcatgcacgcgttgtccactgaataaggaaacaaacaatgggagggctaatgtgtcatatgtaatgtaaaatgaataataaaggaaaattcacaatttatgatgtcagcgcatccctcccatccctaaaaaatactccccccccaaaacaaagatacataccaatcatagaattgaattggagacctgcatttttgtattcagtttcagcaacttctttacatacctaaaatcaacacgctttttttacttaaaaggttgttcacctgaagaaaaagcccgtcaccaagcttctgaatgtttgccttatgaatggcggttatctgaggccgattgttcaaaaccgcataatcaaatgcaaaacgagctattttttcgatgttgcgacgagttacaatctaaatctactcttttaaacaaaagacctccagccaaacactttaatgctctccacgatgcctttgacagattcgtgttcgagtccactgtattctccttcagtgttttcacgaatgagaaccaaatccaaatcgtgatgttttgctggtatcgtaggaatagagacacaatggagcacatttgcgaaccagaaaatgaccgacaattaaaaaagtaatgataataacatacaaagcaagacgctttcggagttcaacattacgcgatttgtacgtcgggtcgtcaaatttagtttcaatgttaccctaaagagatgaatttcatcattttgattaattgagtaaatgccacaacaaaaaactgtgatcaaaatcccaaaaattaaaatttgacgtaaaatgtagcttgattcagaaaatcagctagaacttttttgtaatttactcactttaattgcaaggccattacgctgaatggctgtgatggcattttccaacacttcgtttgaaggatctttcgagctcaattcaa

SEQ ID NO: 12585 - DNA, 2604 bp, Heterodera glycines
  unsure (1)..(2604): unsure at all n locations
aaaaatcgcccatacgttgtgcgccactctttgcaaatgagtgagtaaatgcgcaatgtgccgtccgcattccgtcgcccgaaccggtaaagccagtgctgaaaaatgaaagtcaaatttagtggctgtaggcaatttccattttttttgtttttgagtctcggttccacccccccattttgtcccaaaccgacctcattacaaaagtcggtgaattggcgtcgttcctcgaccgtctcgcactcgcccacgtcgatgttggccatcagtttccacgacttgccactgttgtccacgtaatcgtcaaattggaccgtcgtgtttatgaatgagtcaaatagtgaaccatcaaaaccatttccactttttttgttgctgttaatcggtgtgttgtcaaggttcttcgtaatgggtattgcgtgctataagaaagagaagtgtgtatatttaagactgggtttcagtatcggatcatttgttggctgagatttcgccgaattgcttttccaagggcttttaaattaatggtattttgaataaattaaagatgtgcgataggggtggatgggttgggagcagtgatggtgtcaagctttaggcttttatcgcttacaattagaaaggggagggggagggtacccactagaaagttatttcttccaattttcggagttttttgtgttttgaaccccttgggatgggttgggtgggggtacgtaccctaaaaaaacagtattcatcataaaaattttgaaggcagaaaaattttacgaaaaaattgttttctttatattttctttttgaattttttaaaaataattttccggggctggggggaacgaactgctccgaccctgcatagtctaccccaacccatgggactgtccccggttggctggccaaccccacctgctgctgcgcctggtcgcgctgctggaaacagccggtcgcttcgttcgccgccatgtcgttgtcctcctcttgcggcggcggatggttgtgcgactgaaaggcgaacatcgctcgccttttcgccacgtacaccgcccgaaaagggcacgtcatgcccttgcggcgactgatgaaaaaataatttttatatataattgcattagggataagagcctcatgagatggggacgggaaaaatcccgtcgctggaattttttttaattttcaaattcagcgatttttaaaatttattttactaagttttttcaaaaaaatttccaaaaatcggtgaaatttttctcaaaaattttttttgaaattttcttataaacaattttttcttcataatttctaacaataagtattaaaattaaaaaaaaattcagctgcgagattttgggctgcaacacacgaaatggcaaaaacttttcggtttgttttccacactttcccaactcataaaaattaaacaccaaaaaatgaaataaataaataaatgctcacttgctaaatttgcagttgaagaaaacattcttcaggtaggtgttctttttggacaagaaataagcttgtcggaattgtcgcattctctccgggtcctcgtcaatgtcgtccaaagcgaaaagccatcgccattgtttgccaaatttgtcacaatgcgacggcggcggtggtgccaaactttggctgatcaactccgtgttgatcacgctgattttgtgttcatcgaaattggcattgtctataaaacagagtgtttgagttaatttgccgacatacaattaacaatcggagtttatttttatgagaattttcatcgttaatcactccgatttatgtaccaagggatgaaaagcagcataatttctcccattttagtaaaactcaatcttaggaatacgtttatgatacaatttttaatctacgacttgtcctggtactcaaaataacgcctcatcgaatggagggcgctttttcacccaaattttagcgtccatcggaatgttccttctgttctccccctccccatcccatgaacaaattgccatcgcaccaatgtcgggcagtgcggcagaaaatgccgacaccgtgtcctcattgctggcacaacaaccgctttgccgctgcagtgccgtcgtcgtcgctgaacaacagcttcctgctctcccccttttggcactgccattttgctgttttttcggtgccgttttgggcgtcgtctttgctaatgttgctgttagtgttgtggttgttggatgattgtgtgttcgacgatagaacagcgcttgccgctccggcaaaaacagtccccgctggggacacggctgagcggacgatcgacaaccggtccagcaacaactgaaagtgaccaagcaaatggggcggtgaatgtcatataatactgaatcatcccccggatggttccgataaataaaaaacccccaaaatggnngagtttcttgaatggtaccatcaccaaatcgaaattaatcaatggcaccgaaaaaattgctgtactgcggttaaccactcagcaccttaagtaaatgcgcccgtcatatttcggcgtccctttgcgatgcaaaaagtgttggntcggcgatttggtccaactgtgcngacatcggttggngacgagcaggcgccactctt

SEQ ID NO: 12586 - DNA, 2487 bp, Heterodera glycines
ttggcactgtcattttgctgtttcttcgatgccgctttgggcgtcgtctttgctgatgcttctgccggtgttgtggttgttggatgattgtgtgttcgacgatagaacagcgcttgccgctccggcaaaaacagtccccggtggggacacggctgagcggacgatcgacaaccggtccagcaacaactgaaagtgaccaagcgaatggcggtgatgccattacaatactgaatcatcccacggaaggttccgattaaatttatttaaaaaaaccccaaaatgggagattttattggatggcacggcaccatcaccaaacaaaattaagcaatggcatgggaaaacttggcagcaaaattgctgtacttggttgaccactcattgtcagcaccttaagtaaatgcgcccgtcatatttcggcgtccctttgcgacgcaaaaagtgttggtcggcgatttggtccaactgtgcgacatcggttgggacgagcaggcgccactccttgctaaatttgtccttgaaaatggccgggttgttgccatcactggtggcttcatcagtgccctgtgccgttgtttccgcttttgggtggcgtgccgtcgttggtgtcgtcgtcgtcgtcgacagagtgcagactcggagtcagtcgaggcggactgtgcttgggctcagactgatgcgatgccgaagtgatggaggaagtggtcgaaaatgttgccgatgtgctaccattgcacgcggcataatcgaaacaacaattgccgtcgtcactctctttcccttttgtgtcgttggcactttcagtcgtttgtaccggcggcaccgccgacgacgaacgtatggcaacgaatggcactgatggtaattgataaaacttttatttttccaaaaaatgtcaccagtaacaattagtcgggctctgatttttgattgaacccaatgtttttttataaatttttttctattttaattttcgaacttcccattaaaaatgaaaactgccaaactcatgcaaaaccagccccattttctgtcacccatttgtcgtcgtcccttcccatgcgcctgttgctgtccaattccgtcgacggcgaataatttgttggtgccgtcggcgttgttctggtcgtcaaattcgcatcggtgttggccggagttggacatttaggtgtagttgaagttggacactattattttttaaaattaaacaaagctaaaaaatcgccagacttttgtaacaaagattccgagaaaaacaaaaattttttggcacttttgctgtttagggcccccgaaaaaaacccaaagggggacccttgtgaaaggatttggaattggtcgatatagctgtcaggttggtttttagcgctccgaaaactccgtgaacatgttttctcggcttatgacaaaaaaaaacttacaaaacaaaagggtccactttttggattttttgggggcattaaacagctaaaatgccgaaattttagcaaaaatgcaacagttttatgtagattgtacagctacttatttttgtgggcacttcttccatttccaatttgtctttttccctttccactcacttccgtctcctccgtcccctccacttttgcaatttgctgcaaatggcagcttcctccgtcaaattcgagctgtttggccaacagttttgccgcatattgcgggtgtttgtccacaatgtgtgcggtcatcgcagtcaattcgcatgaattaaagctttaaaaaacagtaagcataaaatcatccgatatttgctaattgaattttgctcgtctgtactttcctaactgccagagaaatacccgtgattctactttaattcgaaaaatagttcaacctttttccacattccatgcattgagcctcttcgtttccgtttcgaaattgccgtctttcaaataaatcgatggcccaaatgggcgacttttgttgttgcataattttaagtggttaaatttttgtcaaggattaaagcattgtcaatagtctaagcaataaatacaaatttacactgttagctttattttcaaaagcaaccgacttaaaattttttaaaatgttgaatcctaaacccgcggcaggattcccaaaatatggtttttgtgcgggatcccgcagcactatgggtacgccccttcattgcattttttttattcaaagaacattatgccaaaatttttgaatttacagtaacttttattgcatggagtgctgtggctgtggtagttttttggtggctatttaacatttaacggcatggccaaagtaagttgaacaacaatcttgcaaattttatgattcggaataattttaatggacagattaaaattgatttttaacggtgtaccgacatttgcgcttcgaaacttgtcatccaaatccaatattgttggtatcattcgaaagctcttcacatgctctattagccttacaaaaagcaaaaagattttttgggttctgaaaaagtta

SEQ ID NO: 12587 - DNA, 1152 bp, Heterodera glycines
tcaagtttctattattttcgtgaacagcaacatttttcggcgcaaaatttcatttttggcattttacaccaattttctgaaataatgaaatttcataatatctctttaatttttctaaaatctctttacattctgaatttattttatttttattgaaaatatgtttattattttcgaatgagctccagtagaaagtaataaaattttatttaatcattaatttaccaattggcaattattttgtcattaagataaaattattaaaattatttctttgaaattaaacaggatttccttattttattaagtaaaataatgatttattcagttttttaatcagaaaaaaatcatttaaatgcctcaaaaaatgaattgccatttaattgaagaaaaataaaataaaatcttgaaaatgaaattctgtattttattatttttatttttgattgccctaattattccaattgaatcagaaaagaaaaaacttcagcagaaatcatttgatgaaatatttggagaaaaatggcaagaaaaagaagaagaaaggcgaaatgaactcaaaaaaagagaaataattgcaaaattttataaataaaagagaaaatcaagcaaaaaggacgaaaatattcagcaaaagaatgggataaaataaacacgaaaatagcgaagagtttggggacaaatgataattatattaaaaattggattaaacagtttggtcttcaaaaaaagaaaagttataaatcaaaaagtgatgaacaaaaacttgaaattgttcagaaatttattgaaatgtcaaatgaatacaaacaaaaaagaaaatattcaactgaagaatggactcaaaattatgccgaaatttgtaagaaaatcggagttaattatagagcaattacaacatggaaaaaacagtttggcattagtcttaagagaataacggaaaaataaaaaatggaaaaaataaaaatttattggcaaataaaaagagaaaatccgaaaatgagtgaaagggaaattgcaaaaacattacaaattgatagaaagagcatttcaagatggaagaaccaatttggagaagaaatttgaagtattaaaaacagaagaaaaatgggataaattgccggaaaaatatcacaaaaacaacgaaaaaat

SEQ ID NO: 12588 - DNA, 1773 bp, Heterodera glycines
tttttaatcagaaaaaaatcatttaaatgcctcaaaaaatgaattgccatttaattgaagaaaaataaaataaaatcttgaaaatgaaattctgtattttattatttttatttttgattgccctaattattccaattgaatcagaaaagaaaaaacttcagcagaaatcatttgatgaaatatttggagaaaaatggcaagaaaaagaagaagaaaggcgaaatgaactcaaaaaaagagaaataattgcaaaattttataaaataaaagagaaaatcaagcaaaaaggaagaaaatactcaacaaaagaatggagtaaaataaacacgaaaatagcgaagagtttggggacaaatcgaaacaaaatttataaatggattaaagaaattggactttataaatatcacaaatcaaaaactgatgaacaaaaacgcgaaattgtgcaaaaattcattgtaatgaaaaatgaatttaaacaaaacagaaaatattcgcaaaaagaatgggagaaaaattatgccgaaatttgtaagaaaattggagtaggccgtgaaacacttagaaaatggaagaaacaatttggaatgaataaatttataacgaagaaagaaaaaatggaaaaaatgaaaaaatattggcaaacaaaaaaagaaaatccgaaaatgagtgaaagggaaattgcaaaaacattacaaattgatagaaagagcatttcaagatggaagaaccaatttggagaagaaatttgaagtattaaaaacagaagaaaaatgggataaatttgccggaaaaactatcacaaaaacaaaggaaaaatatacatttaattcataataaataaattttaaatccctttttcaggtaccaccaccacgaattttgcaacctccacaaccggccgtggcccctccgagtaaatttaaaatatttttttgacatcttaaatttttgctttcaacaaaataaaagaattaatgctatgattttaagagaatccttatggaggtgttggattcgaaattttcaaaaatttcgtctatttttttcataattttgccacaaaattaaaaaaaaagttagaattggaccagggtttccgagtgttcgaattggataggatttaatcaataaggctttatgtaaatttagtcgtccaacctatttcggataattatgataaaaaattaaattcgattttttggaaacatttttataaattttccataaagtgcaactcgtcccggtggctatgtgtgcaatgccgtgccgtaaaaaggcgccgtgccgaatgccaatgcgcaacaacggcaacggcaacaacaatttttgtgacttctgttgtggcccgtgctgttgtccgccatgcgaagacgacatttgcctatgcagcagaagacgaagacgatgattatgacaacaaaaaaaaataggagaaattttgaaaaattgaaatttttacttaaaggaatttttttgcgttttttttttttgcaaaataaaattgccggagacaatttatagcatatttaatgtttaaacagaaaacagtgttgacgcaatttttagttataaaaaagcacgaatttggggtagaaaaaccgattttggataaaaaaaaattgttcgaattcgggttgggattagaaatgtaaagctttcgaatgatgccacgattgtcggatttttgtaaaaacaaaaaaaacaattcaacaactcgagctgtcgctaaaatgtcggcaacaaaacgactcccccgcacgactcgcttcaaat

SEQ ID NO: 12589 - DNA, 972 bp, Heterodera glycines
ttccttggatacatttggcctaactttgctcaactttgccaaaatttttgaaatttagatgagctagtagagaagtcttagggctatcgaatgatatcaataatatttaatttggttgacatttacaaaagttagagagaagagagtgagtgagtgagagagagagagagattgaagattcggaggggtagagggaatctgatattaaatgtacaatatgtacgttggccattgaactaatttatttttcactggcaaatattcaacgagtaaaacattgtttgttttgtccaaagtttcgcggttttgctttggaaatttgaaatgttattttttcaggaaatgtattttaaaatagcatttaacaaaaatgaattttatttaaaaaaataatgaaattattcattatgcaaatttatttatcttttctattttttcgtttatcttatctttcaaaagtgagccacctatcaaaaaatcagattaatttcattcccaggcggcctatcggtgttatgtcgttcttcaaaaaccataatgcttataaaaggtttttgatgagtaaggaggacccagcacccgcctatcggcacctccgcatttattacaccataaatatttttaatttaaaatttagtaatttttcaatcagaatttggcctcctatttttcgcaggtatcgcgtatttcttattttgttcgtccataataattaatttaccacaacccatcaatcgtataattcaataagagagaaaaaataaataaaatttccgggcatggcattcttccaaaagtctcaaatcaaaaattctgccaatctttcagctctaacagccacaaagacgcaggacacagtggatcgtggacttatctccgattttgtaatccttcaaagtacggccgtcctcaatctgctttcctgaaacaattttcatattagcaagagaaaaaataaacacataaattttt

SEQ ID NO: 12590 - DNA, 2715 bp, Heterodera glycines
aaaaaattagtcaaccagcgaaaagcagtctttgctgatcaggcggatggccttcaatgcgctcgattttggctttgatttcctcgatggtattgcttggaagggcatcacggagtgtgagtgttttgccggtcatcgtttttacaaagatttgcattctatgccaattctgtgcatggaagagggaaaatgtaataaaaataatcgttagggttgggaattatatttaagaaaaatcgcaaaatatacatatacatacataaaatatgtaaaaaattcttaaaaggattattttttggggaaaaaatcatagagaagagtgaaataggcacaaatgccataaaacgaccaaaaggcttaaaatcacattttaatacttgaataattatttttttgatatctcattttttaaaacgattttttaggggtacattttcaaaaaaaattgaatttttctcgagaaattcctataaattttcgttatgttaaaatgaaaatatgtatgaaaaatacgataagtccacaatatgtagaaaacagaaaatatttattaaataaaatcccaacttttgttcgcaaacacaaaaaagaaagcgtttttcctactaattatagcattgataatataagtatttaaatgaaatccatcccaaataaaattattataaaaatccacccaccatactgctggtcaaaattttttttacgaaactcacataatacgtataagagctaaaaacaaaagtcctattcgtgttcagcgcataaaattacagtaccttagaatatttaaaatttattcaggggctcacaaaaggaataagtacccattttctatcttttcgtccataaaaaatcaatttaccaaccaatcaatcgactcaaaaggaaaatggaatgaatcgaagaaaaacaggagagaagacatagtcaaatatcgggcatggcatttcttccaaatttctcaaatcaaaaattctgccaatctttcggcactaacagccgcaaaaacgcaggacgacaaggtgaaagatgtccccatctctgatgttgtaatacttcaaagtacggccgtcctcaagtagccttcctgaaacaattttcatataaaaagcgcaaaataaataatttatatttttaaaaagttgcgagcgaaaattttactgtattttttaaatttaatcgaagtttaaaaagcctgcatatgatccgattaaaaattataacagcaagaaatctttcgtcacttcacccggtggagttttggaaggacttttgtgggtggtggagcattccgacaacaattagctgagcctttggcacgcatccataacttggcactcgtcctcattcagtaataaataaacactgcttaaaacctatactgcccaccgaaaatcagtatttgctccccccgcggatggcctccaatgcgctcgattttggctttgatttcctcgatggtgttacttggaagaacatcacggagtgtgagtgttttgccggtcaatgtttttatacggatttgcattccatgccgattctgtacgggaaaatgcaatttaaaaataattactagggttgggaattatatctaagaaaaatagcaaaacaaattggcttagaatcacattttagtatttgaaaaattggataattcaaaaaaaaaatatgtatttaaatgaaatccatcccaaataataataatataaaatcccacccaccactgaaattgaactcccactaatatttttatcccctgctgttgctggggatgttgacaattttcttttttgcattttcttcggtccatttatttgcgcttccatttcatcaattctggccaaaagtctagcaaattgcccaatacaaactgaaaattgggtttatttttatgaaattaattttgtgctaattgccgggaacaaaatcccagaattaagcgtttatatttataaagtttaataaacgataaaaactagagttgagtgggactggaaacgggaattttgacaaaaaccgacaccgggaccagaaaagccgggaccaagtttttcgaccaggaccgtaaccgcgaaaaagcagagaccggaaccaaccggaaatttcccaatagaaaacttttgaagataccaaaaattttaattaaaatcctatataggtgtgggaggcaggggtccgtatcgttttggcgccgacgttttggcgccagcccaagttttcggactataacattttttgtcgaccaaatctaacgaacttggtatcattcgaaactttaacatgtttagaagctattgcttcgcgattagacaattaccaaaaaagttataacatgaaattgcaaaaaatcaaaattttagaagttttttctatataacttttttacaagctaatttttttgttttttctaaggctgagaatttctcgaaatatttttttcttagaattttcttattaaaaactttctaagaattttttcttgaaaaatttctaaattagcaaatttaaaaaaaaagcaccattatcggaaaaacctgtataatctgttaaagcaaataaaacctaagaatccgcaacgtaataatgtttttgccaatttatttaaagttttactgtattttctggccaattctttttccaattcagcacatttgtccaaacacttcttctgtccttcctctaacttgtggatttgtccaaccaatgcttaaa

SEQ ID NO: 12591 - DNA, 2630 bp, Heterodera glycines
  unsure (1)..(2630): unsure at all n locations
ctccgccctcactcgtcctggacactttgttaccttaaattttgcgtcaaaaagngtttcatttgctcaaaccccttaaacgcccgttgacttcgcagcagaggctaaaattttgaatgatgcttaattttttgtgttcactgatcaaatatcacgaggcactgatcaatgatcacattaaggcatctgtaggacagaaaaagtaatccgcccccggtgttattcgaacccacggccctgaccgactgtcaaaatattcctgccttaaacactgtttgagagagtctccgtctccaagtcgagaatttctcatggattcttccattatttttgaatgtaataaatgctaattgtaagtatgcattccatttgatattttacagcacagagggaggctctggataaaatatctcacaaaatggttaattccaaaaaatatttcaaatttggcagaaacctacaatatacatagaattgtgccaaataagatagacaaaagttatttcaactaaaaaacacttgatcaaaacttattacaactaaaaattgaattattttcagtcttaggtcaaggcataattgttatgtctcattttatttttctttatttgcaaatttcagaaattaattttgtaaaaattctgtggaattttacgcttaataattagcaacataaattttaaaacttcaattaattctatagttaaattgttggaaaaatgaaattaatttacctttccgatggatgaaagtgccgtccccttgggatgtgcactcaattgcgggtttcgttcaaatgttttcttcgggaatcgctaaacgaacaacaaattattaattataaataaaattttaatttttgaaacgattacctgaatgagcagttccacaaatttccggagggcggcgaatcggtccccgttaatttcgtccccgcccgatgaaatcacttcgtccaaaagtgccgtatggatggccttcagcatgtccgtctcgctgacaaagaacatttgcttgcaccttaaataaaaattattaaatttatttattatttatttttgcggcagaattttttttaaataccaaaaatttaaaaacaaaagcaaagagaattcatattttaatttttaaatgaattatttatacaattaataaagaattaaacttatttttgagcctttaaaattacggaaataaggatttatatttattaaaattaattcaatttaaatatttttaatttaatccaacttttccggggattgcgcacagtccaccacctgcaccggttccttatggtgtgccttggcttgttccgtcttgttcaactccaccatcattggcttcaccaattcacgcaacttggccaatgtctgatcattgaggctaaaataattcaaaaaataagctatgaatacggtataaaaaactcgaaaaattgcgcaaaattaaaaatttttggcgcttttttcatagaatttttgaaattgttgtgattgaactcagcagagcatcttctaatctgatcacaattatcaggaaatttatttgcccattaaaacatctcttaaacaaaaaaattttgttgggaaatatatacaataaaaaaccgttagatttgttaatttttcctcggtggctttttcagcactgtattttttaacttaaacatgttatattttgtgccgattgtgcgcagattttaattattttggcttataatttcacctctccgccagaattggctccgttttgccgcgttccatcgccctcacataaggcaatttgaaggccgccgcttccgttgctttgcctttcgctggctttggcacattgcgtggcacttcgtcggcactgcccaccagcacttggcggacctccacgcttggcttgtacagcagcaaatccagggagaacggcagtccatccttggcgtccttctcgaagagttgggccaggaactgtgtgctgttcggcatgtccctccacggctccggttgactgttctcactggaaaaagcatttgattgaaaaaatctttcgtctgaataatcttttaagaaaataataattaaaaattagttaatatgaagcgaacagaaaaatttgtttagaaaatgggtagaggcataaaaagcaaaaaagacctgtttagattagtgttgctcccataacctccgggagagaaaagtcggggatcggagaggaaattcgccgaaaaatttttcggggttggctggagaattttaaaaatgtcgcgcagcaacttacatacacccttgtcgggcagtaaattttcatagaaagtcgaacaaaataacggcaatttttataaaacaaaaacaaaaaaacgcatttaaagaaccctcatcagttttgaacaaaataactttataaattttattaggcgaagaaataataaacatgaaaaagggaaacagaaaatctttcattataattaacattgttgattgacaaagaaagctaaaactgacttgttgtgttggcgttgtgcctccattttttgcaggtagaaatcggcattgcctttgcccgtttcggcattgaactcttccatgatcttcttgtgcacttgctcgcgcatttccatcgccgattcgtacgaatgt

SEQ ID NO: 12592 - DNA, 1263 bp, Heterodera glycines
  unsure (1)..(1263): unsure at all n locations
gtaatatttgagattatacgtgcatatagtactgtagtaagggtacttttcggttatatggccatgcctctcaaaatttaaaaaagagaaaaaagtgccagtagcgcgcaacaattatttgcatggataaaagcgcaattataaacctactcttaagctgtgacgaagttgcaaaagtatcaatgatagaaatatttaataaattaatattttaattttatttgctaaataataaatcataacttagcttaaaaaagttagggattctcttgatttttaaaaataatataagatagaagggatatgtggtgctatcagttatattaaaatttttatttagcaaacaaaattaaaataataataaaatttaaatatttctgttattgatatttttgtaaacttcctctcaccacgatttaggcactcagattgggaaaaaacgaaaggcgtttcgtagcaagtactatattccactgtaccttcaatttcggcaccgtaggaatgtcgttggccttgcaaattttcacattgtatgcgtcggcgcagttaatggccgccacttggacaaatggccacgatttgatggattcggaaagcactttgaaatagggcgcaaagcggcgacagtaaccgcaccttaagaaccggacttggtttgaaaaatatcctttggcatattgtcacggggatcggggagcgcgagttggggcccaaccctagtataagaagcaataagataaaaaaattctctatattttagaaattggccaccaagataggccattttgaagaaatttgctattacgagtgcacctgtaagctcatgggttcctgccctttataacatttccacggaaaaaatcgtcaattttggcatatcccattttttttctggcagagcgcgtgcccttcctcttggtgtgatggttctgttactgctactgttctgttctgtctccacggtgcccctatgcccaaacacacgatgccggacggaccagtccttgtagaactcgacgatgtacgcccggtcccggttgggccgcagcacagtgtcctcaaacgtgtcggcgtccaagtgaacaattgggtcgtcgacactgtacagcaacgggttgttgcccttgggctgttggccaacctcggccagtgccgcttctgttgagttcggtaaggaacaacatagcaaaatggcacaaattgccatgncaatcctcaacccagaagggaggaggacgagggccatcttccggtggcagcgag

SEQ ID NO: 12593 - DNA, 1518 bp, Heterodera glycines
atacccaactcattcatacccaactcatccatagaccccaccggcgggtccccatctttttcatatacccgaggcatccactcctaaggcatatccatagacccaactcatccatagacccaactcatccatacccaactcatccatacccaactcatccatatacccaactcatccatacccaactcatccatatacccaactcatccatacccaactcatccatacccaactcatccatagacccaactcatccatacccaactcatccatatacccaactcatccatacccaactcatccatagacccaactcatccatacccaactcatccatacccaactcatccatacccaactcatccatagacccaactcatccatacccaactcatccatacccaactcatccatagacccaactcatccatacccaactcatccatagacccaactcatccatacccaactcatccatatacccaactcatccatacccaactcatccatacccaactcatccatatacccaactcatccatacccaactcatccatatacccaactcatccatacccaactcatccaaacccaactcatccatacccaactcatccatagccaactcatccatatacccaactcatccatagacccaactcatccatacccaactcatccatacccaactcatccatacccaactcatccatagacccaactcatccatacccaactcatccatagacccaactcatccatacccaactcatccatacccaactcatccatacccaactcatccatagacccaactcatccatacccaactcatccaaacccaactcattcatacccaactcatccatagcacgatacgagtcgtcgccgtggcatggcattttctgcttatgtggtcttgaccgtggacatttttgattatgtcggtcttggccgtggacatttttgattatgccggtcttggccgtggacatttttgattatgccggtcttgaccgtggacatttttgattatgccggtcttgaccgtggacatttttgattatgccggtcttgaccgtggacatttttgattatgccggtcttggccgtggacatttctgattatgcggtctcggtcgtggcattttttggttgtacggtcttagtcgtagtattttttggttgtacggtcttagtcgtggcattaaatgccacggcgacgactcgtatcgtgctatggatgagttgggcatggatgagttgggtatatggatgagttgggtatggatgagttgggcatggatgagttgggtatatggatgagttgggtatggatgagttgggtatatggatgagttgggtatggatgagttgggcatggatgagttgggtatatggatgagttgggtatggatgagttgggcatggatgagttaggtatatggatgagttgggtatggatgagttagggcatggatgatgtcgggatttttcgttgccaattccattgaaaat

SEQ ID NO: 12594 - DNA, 1198 bp, Heterodera glycines
gttgggtatggatgagttgtgtatatggctgacttgcgtctggatgagctcggtctatgcatgagttgtgtatggatgagctgtgtctatggatgagtcgtgtatggatgagttgggtatggatgagttgggtatggatgagttgggtctatggatgagttgcgtatatggatgagttgggtatggatgagttgggtctatggatgagttgggtatggatgagttgggtatggatgagttgggtatatggatgagttgggtatggatgagttgggtctatggatgagttgggtatggatgagttgggtatggatgagttgggtatggatgagttgggtatggatgagttgggtatatggatgagttgggtatggatgagttgggtctatggatgagttgggtatggatgagttgggtatatggatgagttgggtatggatgagttgggtctatggatgagttgggtctatggatgagttgggtatggatgagttgggtctatggatgagttgggtatatggatgagttgggtatggatgagttgggtctatggatgagttgggtatggatgagttgggtatggatgagttgggtctatggatgagttgggtatggatgagttgggtatatggatgagttgggtatggatgagttgggtctatggatgagttgggtatggatgagttgggtctatggatgagttgggtatggatgagttgggtctatggatgagttgggtatggatgagttgggtatatggatgagttgggtatggatgagttgggcatggatgagttgggtttaccccgtttttgaggcattcaactagtctgaataataaaataaaattatttttccttagtttgaaaatttttaaatgatttttttcgggaattatcttaagccttcctttcttctattactaattacccatttaattttttcatttttgatgttcttaactgacctgttgaaatttcaactcaatattttgaagaattttctgctgtcttttggcgagaaagtgatcaaaaatggaggaagaaactcggagaatggaccaacggaaatcgaaacgaaaagcattggccaattcggaaagaagctcagggggaagttgaattttgggaggaaagcgcatggcttaaaagcaattaaaaataattaattaattaaggtgcagttgaattttgggggg

SEQ ID NO: 12595 - DNA, 687 bp, Heterodera glycines
atgaatttcctacactttttagtagaacaatattttgtaaattttgatataaaaaatgaaaatgactaacggaaaaataaaataacgattaaaaaacgttcaatcagatggtattggcacgtttcatttggaatgactcccacaaattatatatctatgtagtttcacaaagcattttaataaataacaatgcacatatcttctatatttagaaatgggtttttagtgtcgtccgactgcccccgtccctttacccccccccccccccaatgagttgtgtttggtttttcgtttggttgcggttgcccccatatcgcccataaatacaataaaaatcgatgggcccaaccactgacgggcagcagcacataattataatttatggacgatggtcgcgccctttaccccctcccccccggcgttgcgtttaccaacttcctcccctcgggggtgatttagtcgccgcccatttggagaatcggtggatgaaagtgagcgaagcgactgatggacgacaaaggcggaaggacagaagagagagcagagattgcggattgactgatctgatcagaagcatatcaaacattagatcattagttgcttgcttgtcaatgcaacaatggaatgggctgttgtatcgcatacaaagaaaaaacacagacagactcatggaatttgagtctgtat

SEQ ID NO: 12596 - DNA, 2844 bp, Heterodera glycines
tcccatggaatttatttgtacatattcttccgtcaccgaaataaaatacaatttaagcttgaatagagagaggtgttataaaatgaacgtttcttaaatcttgatgatttggatcataaattataatttaaacagtggcgcgccagaaaatttattagttcttcatttgtgaaatgtatagttaaattttaaatgacaagcgcaggccctcgtgtactgcaagtacacaccgagtcaattttaggctcccagttcaaaaagcaaaaaaaaaaaaaagtgtgtttggcgaagtggttttataagatagtaaagggacaaagggctgaagttcgagtccgtttattattttcgaaaaatatttctgaaggtttttggaaaccaaattggaaaaacatgataaactcttttattttagcaaatcaaattacaagtgaccaaatgattgcgtcgaattcgggtggcgcgccgtaccgcggcgatccgatggcatccgctgcactcggtttttcaaagtgaaggaattgatttttttttttcttttaatgaatgtgtggtcagttttgtgaatggtgccctcatccgacaccctttcgttgtgctgcggcgccagtgccaagtgcatgaccacgcgacacgcaaacatttgacgcccattagtcttttgccggttgtggtcaacttggccgggaaagatgtaaatacttgcagaaagcatgcttttttcacatttcgtttaatagtaattttagtttttccttagggtactttttcgctttggaaaggtgccattggcagcggcgttctttgggtggtttcgcatgcgtcggaatttgtaagtataagcgaattaaatacaatatttcttttacttttattttagttgattgcccagctttttaacctaccaaaatcatttgtacccgaaggcagctccgaacgcttttggcgccatgtttttctcaaaacgtatttttgggacttaaaagataaaattcgggataaaagtgatcataaaattgttttgcttattcagcgcctctttcttcgcctgcactcctttcattgtctcttctttcatcgaaactgtccgcgtccgttttccctttttcttttctttccctttgcatttgccatttccttttcagagtggtgcaagtttatcggatgatttccaactcttcgagattatccatcgtggtcttgaggtcactcccctcccattttgtttcgtgccattataaaatctctttcagcgcctccatttggacattttcggcaccggcgttgaaggacgaaggcgtcacccgctgttccttttggccatgcccactgccatttaccacacggcccactttttgttgtaccgttccgtctattccttcgcctattcctgcaccagagcttatgttgtgagcaccgttcatttacttatgtttaattttcattttacaaattgcgcctttcaaagagtcgcaaattgccttctgaacgcaaaagataccattcgataatgcccgagctgttctccacaatgacctcaatgttcgtggccgatttggtctgttacccgcttgagactgtgcttcatcggttgtacattcaaggtgagagaccgagggcaataaaaaaaatggtcgggtaaaaggtaagtgctttaggcactcggacattggtagacaatttggaccatggacagagttcgctggtgcccgtgttggccggggcgtacagcggcgtagtggattgtttcattaaaattgtgcgcaaagagggcgccctggcgttgtacaggtcgccgtttggatttcatttggctaacgtcgcgccgtttaaaaatgcttctttagcggaatcggtgcgctctttctccaatatttgcttcagcatggcgttgcattggccgtttattgggttctcgacaaaggttttgttttgcgggtgtccttcttcctgactatgcaaaaaatgacttcagcaggtggcagcagcggcggtgacgtgccctcaatccctccggccttgcgttcgcaagaaaactttttgcgtgccgactgcgcctctttcgacgcattcccccaaaaaacatttgccagctcgtcctcctcgggaaccaaccaacaggacattaaggcaaataaaagagaatggcccatttcccgtatccgtcattttccaaacgaatggaagctttgaatttcagcacttctcgccaaacgtcgattttcagcctactcaatccggcgcttttccctcttttgcacagacaagccaaagccaccaaagccttcaggaaaaggacaacccatttttggccgcaatacggcgacatcagcagcaccaacataatcaggatgatgagcagaagcagcatgggacgaaacctctcaattccgattgaatttgttttttcaaatatgtatcttctcctcccaccgtgccaatgccatcagtcggttaattaattcccccacccttcactctttatttttgagaaattgttatccgtttttttctcacttcagtttatagacaattatatttgagaatcttaatccattttgttatgaaaataagaggaagaaaatgaatgttattgtaaatgtatgagcgacaaggaaaaatcagcgaatgtataataaatgcaaacaaataacaaaaataaaaaaaggcaacaaaaaatgtttgatagaaactttgggaaggacaaaatatgagagatttcgtgactattttgtgtcggattaacaaaagaaaatggggaagagcgaagaatgtgcataggaaaggacgtacataaaacggtaatactatagatggtaccccccttttgacgaaaattttttt

SEQ ID NO: 12597 - DNA, 1335 bp, Heterodera glycines
atcaacaggttaaaagaacatataaatgatgctttcgcctgcgccggacacctcccccccccttgctccccaaggtttttttagaaaatagttcgactcaaaaaaaacgtttttaaaaaagcaaaaaagggtcgtcagttctatgtcgagactcctgcgcacaaattccggttgacctaccctttttatgtttggattttaaggtttctggattgatgattcatcgttccattttatattaatattaaaatctagtcaatttacaatacaataacctttcaccgttaaaagtacaatcacatttgtttaattaaaacattgtgatgctcatttgcattccattttaagttcaatttttcatctccgtcgaattttgaggcattgacagttgattctgaattttaaaattaaattaattagcattttattcccaccattttcggtatcagctcctcatagtctgtgctgtaaacttgggaacggacaaacagttctttgtccgccggctcggggtaaagccgggccaatccatccttaattggataacaataattaattatctattattattcaaacaaatgtcactttgtaacactcctcagcaattgcgacagcaatttgaatggaaatttcacagattttattcattgaggggaacaaattgccagaagagagctcatcatcagtgacgaattcagccaattgctgaaaatgattaaaaagggacaaatattcaaaaaagaaaagaaagtgccaaccacagcagcgatcaaaaacaatttgtcgggaatgtgagcaatttggaacaaaattatgccgagagcgacgccagggaaaatgtacgaattgttgcattggccgggcgaaaaagtgcgcccgtcgtcgaatttcacaggggcgaagggactgccggaggcgaaaagagcggagcccttaagttaaatttaaaacgaaataaaccaaaattataattagggaacatatttataatggcgaaaatagcaaaagaaaaataaaattattgtaaatcccccaaaataacggacatttgtgcctttgtacgccgcctgagcagtgcactcggatttgctggttgggttggacagtgcgaaaatgatcggacgttcgttgaaggattccattcgtttgatgaccgcgtcagagaacgcaccatggattgtggagacaccgatgatggcggagggttggacagcctaaacaaggtcggatcgggaggaaccaagaatggcaatggaaaatgccaaagttccccaaaaatcccaattgaagtgtcaaaattcccccccccccaaaaaaaccattcacccaaaattg

SEQ ID NO: 12598 - DNA, 2318 bp, Heterodera glycines
  unsure (1)..(2318): unsure at all n locations
aatggccgccttcaaaaagtgcggatttggcancgattcaaatgccttggcaattcgtcccttaccgtcccggcaccgtggaaaaggaacttcgactccgaaattttcctgcccgtaattcgcaccgccgccaaaagaccggccaccgaaacggaagcggtgccctgcaattaattggcacacttttggcactttggcaatgcttgccgagcacctgaatgtcgtcgttgaaggtgcagtatctgtcctggtaacgcttcagcaatcggtcggcattgttcttgccaaagtcctcaaattggaccaatattttgtggccgaacctcaaaaaagtcaaaatttgacacttttttgggggggggggggtttgggctgtgcaccacactttttgcaacatgccaccatgaaattgtcgatgaattggtcgtattgttcgccgcgcactcgccgctgtctcagtcccgcgtagttggcgtcgttcagcaacgtttcgttgtccgtgccgacgtccaactgaatgggcaggcaccacttgggctgaacgccgccgagcgccacgtaaagcgacaatttgccgacggagatttcaacaccttaaaaatgataaattaaaaagttaattttgtgggaactttttaacttattgatagaagaaaaaagacgtattaaattaatttaaaaaacaggtaataaaatggacaattggaaggtgcatgacaaaagacgcaccgacaaaggatcacagagacaaaagacccacagacaaataacacaaaattaaatataaaaaggataaaaacccaaagaaaaccgagggaaacactttaaatgaccaaaaacaacataagatactattggaatattattttcttttttatatttaatttgtttttgggtcctttgcccgtgggcattttgagcggcacaaaatgaaagaaaatgattaaaattcattaattaatggaaatttaactaaaaaatgtaaaaaaagaattcgtggatttcgtattcttctgctgattatgaacttaccccccaatcccaaataaattagaataatttgtcctttttttaccccccagaataattagtctatttttacccccaactcccaagtcgcccaatcccaaaattctctctccgtcagtgacgacaatcgcacgcacatcctaaagaccgaagacatttaaatccagattagtcattcatttgcttcgactcacttggcatttccaattgctgagcacgcgacagatttcactgacagaattatgccaattgatgttgaggaaaagggccctttaattgggattaattgggcaaatgagtcgcaaatgggggacaattaatttgggggactgctgcttactttgggtgtcggtactcaaaatgaatgcacgcatcgccaacagtgggctgaaatggaaacaaacaaacagttcacaaccagtattacggtatgatttctaccgtatacacaatgggcaacagttcgccaagaaactgcctcatcacgcggaagaaaagcttctcattccgctcctttccaaatcaatttgggcaattaattaattactttcgttaattaatttgctaatggtcggtcacccgaaggccttccaagtgaatgaattttgccatttcgttgttcagttcccgcaaatgtttgatctcctgctgcgcctgctgttcttggcttctgaatcgcacaaattgccactaattaattaattaatcgcccattaattaattgtttttgatttgggacaaacgactttttagctttttattacttcactccttgcggcataagtccgtccaatccgaacaattggcgttccgccatcgaatgagcaagtcccttcaaatttgatatttacaatttgttattttttcataattctaaaatttctggaaccaaaaaatatgaaggctttttactttgtatttgcatttttcttcgtaaaattaaagcaaaaaatagcatttccaagttttaaaccccaataactttcagagtttctcatctgatatcctttaaaagccactgactttgttcgtccgattgtccttcagctgcgaatgtccttttcccgcgtttggtccgcttggctccgttttgtacaattcccgcaacgaaatttgttgctgtttcggctcactacgctccattttactttcagcaatttttctctaaaaatttttgaaaaaaaacaataaattctagagatcggtattttgaaaaaagcctgttttgcctggacctggattttttgagcggatttgacctggacctggatttcctggacaaaaatcca

SEQ ID NO: 12599 - DNA, 2688 bp, Heterodera glycines
gtgttgttgctttctgtggcggtgggtactgcttggattgttggtcatcagtgcgctttgctgttcgacttcttccagttggttgggcagcttctccagctctgtggtgtgcttttgcggctcttcaaagctatgggcttgattaacttgttcatccagctcgttggcagcattgagaagcacggttgcgctcttccatcagacggcgaacaatttgcgcgttatttttcagtggctccattgtaccgtccgcgtcggtcttcagcttcactaagctctcttcgtcctggttgaagttgcagttcgcacgcgggcctgccgcgcttgggcagctcttggaccagccagctctgcaaccgcttcatgtcatccgtggcctcgtccgcttcgctctgcagggcatccacataggtccgctcgtcctctgttggcgtcagggccatcgtttttcctctcctctacgatcttttcacctgttgaatcgatgagcagcaataaatgcgaacttggtcgacaattgagtttttgactttttgttcgaatttgggttcggggttcgaaacgggtcgaaatggatgtcggattcgtgatcagcgaccccgaaaacctatattttgacttttttacttagaaattaaaaaaaaatttatgggggacaaactgaataagagccaacatttgtgccattcattcgcgaccaaattggtgattgttcgaatttgcgagtttggccagctgtcgctttgctgaactgttcctcccccccccccccccacaaaagggcctccccgccccatcactgactgataagcctttctcattcatttcataactcaaaaaagaaatggcaatcgatcgattgttgcgcttttcccttcttttccctccattctcgtcccaattccacgtattcattcattcatctgcccaaatgaatgaatgattgaatggatgggtcggccgattgttgacactgaggcaaaatggggggggggagaaaagggtgggggagggagcgttttgggagtttcgcccgaaaaggcaaacccaagcaaaaagtcatcatcctcttcctcctcctttctccattttctcataacctttgcgaaaatgaatgaatgatggccaattggccatttttattgcgatggtcgagagtcccgggcaatttcggcctaattatcatatttagggctcgacctctggaccttgttgatccaggcatgggttagtcgaggcctggattttttcagtgtatccggtctatgcttttttcggcaacctgggtttcttcctggattttggtctaggaaatccaggtccaactcatttttcaaaatgtcgaactcaaattatataattcgcccttttctgacccctccccaccttaaattctagcaaataatgtcacgcacaagcttaacagatttaaattacataaagagggaatttgggcagcttgcccctgaaaatttgtttaatttttatatttttgcattttcgataagcaaaaaaaaatagtcgcccgcaggggcaaaatgcgcacttttaaaaagcaaattttgccaaaaataaaccacctcttttgaagcaatagtcgctcatttgtcgccaaatcatgcgactgaatgtactgctcgcaatcctcgcccccctcctcctgctaattgcaacagcaacgctttgtggtgccaccggcaaagaagcggcggccaacaaaatcggtgtcgccgccgtcgctttgtcagaggcggacaattcgacgacgccggcgccaccgccgccgccttcgccgggtggcagcgatgacaagaaaaaggacgatgacgataagaagccggacgaggatccggcaaaaaagggcaacggaacggacacgggcgacgacggcaaaaaaacggacgaagcgggcggagcatttggcgcggggtccatttttggtgagtgattatttttggatgaattggccagaaatgtggggtcgcgaagcaagtcgaatttattcaactcgccccttttcctaagtgattgtgcggtttagggtcgctcgagactgaattttctcgacactaaaacgaagctttctcgactctatcccaatgagccaaaatttgttcagtgattagtaatatcaataaaaatcctctccaactatacatcaattggtgttaggctatgcggttaagggccgctcgagaccgaatgctcgacactaaaaacccgagactttctcgacccgatcccgagacgcccctctaccccaacgaaccaaaatttgattatatttgatcagtgattagtaataaagtcctctccaattacacctaatcaaatctgattaattgaattagcaatttaactttttagttgccattcttttcggcatggctttgatgttcggactgatcaaaatgtatgtccattgggagaagcggcgcgagtcggacccaccgaactatcagatgtattgaaaaaacatggaaagcattgggccaaaacaaacaaagatttccttatttcatttgttgttgttttttgcatcatttttatcacttctcattaaaatttctctaaacaatcacattttgggactttaagccagggttttgattttacaaactccggcatttgggcgggggggggggggtccatgccgaacttatgccgggtattttgagtgttttgtct

SEQ ID NO: 12600 - DNA, 2657 bp, Heterodera glycines
aggaaataaaatcacttgaaatttgtttacttttaaagcaatttatttaaatttattaagaatatatttcgtctgaaatgagcaaaaaatttttcttgttattaatattttccgttttttgtcggcaaagaatcgacgggagaaaaaatggacaaacaaatcaaaatgttcaaactttgatccgtcaatttgaaagtaaaataggctttaattagctagtcttattaatattaaaaggatatttaagaaattaatttattaaataataattgtttagcaaatgaattcagtcaaaatggacaagagaatgctgaaaagtttcttattattttatttttaattattattttaaaataattttttaaggaaaattttggaaatattaatctcctttcttaaaattcaatgcgaaatggccaactttggcacagaaaatgccaaacatttcacagcgatcaaagaacagacaaagcaaatttgtgccactgaaaaaacacaaaaatttgacattcaaaaattaacgaatgcaataacagccgcttttgaaaaagaaggggcaaaattggtggaggccatgaaaaaaggagagcatacggtaacagtgaccgtcgacggggcatacggtactttgaccgaacttttgccaaaatcaatggaattccggccttattggaccggaataaacatgctatgcttgatgaatgaacagatggataatgggccgggcaaaaaagtgatcgcaaaatttttaaacgcgactacagtaaccggtgacggaagtgccatcgccaacactgtaatgcctagcgatttgatgaaaattatgatagaactatggcacattctcttccataacgtcacgggaatgggcaaaatcggtgggccaaaatttttgaatcaatcatttggccaaggcgcaaagagtgatcggcaggaaattccgaaacgacggaactctgatcagatcatcgttcacgggcagcaggtaaattcgggacaatgcaattcagttaactatatgtgttcatctacggtattgttcagtttggtcgtgccatccccgcaatcagtggccatccgttgcgtcgccgtcggcgacggaatttgaatattacggcacgacaaatggccaacttgttccacgcgctgactgttgtagtcttggcgctgaatttgctgcgagtagtgctccgaaatatggccgatcagttggatcagccgccgattttcatgatggtcgccctggccgcaacaattcgctatttcatgacgatggactgaatgatcttattattgacatccacccttcagtttgatcggatttttctttctttgattgggatcggaatggttcgggtattgataaaaaagggaaattctcgatttagcaatttgccctggtcataaaagaattataagtgatcaaaattgggtcccgaggtttgattgaaaagtgctgggttggtggttagacaggcacaacaaatttgccattttcggtctcggctttctaaatatttctcgagtctaaatttcgcggcaagttccggtctcgagtttcaattgatggtatttgttgatttcgagcagtagcacataacattttcctctgttaaattgttttgtactagtcagtcgagaatttataataaatttttccactttcaaaaaagtttatagttaaattcaaaagaatttcaatgattgctttgagacgatggcaactaaatgaatttacattgccggaagtggcaaaaaagtgccaaaatcgaggcaaatataaatgacattgaaaggaaaataataacaatgaaatactattttcattttgctaattttccagttcttaatctccaaattctccataataattttctatttttcggattgtttttcaggggccttcctccccaactgttcaataataacgaaatgatggacaacccaccgccaccgtttcgaaaccgtaccccaccggtgagattcaacaatagcggcgcgtcattcgtgcaggaatacgatagtgccaatagagaaaagatgaaggacgaggagaagggaaagggaaagagtacggcacaaaaggcggaggagagaacggcacggccgaagaagcataatggacaagacgatgatgttaatgaggggaccatggccaaaatttggaaaatattcgcaccaaaacagcagttgaagaagcgagaagaaacagtgccaacccatgacaaagtcccaaaaaatgacaacagcagcaaaagtgttgttgacgacaacaatgtgccaatgccaattgattgtgccaactgcgccattcgcctcggaggaaattgaagacaatgttttgtaggtagaggagaagcaatttgaaattttggcacaaattgcaaattagcaaaaaatgatgcaaaacttgtgaatggaatagggaagggaccttacatcagcacacaaatgtttccttttgaatttgtaataccgtaaaagcgtaatcctttccttttcttggatactgtattagtctaaaattttgtcaataaatttttataaaattttaaaatataaaaataattttgattagatttgttaatttattttatactaattgcccttttcgttttcctcaatcgacatttggtcacttttctttgttgtaataa

SEQ ID NO: 12601 - DNA, 3447 bp, Heterodera glycines
  unsure (1)..(3447): unsure at all n locations
gcattcagctcaatgatacatgaccgggtgaagagaggtgaagacgcacaatgacaaattgatggaaacacttcgacanccagagagaggaccgagagaaacggcgacggagttttcacgaggcatgcgaaagcacacgtcggatttgngggtagccattaagaaatgtggaaacacttcggtggctgtttggttaaatagggaaaataaatatttttgctgggacataacaaattcagagaatgcgactttttacttttaaatttttcagcgtctcgaacaaagccggcaagaagacgatgacttccagcaacagctgagttcggttcgtagtgtacgaaaagcctttcaaagtttcaaataaataaaaatgttcaggtgctcagccgagtagattctgtgaggagcaaaaaaacggaaccgaaagtgaaattggagggcgatcagctttcatcgaattgagtgatacgccttaaaaatgaatgcattccaatgccaaaatgtcacttttcttagcacacatcggtcgcttctctctgcgtattgtacctttttaatcgttttcgtggttctgattaaaaattcacagttttcgaaaatccttccggaacgggcaagtcaaaaagcactggcggatttttcggcaaatggtgccattttcgtccgtcctccgtcggatgtccatgggcacaaattgccgcgtttaaaaaaagcgtttcaccatttgtagtggaaaaaggctgttcatgcacatggccgaacacgtgcaccctgaaattgccgaattggctgccttcgatggccatggcatttcacttgggcttcactctcttctcaacacaattcagcaaatccgcatcgccccaccgtcgtccgttctcaaaaacgtccgaatggcctaagatttgcgattagataagcaaaatgtttgactatttgtggagacttttgtttttcccgtttgcttttctcaaatgccattcgatttgactaccgagtggaggggtgtgagtcatcagaacatcgaccaccggcctcggctgtaccgttgggattttcatccattctttgtggatgggaacgcctcgtggacgatagaacgaaaagccgggcaaagggtgccaagaagtgccgaaaatggtgagaccgaacacctgaaaaagaggccaaattgatactgatggtacaagcggaaggagcacctcagtggacgagtcgtgtagataaatgcaattggtgaggctgaaccttttggttttcgagttctcttccgctggcttttcctcctaccgctcgtagccccggggcgttccgcgtcgacccgagcccatcgcccacatcaaagcgtccgcccgacgcccttccacgtcctccccatcctcaaaacccaactcgtggttcccagcgatgacaattttgtacttgtgcggtagtgaaccaatgtcggagttgaactgttccaattcctcgccatctccaaaattggtgaaatcgccgcagtgcagcaaaacctaacaaaaaccaaccaaaaatggtagcaagagaagggataagaaccaaaaggggtaagtttaaatgctcacatcgccataaggaatcaacgacagaatttcacccaatttgttgtgtgtgtcacttatacagacgaaacgaaccttgttcgagtatatcggctcatctaacctaaaaaacgctgaattcgtctatcgtattcaaaattacggtagcgttttcgctggtcggcagaccctttccttcgaatacaattcctcccacaaaaaatgcgggtcgtccgcattcggttcagcttcaacgaaagacatcagaagaatggaatcgcatttatgagttcgatgaatgtatttctttaataaattaatccttataaatgcaaggctatttaaattccaaagataaaaagacgtaaaaacaataaaaaatgtaaacaaatcgttgtgaaaatcatttgaaaaacaaccgcttcgttgaaaacgccctcttcgaggcaggggccatttctttgcgcttaaacagaagcggcggcgttttcggagtgcgcaacggacttccgccctcgccctccgccggttgtccgtttccctttcgcattagtccgacgatgcagcggcggtaatccttcagatttcgcgtctcttcgctgtccgcttcttccccacgctcgtcttcctcgtcacttatccatgcgtttctgttctctttgcccaattggcttttcgaataattcccattttcggagtcttcgcttatccgtcttttccttctcagctgcccatttgattcggaagtgaaactgttctgagaagttttgctgcttttccgctgcgacgccttcttttgctggagaagttcaaggaaatcctcaaaggtccgagaagagagtccctcttgggaatattttgccattaattaatcgtccgtttgttctcaccttcggcttgtcggtgccttattaagtcgccaaatttccgcagcttttcctcctgctgcttgtccatccctttggtgttcatcaaaaactcgttcaaatattccaatgctgtccattcgtcgtcatctttggcacaagcgcgcgctttgaattggattagcattttgccaatctcggcattcccgacggaacatgcttccatcagcggagtgaggccactcgacgtctaatggaggcgaatgatcggcctattgtgtaaaaaaacaattcacaattttgttttgctcctcgtccatcaaaaactctttcgagcgcgtgttcggactcgcccctttcatcagcaaaagtcgcacattggccaaattctgagccgagaccgcctcactgagaggcgtccatccgccgtggtccatttggttaacgtcgtaacccttagacatgagctgtttaaccctccttcactataaaacaacccgctcgatcagttccttgagctgttggtattcgcccgaccgggcgacttcgtgcaaattggactcgccgtaagtgtttttgttggccctttccttcacaattttttcatttcgctccacgactttcatttcccctgcaaatgtccgctgaattcccatttctctcccttcccatttctcactggcaatttcgaataatatttgttgttcgtccatctcgtccaattcgtctctttccgtactttccatctcattttggccaccgctttctgctgaattgtcctcctcttccaatttcttctcccaaaatgccttctctttcagtttcgtttcatattcgccgccagcgcaatgagaaccattggcactcaaaaaggccaaataatcgcccaaaatgttcaactaaatgagtgaaatgagctattaatgaaaaaggctggaaatgccttttgggagggagttcgacactccccgtagacttttctgaacttatccaatcgttctcgaggcggaatatcttcaatt

SEQ ID NO: 12602 - DNA, 1791 bp, Heterodera glycines
aattttctccctttttccttcatttttttttttactttctttttaggcgccggagaagtaagcgctttgctaattgcgctgctatttcctttcaatggttgttgttgttggctcttttgtggcactgttgtgccaacaatcagtctcatttctttcggcgtttttggcggcaaaatgccattgctggttttggtggcatttttttgacgaatcgttgtgccgccattctcttcgttattattgcttgtggtgattgctgccgggctatcatcagttttagttgtgtgcttttgatcaatttgttgatcaaccgtcatagtgccatcaatgttttggccaactttttcggcattttcattttcgggcggaggcgttgaattttggtacggtgcaagtattttttgtatgttactgaatgaaactttccgtgtcaatatgcttgtcactgtagcgaagcataaataaaagaaaagagacagccaaattaatttcattttatttttttaaaaatatctgaaaatgcatttaaaaaattaaatttaattaaaacattgttaaagacagtaaaaattcagcccgtattgttttttcgaaaaaaatagtcctaatttttgtcaaagtcgaacaaattaagcatttttggtatcatttgatagcccttaaggttcttcaagaaaattttatcatgtttaataaaaaattaaggatgaaaaagttaataaaaaatatatatatatatatatatattccgttcataacttttttcaaacagggtcaaatttttttgaaatttttgaaataaagaaccttaaagctgtcgaattatacaaaaatgtttaatttggtcgattttgaccaaagttgtgacgcttttattgtcgaaatatagtacgaatcggggacagtatgacttgggtctcgtccattggagaatatttaaaattaaaaattataaaatgaatggtttttaatcactttttattcacgatcaattgatttaattatccaacatgcatataatcaacccaatttatattcctaataagcttttatttgcgctatctgccctgattttgtcagatttatcctcattcggagggtccaaaactgaaaaattccatgttttttttctctcaaaataagggtcaatgtctttaaatctaatattttttatcccaaaaaaggtgatacggcagcggtgccaatagggtcgggttaattggattattaggaaattaaatattatttttaaatcctatacaatattaaaataaagcaattaaataaatggtttattttacatgaaaaaaattcatttattaacgaatcaaaaatcattcaatcggcttatttaattgaataaaattacctttttttattttttaggaagttaattgacgtaatcatgtcaggcaattgcatgtaaccggcctaacatttgattaaaattggatatataataaaaaataaggataaataaatgtgtctgaatgactttttgtaaaatatttaatgaccgcataaaatccaattacttttgaaaaataatggctaacaaattagcccggtctcgggcacggtcattttgatcgggctaatacgggcttatgtttagccagtgaaactgccccacatttgaaaaaaaatattaattattttggcgaaatgtcttgagttcaatgttaaaaatagggctggtcgggaccgggactggggcggcaaatcccggttttttcaggtcccggtcccggtttttggaaaaattgaaatcccggtcccggcgggactaaa

SEQ ID NO: 12603 - DNA, 2716 bp, Heterodera glycines
ggccaacataggttaaaacctaaaaaatcccagccctttttattatacatattaatataaagctattaaataaattattttatatcgaaaaatgtatgaattatataaattatttaatcggcttatttaattgaatataaacataaaaatgcgttttacactgctttcacagcagtgccatcgtcaaaacaattttgaagagggaggcttttatacgtgtttattgactaattaactttaattacccttttttaaattttttaggaagttaattgacctaatcatgtaaggcaattgcatgtaaccggcctaacatttgattaaaattggatatataataaaaaataaaaaattaggataaataaatgtgtctgaatgactttttgtaaaatttttaatgatcgcataaaatccaattaattattaaaaaaacaaaattattttcatcactttttatggctaatttgtaagcggtctcgggccctgtaattttaaccgggctaaaacgggcataaatttcgccagtgaaaatgccccaattaaaatggtgtaaaactgcaaaatttttccgccggccccaaagggtcgggttaaaattggaatttttagggaattaaatattattttaaatacattattacattaatataaaataattaaataaattattttacctcgaaaaatgcatatataaattattcaatcggcttaatttaatgaatataaacataaaaatgctttttttctgctttcacagcagtgccatcgtcaaaacaattttaaataagcttatatacatgtttattgattaattaattttaaattaaaattatcattttttatttttttaggaaattaattgacgtaatcgtgccaggcatttgcatttaatcggcctaacatttaattaaaaatggataaattaaaaaaaattaaaaattagagacaaattttgtctgcgtcaatgacttcaatgacaaaacaacatttttttatgtaaacatacatatcagggatgtgccgagccagacaaaatccgattccgattaaatcgccgattccgattatggccaaaaatccgatacggttttaaaaccgattacgattatggcccaaaatccgattaattgcgattccgattacgattccgatttttttaaaataattttttcccaaaaattttattcataatcaaaatcataaaaataaaagtttgtccacattctgaggcaataaacgttttctcagatctgtcacaatcaacccagcggtggagaaaagccgttcgctttcagtcgatgtagctggggctgagaaatatttttttgatagcttagattcggaaacgaaatgtcttctgcatacagaagcccaacaactgttttgttttgcaaaaaacgatcaagcatttggaaggtggatgaccaacgcacctgataggaaaattgcaacttagtaataattcattcatggttcttttctgctttaatgtcccaacaaattttttcttcaaaatttcgacttttggttcgaattcgggtccgggattcaaaaataggtgaattggctgctatgttcttaaactgacaccattaacaacccttcaaagactttgacatttttgctaaataacaaaaaacttgattatatcggggagaattaatccggcactgctttgtgagaaaaatttaatttcagtcattatgttaaaataagattaaaacattcgtttcagaaaacatttttttcaaaattcattggtattctcgctaaaaaaattccttcaaaggtcaattcttaggggtgtaataatcggatttcaaggcaaaatccgattacgattatccgattccgattatggcccaaaatccgattaattgcgattccgattacgattacgattccgattcggcacatccctggtgctcagccttctccttttgataatcttcgaaaaggcatttgtgtgatgggcaatcagtggtgcgactcagcaggcaatgattgcgttgtgtgcgaattcgtgtacgatattcacaaaactgttcgtctactttagcaatcctggcaccaaaggtggtgttgctggcacacttatgggatttgaaacggaattttcaaaagtggaaaaaaaagctaaggcaagaatggcatttgataaggcaagttgaaacataaaataaataattaattaattattgatatgcgatcagatcgatgaagacaaggacaaatcaatctcaaagaaggaggctattctgtatctgacctcattgggaaacaaaaaccttacggatcagggcctttccaaagattcgtcgtggtttgatgcaatggacaaaaaccaaaaccaaaaaatcgagccggaagaatttgatcagatactctggcataaatgataaaagaaaaaagtaacgcatccagattatttattcataatggtctttaaatcgtattttctttagaaaaattccaatcaattattatacccaaatatttttagtgaattttataagtaaaccacgcacttttcattatatgagttaatttcgtattatgtccaactacataaatattttttaatttttttgatgatgaaatgctaatgcgtttattaattaaacgcaaaatgaattcatttagtgatgtttgctgattcattcatcaatctatctaaagttatttgatggaaaaacggagaataaattataacact

SEQ ID NO: 12604 - DNA, 781 bp, Heterodera glycines
agagagaaggaacagacatttcggcacagaaagtgcaactcacaggcatggcaattgattaaaggtgccaactcacatttctgctggacaaatacgggtcttcctgggaaaaaatgccgacactgagcataccttaagggaagcgatcagagagaaagggaaagccgagcgacgaaaatggcatggacgaaaagccactctgatcaccaccaatgaaaatattcaagtccaaccgaagtgatcagtgggtaaatagatgcccaaatcgctaaccccaagtggcgccgatcacgtggacggggatgacgcccaccgggtcgtcaatttcgagccgttcaatgagcgggtagacggacaatgcaagggcagaaccaatggagccgaccgcaatgctatccaacggacggatggaatgacacgctgaagcaaagaataaaggtaattagcactatgcactagtttatcagctattgctcagttggcaacctgctgttgtggccactagcgaggcgagcagtccgtcgatgagcaaatcgatttggcactttcgggtggcaattaacgaaattacaatggaagtgcaaccgccgcccagcgaactgagcaaagtgaccatagctgatctgaagggagaaggaataagcatttcggactgaaaagccaatgatggatttgtaattaaaattattatttttcagtagagtgccacgggaccgggaatttttgccaaaaccgggaccgggacttgccgggacctgagcttttcaaaacccgggaccgg

SEQ ID NO: 12605 - DNA, 1611 bp, Heterodera glycines
ggaaaaaaggaaaaaaagagagaaaacgcactggccatctctgtcggggtcatagaagaaatagccaatgcctggagaaaaatccaaaattaatgaaaataatttaaatgctatttaaacgactgaccaatgaatgggttgggatacaaagggccgaaggtaaagcctaagggggagagattaattactggggaaaatgggctaattgagcaccaaagccgaacatccaataggaaagtccgccgaacacaacgtcaacaatgtttttgacctgcaaagaaatggaaattaattaattatttaaaaaatgaatattttaatttcttttaatttggccaattaatcactcattttgatcaatgggattaaaaatgatcaaaatcactgatcagtttgtcccccgtccttttggccatggaaatgcttctccgtctctccccaaaaagcttgccatgatgttgacttcgtcctttgacgacactcggccactctccaacagtccgaaccctgaaaatcagggaaaagtctgaaattccgtcgcaaatcactcagacccgaaaccatcgtccaaatggagaaagagcaggagatgagccaaatgccgtcgtcctggaaccacgtgttcctttcctcggagtacggcaaatagagcccggggggatttgagtaactgaaagtccaattcgaacaaactcttgaatattatggcacctcggctccatcttggcactcttttaaagttggcaaatgacccgtaagaatggcgaaatgaaacggcacaaaagtcgacggacggcaccaaccgatggacgacgaacggtgggaggaaaaaagtcagcagaaaaagggccaatggaggagagaaaaacaaaaacggagaagaagaaacatagcaaaaagaaaaaataaataataaattaaaactttaatggcttaacaaaggcaattagtgaaaagggaaaagccgagtaaaaaacaaataaaaatgggatgaccttttcatttttcaattttaaattatgagaatgcctttgcctgatcaaattgttttgcctccgttgtttggtttatcggtcaattaccgactgaaaagtgccgagaaatccttccggcatttccccaaaggccaaaaaaatgtcaataaaatatgccatgccgaaaagtgcacaaatttggttcgatgaatttcaaatttgcatattttttggtgctattttcccttcacttggcaacaaaaatttcattcggcagcttttcctttcgattgaatttgtgcctccgtcggccgacggatgggaaaagccgcgttaattcctcggaatcggcgccctttcctccaaattctttcttcaattttttgtgtgtctttctgatttatttgttcgctaatgtttccaaatcgcgcagagtgattaattaatgattcgttaatgacgccacggatttggccataaaaaacatttgcacaaatcaaacatttgtaaattttggccctcgagactctcgaagatgaaagcgacaaattaaaatgaattaatgggttaaattcgatcatttaacattccagaccaaaggactccaagaaatgatagtagcagaaggcgattatgt

SEQ ID NO: 12606 - DNA, 1764 bp, Heterodera glycines
ggggggaggggttgggtttggggtttcggcatggacagacaccgcgagtccgcccggattcgtccgtgtgtcgttctgctacctctgcacgaccattgctcccctgaggcgaaatgcccgtggcccgtgccaatggccattgtccgccccccttcctccgcagaaggcgaaatgtccttgcccgtacgtgccaatgtccccccccccactctccaccgcccggcaaatgcgcgcgaatttctcacccccccccccgaggcattcatttgccaacggcggtgctccgctgttggcccgatttgaacactagcgaaatgaaaacgcagaaccaagaaacccaatttgtggtggtgccgtgctgacaaaattagcggggaaagaaaagaaaggaaaaaagaaagaatcggttgccatcccctggggggagaacgaatgggacacctgcaaatgatgaaagaaaaaattaactaaagtgagagagagagaaaagggaaatcaggcaattccttcaagcaaaaccaatttaaagagagagtgccaacggcgcagaatcattttgctaccacaaaaagcaaaaccaaagtgccattcgccttccggaccctttaacatcatttgactaataacaacaatcattcagccccgagaatcgaagttaaaaaggcgctaatttattgtaaagttgcaaggcattcagcaaaaatccgattgtttactttttgcaattatcatgaaaaacaacattaaatagacggaggaataagttaataaaagtaaaggcaagattaaacaacaaatgaaagctgaaaggaaagggagtcgagaaaaacaatcaaagtcaaaggcgaaagaacgaacgaatgaaatgcacgcactttttgcccttttttggttaattttaactaaaataaaaggaaaattaaaaagccaaggcaaaaagtgctgcttctccctgattcaatggtataataaaataataaattggcattttgagtgttttcgtgcacaaaaaggtgagaattaagtgccattcgtgtcaagtcaattccagtccgagttggcaaatgaggcatcgtcgcgcatttcgtcctgatcctcgtccaactcctgcaaaatttaaattgagtaaaaaaatataatcagcaaggacgatttgagaaaatcatatgagcttttctaaaaattgcaacaaatcaaaaaattcgaatgagttccccctcaggaaattctatggagcagtgagtttactccttcgtcccccccgaccgttgctgctccgtctgtccttctccccgtcgttgtccctttgtgttgcgtcgtccttttgctgccaattgtttccttttcgatggtcaacatttcatcggtttttttttgccatttgtgttgggtttccaccaattcgtgcaaccatttgggcacattctgtttgacttggacgagttgctgaacaaatccaaagaaaatgggattgtattaaagcatttttccctatcctcccaaaaaacgtacgtctcgcaaaaattcggccatatacatgtcatttgggtcttccgggttgaagaacacaaacgcctcgccaacatttcccgagcgcccgactcgtccgacgcggtgcacaaactgttcataacgatgcaggggcggcatttcgtacaaaatctgatgatttgaaaagaaatgagataggaaagacacacttaagaagcaaaaaactgaccactcgcgagaggttggggatgttcatgccacgggcgatcacat

SEQ ID NO: 12607 - DNA, 996 bp, Heterodera glycines
cttgcggacggcgtccattgtcgtctggtaagaagtagcattcatgtcacaaaatttcattttcgttaagaaatttttaataaaagatcgggagtttctttttttattttcttttttcaaattataaaaaatgttttgccaattcaaaatgattgattttaagaggaaattccgtttttcggcatttttgtggtcggtattccaaattcaaaaaatgtttagccttcgatattttgattttgaaaatttttgggacctcagaatgtcattccttttgaaaaaatttgccgaattcagtattttatttattttataacacttaaactccttggcgcgaactggatctgttgttcgccgaaacggagaaggaggagccggaggaggctgacgacaacattttgcaacaatttccgcccaaatcagtcgagtgtaagaacgaaaatttttgatataataattcaaaaatttttgcttaatatttaggaaataatttataattgaattctgaagggatttttttgacttatattcataaaattatttatttaaaaaataattgaataatataaagttaaataatcattttgtcagtttgcaagcaattttaggctggtttgaagcatcgtacaaacgtccttcttggaccgtaatcgaggaggctgcggacgcagaaattcaggctaacggagtgcaattgtcatttgaaaaatcttttacacatcctataaaattctaaaattttttattgtttgtaatcttttaggtcccacaaaaaatactgtatacgtttagtgaatttgtgcgcatttttttggtttttgaaaataaaaattctaataaatcctaatacatgtgagttaattaaaactttcgaaaatataagcaatgaataaacctcaaaattaatcaaatttatttaatattaatcgatgtttgttctattatggttaattaaggaattgctggagccgagcaaaggcttttacgacaaaagcg

SEQ ID NO: 12608 - DNA, 793 bp, Heterodera glycines
ttctttctctgtaacatcgatggccaaagtctcttggcatcttttttgtggtaaaggcctttgttgggctccagcaaatcctttgattaaccataattgaatttgcgtcatattatgagttttgaaccggtgcaaaaaatggtttaaactgattttctcaatgagagacttattttccgtgcttagttgttagcatctagatacgaattcctctcccctcccaaatcgaatgcgatcgttcgcgttgtttgaccgtgtatgagtattcgatgttccggtgagcgagtttgtctgtaggagtttaaaaatatttaattcaatacaaaagagtgaaaatttaaccaatttcactataaatcataataacaaatttaagaaatgattttcaattaaggggtttgaactaaggcaaaaacttttggatttttctttaagcagatttttcaacattcaccattaaaaatagaacaaacatcgattaatattaaataaatttgattaatttttaggtttattcattgcttatattttcgaaagttttaattaactcacatgtattaggatttattagaatttttattttcaaaaaccaaaaaaatgcgcacaaattcactaaacgtatacagtattttttgtgggacctaaaagattacaaacaataaaaattttagaattttataggatgtgtaaaagatttttcaattgcgctagaaaaccgccgcacactcgactacggcggccagtaggtgtggcgagactacgggctacggaagaagtccgcgcgtgatccgca

SEQ ID NO: 12609 - DNA, 1513 bp, Heterodera glycines
gaaaccaaccgtgaattttcccaagagaaaatttttttgaaaaaaatttgaaaatttgagtgcactttgttacgaaaatttcttaaattcaaaaatgtacccataaaattttaattttcttttaggggaagaactcgaagaatttttctattcgtcactttttgagtttcgttttcctgttttcgttttcgtccgtcaaaaagaattttcgtttcgttttcgttttcgtcagacggaatttggacgaaaaagacgaaaaaatttacacccttaagagtgacgtttttggggaaaaacaagccatctcgtgtagtgtgtgtggtttagtgctaccgattatcatatttttctttacaaaattcattgaaaattccaaaattcgtactatagtctaccacccacaaaaaatgaataaaattgatgccattcgttctctcatggtctgtaatgctcaggaaaaatactcctgaggtgcggaaatggcaaaaaaaatggtttttgaaccggttcaaaattcgaaaaattgagtgaaaattggggcttctgacccttaaaaacggtcaaattcggacaattttggtatcattcgaaaactcttgaggagctaacaataagtctaaaaatcaaagaataaatttgaaccgatgccatctaagcactgagataactgagtctcagtgaaaatcgacacttcagtaccagaaaaaaatcgaattaaaagtttaaattttcacaaaagggagcacgcattttgttgcaaaagcatttaatgccattttgacgaaaaattttcatggcccaacggagtgcctaaatttgaattggacaccggaaaattggacaccgtcggaattttggacaccaaaggaaaattggacactgtcggaattttggacactggaaaactggacactaaattcctcttttaaaatataaacccaggaatttaaatactcaatatgcacaatgattgatcaaatgtggcaaaaaagtgtacaaaattagacgatgattgatcaagatgccaaaaaatgtacaaaattgcgtgatgattgttcaatgtaccaaaaaatgcgcaaaaatgggaactccataaaaataaaaacttttttcgttatgaatgtatggtgagttctgcagctgatgctacaaataataataacattatttatttcaattaaaatttttgtttttattcttaacttattttttttttatccaatactgtccaattttccggtgtctaatttgccattggtgtccaattttccggtgtccagtttaccgggagccaatttgattccataaaatcgaattaatttcggaatttcaaatgtcaccgcttttaaattggtttggtttcggaatttcaaatgccaccgcttttaaattgaattggtttcgacatttcaatcaaatgcacctctctcgcttcttaggcctctccgctgggttggctcgtcaggccacgtacagcaccactcggctgggcatttacacgtggttgctcgag

SEQ ID NO: 12610 - DNA, 969 bp, Heterodera glycines
ctacagaaaattctttttttcagttttttgttagtttgtattcctaatcattttttcatatctttgatgaacctattcaatgttaagattttaatggttaaaaaattgaatgtcaatctttgtgactagtaattttttcgaattttcaattagttatttttgtcgatggcttatagttttagtaaaacttattgataatagtggaatttttatgaatataatatttttgacagcgcggcgcaaaagtccatttttgctgggcggcgcaaatgtcgcggcgcaaatgcagcggcgcaagtgtcgactttgctgagcggcgcaagtgtccacttttgctgtgcggcgcaaatggcgcggcgcaaatgtctcatcacggcttaacaacagccgaaaaaaaacatgtttttcgtgcatttcaggaaactgggagctcaggaaaaaatagtgaaaaaactataaatcgtatccctattgattataattttataaatttaaaaaaaatttttggaaattcaatgtttaaatagagaataattcaatcataagaatattaagttttaattttgtgattattttatttgccttggcggaaaagaacgaaatgactcatcatagaggcaaaataagaatataattcataataaccttgtgggtttttttaaatacccagaaaagacaggatgcttagtctgaacggtgctatgtcgttatataaaaaaccatcaaatggaaattttcaacaaaaaactgaccataacttttgtcaaattcaaccaaattagacatccttggtattattcgatagccctaacatttctctattcatgtaaattagaaaaaatttttgaaaatttgcagctaatagaggacacgtagggctatcgaataataacaagaaaataaaaaatctaagaaatttataacagacatttttcattagaaataaaaaaatttgatcatcaaaaattc

SEQ ID NO: 12611 - DNA, 1913 bp, Heterodera glycines
  unsure (1)..(1913): unsure at all n locations
aattgtatnnagtttggtggggagatttgtgcccaaaaaaattaaatgtggaacatttatttaaatttaaatattctttattttaattaaattggataattttaagtaactttattatcacttggtggaatttatgaaacaaccttgcaccttttgcttttgtctcatctaccaaaaaaaattttccattttttgtgatattatggagagttcgaattcgatgtctctgttgtcagtactgtacgtcctgcacaaaaaaaatttacattattttaatgtcagatcagtgatcacaatgaaagctggaattggtcgctctcctatgcaaaatcccacgaaaatcaaattgttaagggagtttcaatggtacggcctgagaccgattaggagaataataaattttcatgccaattaaagaaaaaatttcaaaaatttgacaaaggaatgcctgaataaaatgggtttttgttagtggattccttacgcatgggaaaagttttggtcgagcggtgaaaaagggtgtgtctcacgagcttgagcttttaatttcacttaaatttattgagccattatttaataaaatccacataacccaaaattaagaatataaaataatgatcaacgaaatgcatgccaaatttgatgcaaattgttgccattacgtgtcaatggcctaaaacaaccctcgccgatttgaactcctcagaaattcagtgaggagaaataaaagaagaacaatttattttctggataaacaattttttagttgttggaatttttttaaaatttttttaaaattttaatttttagttttctatccgacagcataaatgttcgttggtaacccaatggttgcttgagaagaagcttggttttttattagttagccattcaattacaccattaaataactgatccttgttactcaattcaatcttttattaaacacttaaaaataaaattacgaattatttgtcaggaaaataaatatttattttatttgttgattgtcacattattaggccattaattctatctttgtcattttcatattttcataatttttttttttggcagtttcggcatattttgcattttgcggacgggatcccacagaggttgctttttacagcacttcttttgcggcgttctttttcaaaaatttagtgccgataaacgccattttgaatttttgtcgattttacaccatattcagattttgacaaaagctcagttttgtcaagagatgacaaaattcgcttttttgaattatgtagtttttaattagctaataggtggagacggatctggcggactgatgggcaccgccggaacaattttcacacctttaactttgattcaatatattgtaatttatgcaaaaatatttgacattctttactttgaaatttcaaaatgcattgcggacccatagggaggcattgcttttctatagcgtttagacttttcttaatcaaaatatttacgtcacaatttactattttggaatatttatgactaagaaaaacatccgtgccctttggctttcttcggtgttcttctgatcaatccccacattgttttttttttgttctcactttcctaatcgatcaatatgtgtaatccggttatccggtccgttgccatccacatttctgcaccggaccaagccttgtgaaggtgtgcccgtccccggcaatgcatagtgtcaaaaaatgcatgcatttaatgtgccgttttcggttgcaatttgctgagccatggagtacaacgaagggcgcagccaaaataaatgaaaaaatgccaaaaaatttttctttaattttcaatcccggttttgaccgggaccgggaccagtcccgggttttttcccgcttttcccagccaaaaattcccggtttttcaatccgaaa

SEQ ID NO: 12612 - DNA, 4171 bp, Heterodera glycines
tttttaaaatacttttccttcctaaaggtcttctccctgtaaacgtttgggcattcgctacaaccatttgttgtaattgccttccactttggcacagtgcacacttttggacgaatttgtcgtggaaagtaacaaattgcatgcattgccggtaaggaaaacgaggcggatgaaaaatagaagaattttttattaaatgatttaggaaggaattttgaatgctttgccgaatctaaagtcgatcaatttgagtcggaatcagctcagtgccatcccccagggcggttatgaacagaccgtggtaaagtttttaaggggaaataggggaatattgacgggttatgccgatgatgcaccacaccatgaatgaactttgattgggtcattcgtcacttcagtcagtcaacgtcgagcacaatgccatctccaaagtgccgtttggcatttttgccaaggccaataatctgtccaaattgaacttcaaagagaatgaattgaccgccttcccattgggtcggtttggttgaccaacggattttatatcattcaatagtatttctttccatccttcagatttcggcacttgggtgaccatcactgagctgaacgtgtccaacaacgaaatccacgaacttccgctcggtcagttttccaccttttctctctttggctttatcttttatccctttccactcattaagacattgacaaattggtcaacctcgaggtgttagttctgtccacaaaccgactcaaaaaattgccaacacaaattggaagtctgaggagattacgcgaattaggtggaggacggaaaagaatttagggatgacattttaatttcagatttggaggaaaacgaattggaagtcatcccttcagaaattgggtttctcacagcgcttacaaaactttggattcaggtaaaaccgttcgttcccttttacttacttatcaattcatcctcgtctttttttatctttggcacttttgcattttttccatccttttttctttgtttcagtccaatcagctcacttcgctgccccgcaccattggcaatttgtccaatttggttgacttcagaataggcgaaaatctgctcactttcattcccgaagaaattggtgagaagcgaataaaagtcaaatttaataatgtattatttcgaatatttcgcatttaatcgaatccaatttgtttctaaggacacttggagaatttgaagagcctttacttgaatgacatccaaacttgcacaggttcttcattcgcctgtttctgctttcgttggaatgcgttcatcttcccccccccccttcagtttgcccttcgaactcgtcctctgctcatccctcgaaataatgtccattgagaggtgtcccctgtcacaaatcccctcaggtgtgtttatctcttaatagtttgttttccaattttctttctccagatataatcgaaggcgggcccagtctagtgatccaatatctgaaaatgcatgggccctatcggggagttctcaacatgtgatcgttctgctcgcatttttctgattactcaatgacaaaagatgccaatgcctctggactgctgccaattgaagattcatcatttgttgctgtaacataatgtaaagcacaaatcacctcttttgttctttttctcaatacttcagcgaatattttattgttatcttttaatctttcctatcctattttccgtttcattttgccgttcgttactatcaaaatttatattatgtaagcccgtcatcatgtcagtcattttttgacaggcattattttgtttgccataatattatttacgaatatatacttattaaaatcaacgaattatttatatgcatcatttttatggtgttttgacacattttgcgggtattaatcgaatgctcgtaataattataaatctctgtatgtacagaataaaataacagtttcttcgtatatgcacggggagttatgaaaagactgatttataaaaagcattcattaacttcctattctttctaatagcatttttataaatctgtccttcagtgttaaggggaaaaatgcgctagttgggagcgggatttagacagacctcgttcgcgaaatgtttgaatatgttgttcctggggaggggttcgacaaatggatggaagataatatatatatatatataagaaaataataaaaataaagagtgagtgaccggagaatggggaaggggcagaggtgaatgtgaaacgtgcacctgtatacagcttccaagagtttgacaaggtgggccaaagatgaaggaaatatacaatgtaaaatgattgaagcaaagggatgaggagggtcaaatgtacaactggaagggataaggaaaataactgtacaatttgggggagtgtggcgggaacgagcggttctgccctgaatgtatgctgtagatatatcattttgatggatgggcgggcacggatacaactcatcggttacacgatttataacagttcaatattttgtacaacattcttctttcacgggttggtgtcgttgccaggtgaaaagcccgactggtcccattggattatgggcgacagctgattgttaagtgaggagccaatcagcggatcctgcccttgaagtggccctctgttctgaacggaattagcggtcattaaatttccgtggttgtgtttgaatgacctggaagggaaactcctccatgctcagctctgcgtaattcaccgcgttgaacatttggcctaactgggtctgtgccgagggccagttcaggcacccgcctggaactggcatcaaaaaagcattgcctccaattgtggtcgcttctacacggcactcactaccactaccgccgcaaaactgttcctcaccatattccatcgattgttgttgctgctgttgcaaaaggtccatgttgttgccgccgccgttgttgccttcgttggtgttatttgcgttggagtgttggctgagataattggccacctcattggacgcatttccgatcataaagccatgatgatgattgtgggttggcccggaatgcgtcattttaagcagtgtcacgtgttgttgctggttggccgttccaatggggctggcaatttgcatgtcttgcagactcgttgcaattttggttgcctgaggcgtgctagaaggcgaaaaagacaccgattgctgagcacagttactgttgacgctgtcctctggaggctctttttttatcgacttgttactgccgttcactgaaagtggcgataaagagcccaaaacgggtagattggacggaggcacgttgatgccattcttctccaattggtgttccaattccttaaagatacaatcccgtggaagaagagagcattccagacccgaacctgaacccgctgaaaatactgtcgtgtcaggtcctccaaccttgcggtttgctgctgttgcctgtagagaaaacaaaagaaataaacaacctaatccacttattcaaccaacccatgctgactgattgacctgatcatgatctctctgtctttttgcagctgacgaatgtagtcacaggacgccttcagaatagtgcctttgttcagtttcatctccctgtgttcggtttcgttatttatttaatttgtacggcctatttcttactcggaagtcgactttgggagcatcagtcccaactccttgatccggtcgttgatgttgtacctcctccgcctttcgactgaatttgcttttcgttatgccctcccctctttcagctctcccttaaactaactcatgttgtgaatgtctttcttgcgcctgtctttgtaaatttccgcctccgttaagccgtgctgaccatttcctcctccatttgtcagttgtgcattttgcgaatttacgacatttccccgacggatgaaattcctaaatcattactgaaatctaaccctaacacattataatttccattctcattgtcaaaagttcacacccccacccatttttggttccaactgtcctttctccacatactcaatgtcacacgaagttggtgcactgctggaaatgatctgacggaagtctgactcattttttggactgtacagtccaaagccagtagccccagttggaagccgggtgagccgcttggagaccgcaggcagcaagct

SEQ ID NO: 12613 - DNA, 1936 bp, Heterodera glycines
caaaattcgttaaaaattctgaaaatatttcctcgcccgtgcttatcggcaccgcccgccccagaaactcataattatttttaaatattagctccaaatcttagtcattttcagacaaaatcttttagcaaattgcataaaattttcaaaatttttcccggcggcgcctttcggcgctgcctgacccccccccccatgttccccagttttttgggtaaagcatgtcgcgaaaaaagctgttttaaaaaatcaaaaaaaagatcgtcaatttacatagctgggacccttcacaaatcattcccaaaatgaaccctaaaaattcaaaaagaatcaatttttacgtcacaaattataatttatttgcctttcggcaccgccaaaccaggagaatcttttaattttgttttaaaaaggcttctaaaagggtgagattactgaaaattaatgaaaaaattttcgaccacagctctgaatcttccatttttgcccctatttttctatcttcctccggccgctcatattttgtgattttttcacctaaaaaaatcatgcaaagcttttattctgatcataagttactcttaaccaattttagattggattttttttaataaaaatttttacaattaaaatttgtttttgaaaattacggattacgtcaaattacggcctttttggacctccgtaatgacggattacggatggccgtaactgaaaatcagttacgtccagccctgctataaatgtgttagaaattaatgaaaataaattttaaggggtttttgaggtcgctgatcacgaacacagcacccatttttgccaatttcgaacccctgacccgaactcgaacaaaacttatttttattaatttctaaaacacatttataggcatctgaaaatgtatgttaaaagtaccccctaaactagataagtacccatttattggatgcttataagtacatggggcacgtattctgcattagaatcgtttttactctttttccaaaagatggattgctcggcttggcactgaccgttggctttggcggtgctgcggtcgttggcgttctcggggcggcgctgttggctcggaaaaaatgagtggtgaaaaatgtgatgcccctaatttttaacttatactgatgagttgactgtatttatccgcatcgattgggtatctttgacactgataaaaatcgcttttccgttacactcattacccttacaaaaaattatttttaatttcgcgctcactaaatattcaccacttttgagcaaacttttgtattgagcgatcactgtgaactgttagtaatttgttttgtgtacaaagtgactttcgtcaagtgtcctgtcattctttgctcatttatttgaattttggccaatttatgtgcggggaatccgaataaattcaaatgattttatgtttaattccctcccaaaagtgggcaatttcggtcaattcttttgctttggtgctgctgcactctgctgattttcttttttgaattgataatttgtcatgcctttttgaatgttaaattatcacattctctcccctcccccccattttttgcttttatttatccgccgtcctatgacactttccgtcatttgcttcgcttttcctctctttttccaattccgccgactgataaaattcacttttttattcctccgtaccttttattttatggtcactaatggaccttttggcctttaagcattagtccgttttggccatttaaatacgtcactttttctgtcggcgttggccctcttggaatggacagttttaatgaatgtgcgcttagattagcctttggtcgccgcatcaatcgccgcccccgccgccgcggccctcccaattttttttttgctcgttttcgtccgccgttgccccaatcgttcgcattttcctctgacttttgca

SEQ ID NO: 12614 - DNA, 2249 bp, Heterodera glycines
  unsure (1)..(2249): unsure at all n locations
ttttttttttgctcgttttcgtccgccgttgcccccatcggtcgcattttcctctgagttttgcattttcctgtcccaattcgttcaattgttcccattttgtccttccgaaaaggcaacaagtgttaattcgcctctcattttaataagttttgactttctatagtgcctttttcattggttgtttaatttcctccgatcaaaagactttttcgccctctctttgtccccaatcagacagtcagagagagagagagaaaaaacttttccccccccccccccccncctctttcttttgagtttgtctatctctctctctttctctctctctctctcttttgagtttgtctatctctctctctttctctctctcccccttccccctctcctcctccatctttccgtccccatctctacgtttattcatttagcttaatccctacctccctttgtccccatggatccgttgccaaatgacgagacaatgcacaaccgtccaacttctgtggttcttcctcctccgatatgtgaagatattgaagtgaacggatcaggcgcaatcgtacaacagcgaacacgggcttttcgcctcgtgcaaataatggccaattttggcattttgtttttcgttggtcagtgtcaaattgaatagatattgttgacgaatatgctaataactccgattaatggtaaaggtttcgttgccgaacaattcttcaaatgggtcggtccttaccagcgcggcttcttttgtgacgacgactccatcagattgccttacaaaagcagcaccgttcccgattggctgcttctggtctatgctttgtgtgtgccaccattcgttgtcagtgctattcaaatgggcgtgggggcaattgttgggaaggcgcgggacggatggttatcccttgaaaaagttgggatggaacccccggggatcttttggctgattgcccccccccctttcttggcaaaaccatctttttcatcggctaacatttgccgatctttcagttcgcttttggagagttcatttgtttgtccaaaccgcccgctttggccattcgtcaacgtctaaatgactttgagtttggggagggcgatcgtttgcgtttcttttgccgattcgcttatttttacggtccttttccgccgcgcttctcacacataaaatgctgctgctggtcatttcaggcaattatctgatcgcgttcgtcgccaatttcaccttcactttggtggccaaattttcggtcggtcgccttcgcccgcatttcgtcgatttgtgtaagccgaacgtcgtggacttttgtgcaacaccgaccaattggcacacgtacattgaacacttcgaatgcgacaaaaatgtgctgcaggaccaaattgacaacgcacggctcagctttttcagcggacattcctccttggcaatgtgcgcttccgttttcattgcggtgagcggccaaatggggccaatcatcggtcattagctcattcattagctaaagagtccccctcccccctttcgtaattagcagattaatgagtgctttttggttttcatttttttcattagctaatgcctttttgcttttcactattttctttgtttatttctgactatgcctttacgttttttgattaatcagctgatttgttttcgtccatgccctttttaaatatttttcattgccaattcgtaataatcagctgtcccccgtcccccccccccccctccgtttgatcatttcccatggtcagctgaacgtcgccacaaaataacgctgatttgtgagacaaaacgttgtcggaaaaaaaaatgaaaaaatgcttgaactccttatttgttagcctaattctagaaattttcccataaaaaatttcaatataagaaccattatatattttaatttttttaaaatttcattaaaaacttttcaatatcaatttgttttcttgaatttttaagaaaagaatttctaaaattaatctaggaagtaaaatttttttttctcggctgcgtccccccccccgttcgttcgtctcgtcactttttgaattaaacaaattgtttggcattagtcccgatttgtccttcccccgcatcgttcatccgtcccccttgtcggcctttcgaatccctaaatccctttcattttcagatttatttgcatgttcgtctctctccgcttttccgtgcccgtctctttgtgctcgtccctctcgtccaaatcgctttcctttctctc

SEQ ID NO: 12615 - DNA, 2065 bp, Heterodera glycines
tcctcaggaagcggaggatcatggctcgaagcaaaatttcctgcttttctaggttcattagtcttcaaactatctagaaaatccaaaattttgtttctagtatggtccccggcttcctgaggaggtcgcaaagtggtccatctggggggggggataattagagcatatacggtaacaagtttaaaatgctgaagaaatttgctgaggttgacattgaattgagtcccagtgattggaatttccgaagttgtttaagaaatgagaagaagcaaaaaaccaatagaactttaaaaatgttgtgccataagaaaatgccaagaaacaagaaaagacaactagaatgctatgaatgttatgccgaaagaaaatgccaaaaggtgtgatgccacgaaccggccgagccattttcggtgttatcattcataattttacaacacaaccgtacttcctagcggttgcgatgcgtcgaaggggatcccggacaatccgtcagtggacaatccgtcagtagtcaaaatacaattagtcaagagaggcaaattagattttttattaacagattttgcaacaaaaaaaaatgatcaaattttgcgattttaaactaatttttaaggatttttagggttttgcagtgccgattaggcgcagctgagagaaaaattgagagttttggccatatttttagcagattttcaacaaagataatttggaattcgtaaaaatttagcgaagttttctagaaaatttgactgaggtaaatgttggagggggtacctagaaggaaaatcaaaaattttaagcaaaaaaaaatattatttttttcttaaaaatttcgggtgtgaaggggtcttgggggaggggtacgtaaatgaaaattttaaatgaatgaaacatgaagttagctagtagcttgatgaaattaagatgaaaaataaggcaaaaataaaataaattcttacaaatacacgtaaatttcggtgcatatcgattcagtgccgacgattcagtgccgacgattcagtgccgacgattcagtgacgacgattcagtgtgaagacgattcagtgccgacgattcagtgccgacgattcagtgtacgttgaaaagccgacaattcagtgccagaaaatttggcaaaaaattttcaaaaaaacccctaaaaatacaatataaattgaagtggttagaaattctgtctgatgttattgttatactcttatgctaaatcaatccaaaattaaaataatgacctaaatatgtttagaatcaccttttaacattaaaaaaattatttttggaggggtacatttaaaaaaagttttttttaattttttcactagaaatttctaaaaattttcaaaaattctcaaaatatgtataaaacaataataaatttgccaaaattttggattttttaacgaatcatgggttcgtctcatggttgtgggatattccccgagagaaatccagtaggctggggatgtcacttatatgtaggtacataatttgttccatgacttctacttgctctatgtagcgaagacagcgctattcttggagtgtttgcacgcgaaatcgggcaaactgcatctagggactgcctctgaagatagctggcgcgcgcatccacatcaaccacacgttcagaactgtgcggatgtgactatgatggagtcggtggcggttggctcgatgcgcacccataccgagggggtcacactgtactacccgtacagacgcactgactaggactggtcggggaatgcgcccattgagggagaccattgctatcatacaaataatatctattcggttttgcttctagttgcgacgttgtaagctagccatcctacatcttttgggcgggggtctcaaattttaaaaatttttttttttccccccttcatttaaaaatcgaaataaattttcggaggcgcctatttgcatcgccgcgctccaaaaacttcaaacttttcataaaaagatgggcacaaaacgcaaaaattggaaaattggtgaaaatctgtaccaaccacacctgattgtccaccccttttttaaattt

SEQ ID NO: 12616 - DNA, 1862 bp, Heterodera glycines
  unsure (1)..(1862): unsure at all n locations
tattaaatttaaaaagattactgagcatntggtacactcatcatcacattgttgctttgtgttgccgcatttcgagtaacagctaaatgatttaatttgaattaattaatgttttttattttttcaatcattaaacgtttggatttattttaggcattacacctccaacttacgccttttgctggtcaaggcacgaactttcgcacaatttcttgcacgcttcctccttaaatattaaaataaaataaaattggaaatgaaatgaaaaattcaaaaaaaattttttcaaaatattgctgcttttattcactctagaatggaaaggaatgtgctaatatcatcgactcgaacgattcttaactcgagaaattctcgaggttttgttaaaatgctgtgaattttaatgagttaatatatcttactcaaaaggtgcatttcaccaattcaaccgcttctttggccttctcggccaccaaagagagcgcctacagagaatgagattttgatcagaaaactcatttctggtcagtgagagcttagccaagcataaaataagggtgaaaggagagtaaagaaatcatatgcagattttttttatttcaattgcccaatttacttgggtttgatctcagttaatattatttttcttgcctaaaccctcaaaaaatttttttcacagtctcaaagtacgtgattaatcgcattttatgttttcaacacatccatttttgcgtaaaaattagcattgaaaatttcgtttttattaaggaaaattgaaggcatttcatactgtagttttgaataccgtaaacactttggactaaaatttattatgtgtaaggtcattcaattgaacaaccttttttggcattttcctcactaaaataaattagggggaaaagtgtgaggaaaataggatattagagattcccttttgttcaatgaaaaactgaaaattcgtttgcatctttcaattctcagatcattgtgattttttgaccaaaaattagcaacttttgaattttaaaacccaataataaaataaagtatttaaattatgtacaacttacgagttgaaagtaagctcacatttgctttccccttctaaataaatttgaattttaccattaaaagtgatgcttatgttaaaaaaataaaatgtttttctttttactccttcacaattgttattaatttgaataattaaatcaacaattgctgtgtgaagcaacaaaaatgacaaactctcgcagttggtgcgctaaaattaatgggaatttttattttaaaatgcaacaaatgaatttaaaaatttaaataaaaaggattatttttataataataaggctgaaatttcaaaatttaaaggaattttgaggccagggatgctaatggcatcatgcaaaaatttggaaatattttaacatattttcgaaaagatgcctaaatatttgagtccatttgaaaaaaattaagagaaatttcttggaccaaatttttttaattgtaggattttcagggttggcaaaaaatttcgagtccaatccggcattcgggtccgcaaaaagtgagaaccttttctatatacgcatcatactgccaatcgttgtctccgaaaatcatcagtgcacctctccatccgtctgttatcaaagtacaatacaagtcgccacgcgttgcctcctgttaattcattcataaattaaatttaaaatagcaaaaattaagtgatctaaaaaggacctcccaacatccataaagggtcggatcgcatctgtggtaacggtttgttctgttcgtacccggcacaaactctcggcagcgtctaaacaatgtcacaaaaatgtgaataggtgcaagtt

SEQ ID NO: 12617 - DNA, 2823 bp, Heterodera glycines
  unsure (1)..(2823): unsure at all n locations
cactatgggtcaagcacactgtgcagagaaaagcctagtactatctcgtcgtttctctttttctttgtaatttctctcactttggcgtactatctcttcattttaattatgtaaaaaccaacatttacttctctccatataactttttttatatgcttacaattttcaccaaattttgcatatcgatagagaaaaggcagtgatttgattaaaaatttcggcctagaacattactaaaaatgggatgaaaaaaatttgcatttctttttctctccttttggagtactattttcatgtctctaacacattaaaaatcatgaaattcgtaaatgctaacaattttggttataaggatacaaaatcactttgtacatttagaatcaatagagaaattaatagttttagcatttttggtgaaaacagcagtttaggacttgagttataacgtgataagaatttgaaagtatcacaacttttttctaagatgtcaaattgcttagcattcgcttagaaaaagattctccttttcaaaaactttttttagataccaaatttgttcagtttagttgggaatgaagcgagttatggcagatcaaaataaaaaatacaaaaaaggcatttaccagtgtaagtgcatatactttgtttttgcgtgtgttggcgttttgttttacgccaattattttttggcaatttttttcgttttttaccgtccatggaacatctccccaaaaagtttcgctggtcacgtcttggcatcaattttgatcaaaccgcatttccgaaaatatttttcatttttttaaacaaaagataagggaatcagctttagtattagcaaattccttaaaaaaaagggattacaaaacccgtaacctttggaccgtccttggaaaaatcatcaattttgagaccaaacaacgaaattactataaaatttttggaaaaattcgcgttctatacagaataagttgccctttctgacaccatttaaaataattagcataattgttttattttttgaaaaagctgagtaaggtcgtttgtttgcttcctccgttctccgtcactttcgttttcgcgactttcgcctcccttttgatggtttgtgccgtcggtcttttcaatggcggatgtgccattgcgttttcgtcatccctttcgatgcgttgtttcccaatcggtcggtctctttcttccttctaattgcgttgttaaaaatgggcctaattgcagaaataataaaatgcgagtcaccggttgctttttcctttgttcctcctccttgcaaatcggcgtgaatgaaatgggccgtctgatcagtgtttttgcccccgtcgcttttttcacttccgtcgcgttttcctctgcttctctgtcgtcctcttcgtccatttctttcccttcctcttttttgtccttcgatggcgacagaattgggctgagactgcgaaattccgacggagacggaacctaaaaccaacaaaacattggaaaacataaaaaatgaatgtttttaaacctgcttcagaaaatgatttagaaccatatgttagttttaatggccttatgtcaatttttgtgtgttagttaatctttttgcttataatttgttttcttcgaaaccctggcatattccatttttgcttgctctttaccttcgaattcttcagaaatcctttgctcaaagagggaactttttggtcgtaccaatccgttctgaacacatctccgagcgacttaaatgttggatgagtttctgtcggtgcactgtccgttgtaaataaaagttgccccccacctcacaatcagtacgctttgtctgtatggagaatacgttacaaatgtcaactttcgccaaacgtcgcttggcatccgctaactgatcccctttgacaatggcacaatgcttcttcccaagctcagctttaagtggtcccagcagataataattggcggttacatttgaattaaattccaaaaagcgagtcaaaaggctgaaaaaattatttgaataaaaaagaaaacaaataaatattgtatccttacctttgagtttgaaaaacattcaacggagtgctgcgaaggagaaaggcaacagtcacaatcttttgttccaccaaaactaatcggtttaaaagttctaggaaattctttgattgatgttcttccatcataattgactaatgcttaaaaaggactggaaaggaatcggaatttatgtttacaattttttttgtaaaccatcggaaacattcagcctaacaaataaggtttttcatggtatattttgcatacctatttttcggttagattaggcaatgaaatataacgccaattctaaaatgttttacactaattcaaaaacatatttatcactgcattttttcagccataacatgcttcatcttacgccaaaacgagagaaaaagaattcacaattttttttcatcaattaaccttttattgagcctcatttttgaaaaaacctttatatctttcgatgcagaaattttttcaaaattcgaaatgggtttaacgtgtagaaaaaaatgttagacggagaaaagtaaagtcgttttttcaccattaaaataaaattaacgttaaaattttggcggattgattaggccttgttaaatattaaatgttcagaattgatttagaacgccctaaacgatgagaaaaatgcaaattgggtgcgcgcttccaatccctgatgcacttttatttctttcaaaatataaatgaaaatcttaaagaaattattttttaatttaaaattataatttcaatcaatttgaccnntgcaggcnnatgcaa

SEQ ID NO: 12618 - DNA, 1723 bp, Heterodera glycines
tagagaccggcgcgggacgggatcccgcgcgggattttgcgggatcccagtccgcaatcccgcattttttggaaaatgcgggattgcgggatttgcgggattaatcccgcgggatcccgtcctgcaaagaattttgagttccaatcccgcggatccgcaaatttgattttttgtgcgggattatgcgggattttattattttttgaaaatttttctaagacagaatgccaaatatttttaaataaattaaataataaatttaattaaagttaactcatttttcatcgcaaatttcattcaaaatttgtgaaattttcccggcggcgcctatcggcaccgccggataggcttttacttaataatcctgtagaaattgagtcaaaaactgcgtcatttggccaattttggacaaaatctgttaacaaatcgcattaaatttcataaaatttctcgcagatgtcgataggcaccaggtatggcacggaaagacttccgatttccgacatttttggggtcggaattccgacttccgaaatttttgatgaaaagtcgtaaattttttaattttttttttaaaaactagtaagttttgtacaatttctaataataaattaaactgaaatttttaaaaatttcccggcggcgcctatcggcaccgccgtactctcctccaagttcccaaaaagtttttgaaaaaatcgcgctgtaaaaaacgtgtaaatagtcactccttttcccaaaaatgttctaaaataatgaaaaatgacaaaaaaagattttgataaaataattgaataattttttcaagcgaatatactaaaaacatttgtgaaataccttttacttggttaagacgatcaactttttaccgtcggatccaatcgaaaaatcttagtcgacccatcagccccttttaatgcatcccgccagcccctaaaaatttatttttcagcattttttgatttttggaaattttttgaatttaattgaaattttttcgaattttccaaaatcccgcaatcccgcagcgggatccgcaaatttgaaatttccggtctctagcccaaacgcccccgatttgcttacctattttggcgttttgcccaaaataacaaaaatacaccccctttgaagcgacctaaaattttttcagaaatacacctcaaagaatctaccataccagaccacgaaaattttcaaaaacataccccccaagaaatgaaaaattttctcaaaaattcatccccaaaatttatttgtttatttatttacaagaatttgtgattttgaaaattatatggaaatccatatttttctggactgtgggaggcctgaaacgcgagagaaacattttttagttttttggtttgaagtttttaggaaggatttcgagagattagcgctgttgtggaacataaaagttaactcgcccggtgggactcgaacccacgaccccagcaatccgtgccgtgctctaaccaactgagctacgggcgctccttttagaggttctctcaggtcctttatcccactttctcccacactccgttccttctgacatcacactgtccatatttgtccaaaagtcgaaaactcggcaattgttaagatcattggtcccacaaaaaaaaataaaaaacacattttatgggctatttgatgcgctgagcacgaatatgaagtacatttcgaccaatttcgaacccaggacccgaattcgaac

SEQ ID NO: 12619 - DNA, 1164 bp, Heterodera glycines
  unsure (1)..(1164): unsure at all n locations
ctgcttggaatcatctaaaaagaaagtttgaaaatgagaacacgcgctcaattgctcggcaagcgatggccagctgcaaacaagcaccaggggagcgggtgtatgaatttgccaatcgattaagtgatgcagtcagaactgcactggccggagagagtgaggaaataatcagaaagagaatgttcgaagaatttttggagaaattgacaccggaactgcaatttgaggtcaaagctggtcggccaaccagctattctaatgcttacgaaattgctcagcattttgagcaacttttggccgcaaagaggcataatcaagtttcaattgccgattcagttgcggaattgtcgcataaggtagaagcgttggccgtgcatcgccaaccgatgcctagcagaggagtcggcgacaaacgtagttgcttttattgtaaacgcccagggcatattataagagactgtcgagaccgaaagagagatgaagaacagaaatttcggccaaatcaaaggggatttaataatagaaattacggggatgaacgattcaataatagaaattacggagacgaacagcgatggaacagagacagaaatcccagagacaatcgctatttttcaaatcgggggagaggtcagagagaggaacggacgcgccgaactccgaccccttatggtagaggaaatgagcaaaattacggggcggagagaaggccatctcctggtcggcgagtgaactttggaggaggaagaattggggcagcgagaattgctagtcccctctttttggcattaattgttatactttcaatatttgggcaaagttcggcaacaaattctatggcaagccctatgatatgccctcccgattcaccatcgagtttgtggtcaattccagttgaccctatctgcccaacttggtccccgactgaaatcccagtgccaatgaaactatccgttttccggttaaatacaattcagtacaaaacaatggcgactgcttgtaaatgtgttgtaaccaaaatatccagaaggataggattttttgggagtcgttacgaggaagtaacgactagccctttggaagtgccgacggcaatatgccggaaaatgaaaggaagctgtgaatcacctgcagggnaaattggtccaacgaatggatctttta

SEQ ID NO: 12620 - DNA, 3941 bp, Heterodera glycines
gaatttataatttcggaccagtcctttgcaataccaccccccgagtactttgaaatgctgagccgtagtctaaacgcaactgaaaaaaggaggaaaaagcgagcatatgcattcgttaacggacttaagcgggaatatgttattaatgaaacggacactactgtgacatggctcgaaccccacccagagatagaacagctccaatctgtcggattagtttactcatcgcaattggcagcacaacttacagctttaagtgccaaagtcacatttaatactcagaaattatttgccgaaacggtgcggaaaatttgcaacagccttcgatttttagctgatcagacactgacgttggcagaggcaaatccgacacttttggcacgatttttcttggctaacccttttttaactgcgagattggtgacaaaggaaatgttagagatcagtccctgttttgcgataaatgatagggaaatgcattttcaatggcaaaatggcagatgttttgaaagattgcctgtgactttttatttgcatagcagttatgaaacgaagaagcatggatttttggacccaaaaacactaatagtacatcacaattcaaaagagaatagttgtaaagaattccgatatttatatgtaccattgaaagggtcaattatgcaatatgatcagctcagcggagatgtcaaggaaattcctcccgattcagtgcggtatttggctagacaagggaaaattgattttccagaggtgcatattcaattgtttagaaataaggtactagcgaatttgtctgagctatattctcccgaaagttttgatgagactatcgaggttgcaaaaattgcaaaagaaattgcacggctgtcaaagccaaatgcttgggaatttaattcggaacgaactgataatatggccacaaatattgtttccaatgggttattttcatttttgagaggaggactgatctcaattaatcaaatgtgggtattcgtttgttgttgttatgttacacttactattctcttacaattaattgtaccagcgccattagcacaggcaatacagtatttaggagtgggaggaatactcctaaataaagtaagacaaatccgaaatcacatgggcaaaagaaaacaaagacagcccagggaggcaataaaaggtaaagctggccaatctgtcatagaaattgagaaaatagcgatggaacaaaccgctgctacacaaatgaaccgtgagaaagcagcagtgaaaagccgagaaaattcaccaattgtcgaaaagaaaaatgtaacttttgctattccacttacggagagatggccatcaccggatgtagctgcgtctacctcacagcaagctgtaagagaacagcaagcaggcaaaaatgggaaaaatgataaagtcataattgcggttgcgggaagtagtcaatgtgatgaaaagtttcgaataaatggagaagcgaatgagtggaaaatgagttttttgttagacactggcgcacatgtgactttgtgtaataaatatactgcgctgaaaatgggcatacggaaattgattgcatccgacatcacggctgttattgggatcagtgataaattagttccgattttgggaaaagcggaaattaaactgaaaatcgccgaatgtgaagtcatcacaaccgtttatgtagtggaaacaaaaattggaggcgcgggatcatacgaaatgattatcggaagaagcacccttcgccaattgccactattattggaccttcaagcgggggctttaatacgaaaaagagacatgaaagtgtttatttgtgagccaccaagtgatcgggccgatgcagaaatacaaaaaaagaggggaacaaaagacagagttggaatggtgccttgaaaagcataaggatgttttttctgtccacgattatgatcttggagaatgtaagttgaaagcacctcccatcttaacaaattcaaatgttcctgaaagagtaaagccgtatccggtcccggaaaaatatgaaaaagaattaaaattacatattgggaaaatgcttgaggccggggtcataaaggagagttatacaccatgggcacataatattgttttggtaaaaaaggcggatgggcaattgcgtccatgtgtggactttaggcccttaaacaaaataacaattccggacccttacccaatcccgcgcatggataaaacaatccttcgagtggctggacaaaagttttactcaactctggatttggcatcaggattttggcaaattccgttggactcggaaagttcgtataaatgtggtatagttaccccttggggtctttaccaaatgttgaaacttccgtttgggctaagaaatgcgcctagcatattccagagaacaatggataaattattggacggaattccgaatgtgactgtgtacattgatgacattttaattcacacaaattcggcgaatgaacatttcaaaaccctcgagattgtgtttgagaaattacgagaaaatggattgaaattgaagatgaacaagtgtagctttttgaaaagtgaatgtacctatttgggtcattttcttacggaaaaggggtaccgaccttccctaagcaatcaagaagtaattgaggcattccctgaaccaaaaaatgcaaaagaggtgaaaaggttccttgggatgatgtcatttttcaggaagtttattcctaattttgccgctacagcaagccctttacaaggcttattaaaagggaaaaacccggaatttgtgtgggaagagtcgcagataaaagcatttaaagaattgaaaaataaattattggaagcaccatgtcttagagcccctaattacgaaaggtcattttatttatttacggatgcgtcagctgtggcgtacgcgggagctctcatgcaacaatgaatggccaggatttgcatgcagtcggttattggtcccgcactttgaccgaaacggagtcaaagttgccccccacccatggtgaattggcttccatagtgcatgccgtgcaaaattttcggccaattatttatggagcggacttaacaattttaacggatcaccgtccgctcacctttttgttttcaaaagctagcactaatcctaaaattaatcgttggttaatggcccttcaagaatttgaaccaaaagtgatatatgttgaagggaaggccaacaaaattgcggatgctttgtcgagagttccgataaaatgggaccaagtggaggaaaagggtaaagaagatgtgccctttttattaacaattgacgaaaatcgaaaagttgacaaacaaatgttagaaaaggagactttagcggacccaattttggcccaagttattagtaaagtgaaggataattgggcggaaccagtgaacgaaaatttaaattcgtatttcagagaaagagcaaacttatttttggaaggaaatttaatcaggaaaaggccgggaatgcaaatagtaattccgcaaggaatgcaaagccaagttttgaaattgattcatcgagctcattttggtattgtgcgaagtaaggcaagagcaagaggcattgtatggtggccgaatttagcgaatgagatggaaaattatgtaaaaagttgtgaaatttgccaaagaaatgcgccaagcgcaccgagaacagacccggagtacaaatggccagaagccagatatccgttcgagcgggtacatatggaccttgcagggccaatttggggaaccaatttcctaattttggttgactcatattcaaaatatccatttgtatgccaaatgcaatcaactcactcaacatcagtaataaattaccttagggaaatatttggaatgtttggctctcctaaatgtttggtcaccgacaatggtcggcaatttgtgtcagaagagtttgagagttttatgactaatga

SEQ ID NO: 12621 - DNA, 2789 bp, Heterodera glycines
  unsure (1)..(2789): unsure at all n locations
attttctccctttccttctcttcccctcactttcttttgctgtccttctcctcctctcttcaaatccccttcccatttctcccacttctctttcctcttcttcttccnccttccccttttttagtgatttaatgcctttccctttgttggcacgcaaagtcaaaaagttcgcttctcagcatttactgcagctgaaacaccttttgggcggtaagtccttctgcaattgatcattttgtgctttttcctttcattttcgctttgtttttcttaaggacgcggttttttgaagttcaaacgattgtatcgcctaaagggcgcgcttggccacggcggattcggaattgtttaccgcgcggtacgaataagcgaccaattaccagtggccgttaagtgaggcaacaattggcgatgcctaaaattgtgaatttgcagattcatcgaaagacgcaatgtccgcgagtggggaaaggtgagcaaatatcgacgccgaggaggcgggaattgtgatttatttttggatggtattccgaattcggcaatttttcgaattcttctctccccccccccttttctcctcctttttgttccttgcaccttttgttctcccttttcctcctcttcgccattgtcttctcctccattctctctttcttctgttccacttgtgatttcctttcttcccacagattgatgaccacaaagtgcccatggaaattgctttgttagcgcgttgttccaatgtttcgggagtgattgcgctgatcgattggttctctttgcccgagggttttctgatcgttatggagcgcccaattccctgcatggatttgttcgatttcatccaccaccagaaaatgttggatgaaaatgtcagccctttttagcaatgcccttcctttttttggcattttctatttgttttcagttggcccgtttccttttcctgccaattgtcaaagccgtcatcgaattgaccgaacggaaggtgttgcatcgcgatttgaaggtgttgttgttcactttcgagcttttgggtcggataatcgtttataataaatttaggatgaaaacattctgattaatttggccaacggtcaaataaaactgtgcgttcttttgccttcccccttaacggtgccttcttttttgttcagcattgacttcggtgcagcgacagtgttcacgcgcaatcggtgccacgacttccagggcacgcgtttgtactgtccgcccgaggtgccctttcatttggcactttttaattaccatttgatcatttttactctttgatcactccttccccctctccagtggtttctccattcgctttatttgggccgcgaggccaccgtttggtcgctgggcgttcttctctttaatatgctcaacggacgactgccctttctgaacgagaaggacatctgcacggcacatctgcttggcccattgccattcttcacaactctctccaaaggttggaaggcattggcgtaatgccatagccaatgccaaattcgattattatttgatggaatatttcaacttttcagcggctcgtgatcttttggcacaatgtctcagtttcgagtcagtgccctcctccttttttcctcccacccaatttaaattgtcttccttacaaattagggcgtcttctcgcccgtctctccaccaaattttggcacatcaatggctaaatgatgcgtctgccccaattaattggtgccaactgagtgcagcatgctgtagccaatgggttgtgggaaaagtggaggaaacggaggagcaaagggcagtgaccggcatttgccatcgaaacaaaaacgaaggaaaggacggcgaaggaagaaaacgaggagagacggcattggcactgagttacgacgagcgaactttgataagcgggaaagaaaactgcgcatcattttcacaacaacaaagtcagtccttccaaaaagcgaagggacgatgggaaattcgccaaatgaaattccattttcattcattggcaggacgaattcgccactcatcagcacaacgaatcgtttcacgctctttgcacacaacggcactgtccccgagaaacagtcacaaaacacttaacacaatcagacccacacaaacaacagacattgcccagtgaatatgaaaattgaaattagaacccaaaactaagacgtttccagtcactggaataagcggtttatagtaaaagttttaataatgtaataagtttattttattaaaataaatttgcaattgaaaatatttgagaaaattgcgctttcaaaaaaagctaaagcggtgccgataaaaaaataatgtattttaatcatgaagaaaatatgacttttaagctcgaaaagcggaatttcatttttgatttcgttaactgttctccgttcgttgggcttcgttctgctgttgttcctttgcgtcctccgccttttcctggcgatatttctgcaaaagatcacacgcatctttcaaggaacgcttcaaatcctcaatttcgccaataatctcctgaacaattaaaaaaaggattatttaattatacattccaattacgaaaatcaaacaattattttgccttgttttgtgagtcgagcaattccttcaactgatggcgcgtatgttcaacttaagagggatacattagacaaaaacaagaaagaaaattgagtttttttcaaaactgacaagatgggctcttcttataactatgnaaagtcatcagcgcggcatacattggctcagtcggctcattaaacacaatttcgtcg

SEQ ID NO: 12622 - DNA, 986 bp, Heterodera glycines
  unsure (1)..(986): unsure at all n locations
catcaaaaatntcggaagtcggaattccgaccccaaaaatgtcggaaaccggaagtctttccgtgccatacctggtgcctatcgacatctgcgagaaattttatgaaatttaatgcgatttgttaacagattttgtctaaaattgaccaaatgacgcagtttttgactcaatttctacaggattattaagtaaaagcctatccggcggtgccgataggcgccgccgggaaaatttcacaaattttgaatgaaatttgcgatgaaaaatgagtcaactttaattaaatttattatttaatttatttaaaaatatttggcattctcttagaaaaattttcaaaaaaatcaataaaatcccgcataatcccgcacaaaaaatcaaatttgcggatcccgctgcgggattggaactcaaaattctttgcggggcgggatcccgcaggattaatcccttgcggactgggatcccgcaaaatcccgcgcgggatcccgtcccgcgccggtctctagcagcgaccgctgcctgtgcaggaaattggctttttccgaaaatgtcggactcgcaagaccggtgccgttcttacaattagccccttaaaatgtaaaaatgtatatccaattagtgattaatttttttcatggacacggctactttcgaaaggacatccagaaaatttcatgaataaagatctcacttttcagatgggtctcattttcatggctcgtattaattattttcgtgctttttcttcaactgtttcaagatctttcaagcagggtaattaatccttaaaattaaattaataaaattatttatgaattttcagtaaagcataccgtccaggacaatgttacaaccattgaattagtcgatgttcctattgcgtcaactcatagagaattgaaggaatctgctgctactcaatctgtagttttctttttatattgcattagtttatttaatttatgtaatgtttaagaaaact

SEQ ID NO: 12623 - DNA, 595 bp, Heterodera glycines
tctgtctgaccttttttttcacctgttatgacctattttttttcatctgatgcgactttgtttagatttcttatcccaattttttcacctgttctgagcttttttttcacctcctatgactattttttcacctgttctgccctttttcacctgctatgacaatatttttcacctgatcgggtattttttcacctcatatgactattttttcacctgttctgagcctttttttcacctgttatgagcgtttttttcacctcctatgtctatttttcacctgttctgttctttttccacctgctaggacaatatttttcaccttatgctttttttcttcacatatattttcacctgtttcacatatgttatgactattttcacctggtttatcacaattttttcgcctcccttgtgatttttttcacctgttatgccctattcttcatatgtttttatatttttaactttttcgcctggtaatcagtgcgcagttttaagagcaacatttctatttgattacattcaattttatccttaatcaatttgcgcaagcattgcgcataagcgcggcgaaagcgtgggggggggggggggg

SEQ ID NO: 12624 - DNA, 2496 bp, Heterodera glycines
aatcagggttgttccgggttacccgaaacccgatacccgaaacccgaaacccggcctttttctcgacccgaaacccgaaacccgacccgatgattttgggtcaggtttcgggtcgaaataagcactggtaagaaaggggtctgggtgaaaattaggtggataaggaaattgagaattttttttgaaacgattgtgttcaatggaatcgaaaattttgtatttgtttttgttcattattagggatgtcaattttatgtaaatacatattttttttcctggattctccatgctctaaatagtaggaaaaacactttcttttttatgtttgcaaacaaaaatcgggacttttacttacatatttcggggttttatacatatttggtacatattttggactttttcttacatattttgatttttttttacataatttgcgggttttttacggaaagtttttggaaatcctcaaaaaaaaatccaaaattttggcaaattttttatttttttatacatattttgagaatttttgaaaatttttagaaatttctagtgaaaaaattttaaaaaaaactttttttaaatgtacccctccaaaaataattttttaaatgttacaaggtgattaaacatatttaggtcatttttatgccattttacgcctatttaacactttacgaaggttttttcccaaaaaataaccattaaaaaaaattttatttacatattttcgtacatattttgggtttttatacatatttcttacatatttggggattttttttacatatttatgtacatattttgaccaatttttgtacatatttttgacatccctaatcattattatcctttttctaaagatattttgtatgaatttcttgaatttaagcaaagcaaatggctgaaaaacctgctgatgtgcgttgtttcgctgaatttgcaatcccccaatttttctggtgcaaattccaaaaaattgtcaatctccataataagtgttccctttgtcttccaaattcgctcatttatcggaaattgcatggggtacagtatgccaaagggcatcgttgcattcggatggtttcggtattgttccacgccgaccacttcgtccgctgttaacaggccggacggaactgtaaaaattgaataaaatgaatagagaaaggtcaactgctgcttgtttccgggggattaaaaaatgtttattaaaatctccaaaagtcggattcccaaatgtcggtccccaagttgcaaacccccaaaagtcgggtagccgtcatagtatacgcaaaatttctgtttgaattaaatcaccccaaaaatcatatgtggcatatgatacggtgtgttattcataaaaattttaaaattatcgaaaatgtagatttaaaaaagattaaaagagaacaaatttttctatcaattgatattattaattatttaaatttaatataaataaataaatcaatattggtcatttattttgggcaaatcaaaattaaatatttatggccataaatgcgattttttatgttattttttatgaatttgtgatgcattcctaaggacccaaaaagtgagaaagttacatatttggtgtttgccctatttcttcacctaaattttaaattaattaaaaaatatatttatgaaaataattatattttattctactcgtccctccaaataaagtcaaatctataaaatttaattttcatttcgtttttttaccaatttgaagcgaaaattgcatttttggcaagagtgggaagcgaattttgaacagtgccgggccgagcatttgacggagattgtttgccgaacattcaatgccaatttgacgacattttgcgtcagcccaacggagtgccgaaaaaaacacaattaaaagaaatgaaaaatatttacaattattttattaaacatttactgctttccaaattgaaatttctccattgatttgcaattcttcgcgttccaaaatttcgcacaataaattcaggtcaatttgcaaaaattcctccgatttgagcaaagattccgcatttttgtcaatgtatgctaaacaattgtcggcatagaactaaatgaaaaaaattatgcacttggtcaaaaatcggaagtattaaatagtttaaaaagctaaaattatttttttaatatagcaaattgaatttgaaaaaaaatcggcgcaactttgaaacaagtgttagaaaaattaaatttctagctttttctagtaaaaacaatgtaaaaacttgtttttcttcttttgtattattccatagaagtttagcagaaaaaaggaataatttatgattaaccaaaaaaggcatattcagataaaaataaaataattaaattaaaaaaacaaaacaaaatttttgacaaaatatcaaaataataaaaataatgcccccacctccaagtcgaaaagccgagcctgagcacacgcaaagaaaacattgcgcagttttggaattggaattgcaa

SEQ ID NO: 12625 - DNA, 2487 bp, Heterodera glycines
  unsure (1)..(2487): unsure at all n locations
ttattccttcatttattcctcctttttcttccatgctctttctccattctcttttggcttttccttctcctttcttccatgcttttccttttaaaattcactgcttttcctcccctttcctccatgcttttcctccattctcttttggcttttcctcctcctttcgcttttccttttcaaactcctgctattcccccccccccatctttcctccttgcttttccttccccacccctcatctccagccgccctacgccctcctccgtttggccattcgtcaattcgttgttcaaaaatgccccaggggatacccctctcccccccccctgttgttcttctgctgttccatgtttcgcgtgaatatgtgatgggtgaggggggggggggagagaggacaaagtgtgtgttgtgttgtgtgggtgggtggagggcttagttccgagcattccgatcacttttcccccaaaacattcataaactttgaaattcccacaaagaaacgacgtacctgttctgaaactgggtgcagtcttcccatgggtacatttcacaattccctccccccggcagagagaaactaaaaaatttcattttcaaaaacggccaagcaccgatttttttttaaatgacgccttctatatcgataaagatttatgtgtgtattatgattctaatccattgggaagaggatattatggtacaaatttaccagaggtacaagtggtttagaaaagcattgtacagtcaattagcatggatagaggagttaataatgtcaaatgaaaattccgggtcagattttcgagtcattaaaaatttggacgaaaaagcaaaagtaaaaattcactaattggttgtccaaggccttaaaatttgaagaagataaacttcaaagcattaaaaacggaaatgtcatttcaaggcctcaaaaaagaaaaacgaatctttggggcctaattgaaattccaaaacttttaaacattttgtaaatgaattcacgttaagttccgaaattggatagacggaatttccggtctttaatacttggaatttaaaattcgtccaatttgtgccctaaataggccaagtgccatagccaaaaattcactttcccccccccccncctccatccacccattttttataacgcattcaaaactcaattcacttaagcatcccaaccgaagctttcacttcagtgtcccctcatgaggatgtgccaaattcggcataatgtgtgcccactaagttaagatggcactccttccccgcgcttttgacgtgccattcccccctccccctctctctcccggcacttccgttttgccttctccgctctccttttcggcttcctcctccggtgccgtctttcccaatttgtgctcatcgcccgttgaaagtcccgagcgttaaaaggcttctttttttacggtcgcgaagcatttgaccagtcaacagtctcatttatcccttcattttttgttctttgcctctggcgtccaattttattgaaatttcgaaactattatttcttcatccctctcataatttcgttaatttaccatcaattaccgttaattggcccattaatcattacacagtaatttggcaatgatgctcggtgcccaggcattacgcacgaagcaaaaagcggaaaagcgggagaaggagaagcgcaagcagaagaagatgaagggactgaccaatgaacgggagaacctccagcgagcggcaaagtgtgcaatttacttgcaaattagcagcatttgtagcggagcaattaataaaggcctaatttgtggcccaattagtttatgcgacgctaatgggacttcatgtactttaatgacttttaatgctttctcatgggataacagagaatttaatgtcccttccaagctattcacatgaccataagccaagcctcggcacataattattttggaagattgggggaatgtttataactcttgagtacattgcgaactgctaatgtcgccaagggaatgctaattgctataggagaagaagctctctcttcgatgggagagggataaagcccagggagagggggcggaggggagttttgttttagaaaataaagtgcattgagagggcacttccactttttttgaaaaggtttccaatttcaatctgtttccttggccatacatgaacgtgggatgggacccaaatttttgccaaccaaagggtttgggggggggggggggtcagcagcggccaattttgcgaaggggtcgtccggccatgatgtaaaattgacgacctttttatgttacttttcaagccgcttttttgcggtatcttttttcaaaaaatgtttggggaacagcaggggccagggtcaggcggtgctgccgagaaaaattttgggtttttaatgggtttgttaaaaaatttgcactctctacccctcgctgcgaagatgtctcccattttgaggcaattttcgagcgaggggggggg

SEQ ID NO: 12626 - DNA, 1575 bp, Heterodera glycines
  unsure (1)..(1575): unsure at all n locations
agtgatcagatatgagtggggaaagacgaggagagactngggccancagagagaatggagagggagagagagagactcagagaatggagagagagtgaagcaatccatagaactagtgatcagagtggagaagagacttttggaaacagagagagtggggaagagacatttttaattttcttttttttctctattttaacctgattttagacttttagaactcaatgtttattcaatttatgcttgtccagaataaggtgaaataaacaaaaaaaaagaaatgatgaaatttatttgatatgcaaaaaaatatatatatgaaaaaaatgcaaaaaaagggctcacaaaatgtctttaatttagtaatgatttttaaaaatttaattgaaaaattcgtaaattgtcgatttttgaacaaaatttattagcataatacttaatttggatttggccatccttttgttattataatttttttctaaatttgctgtgagccctgtgtacaaaaagcagcagagaggtcataaaataaattaagtaaaaacaatcaaagtattatatgtagtaaagtaataaattaattatttaaaatttcttttgatgtcaccgctggcattgaatggaatcgaaatggacagctaatcgatcgaaactgaaaaaacaaatgacaattagcgaagcaagcttaatcagaggccaattaatgggctaatttgttgacgagaatttggcctaattcgacttattagtcaaagccgagaaactttgaccaattctcagacaattttgatgtgatctcgagagtcatttgccaattcccgagtccaattatcattttggaattcaaatgtgatgcatatttctctacctgagcacgtcatttcttcgccattcaatgattgagtcacggaacagctcgcacactttctgtttgtcctccatttggatcagattggccgaccgacaccgttcgtaatgacacgcggcgagacattgggccggcctgaaacaaagagagggcaaattggacgcaggagtcgagagcgaaattaaagaccaaaagccgagactgagaatggccccaaatgagagagaactgaccacacagactcaaggtcgagaatgaacttagagagtcaagaaaacccaaaattggacaagaaattccggatcaaacttaaccccgtattgggaaacaaaatgtgagatcaattaaagcaactgacgaatccacgagcagcctcttcagcagtcgtcccccgttgaacacggtttggtagagggccgagaagcgacacggtcccaccggtgggtactcaaatgggcggtgttgtcgttgttccccggcttgtcatcgttgagtttgttgttgagttcgctgttgctactggccgttgttgttgctgttgtcgtcgttgttcttgtcgtatccgatgccgtttccgtgggtggtgttgctggtgctgctcgtcaaccccgctgctgggtgctgctgggtggttgatgttattgctgctgtgtgtgggtgtgctgctgaatggtactgttcgattccgccgaaatgatggagaggat

SEQ ID NO: 12627 - DNA, 4467 bp, Heterodera glycines
  unsure (1)..(4467): unsure at all n locations
aattaaggcccgcttggactctttaatccatgcacttcctggcgcattggttttgacaggggnggnggnggnggcctatcagctgacaatgcgacgggcgaattgggcactgacaatgagcaggaacagcgccaacaacagaacgatgctcagaatcagcagcagcgaaatgaacaaaatgaataattatgaatggaattttaaatgtgttaattgtacgcggtgattattcatttatttctttatttttttgttattttaaatcatatttttttcaatttttggtttctattccctttatttattttattgcttccttggctttttcaaatacaactttttgccagtgaatggaacaacaaattgtacgtcttttgggcgaacatccggaagaagggctcagcaatgcgcgacttcttcaaggtgtttgtgctgttgttttattttgctccttttttaaacgcacatttattgtcaattccgtacaaattgatacttaaaatacggggtttaatagttgacataaatatttgcgtttcttttaccacaatttaagcggttggcgatgattctgcggatggtacggatgcttcgtcctctgtcactgaacagctcggagcagccatcaaccggctgttggcccaagggaccatcgaaatgttacgtgagactgtgccaacgggcgaaggtgttggcggcgccggagggttcattttgaggctaaaacgaggcagtcagttgaacaacgccagcccggaggaacaattggtcagtcttgggaatgtattttttgccgttagtttttcctctttattttgttcgcatcctccaggtattctccatcattgaagagtcgcagcggatgggcgtttggatccgcgacattcgcgaacgttcgggcctcaacgaagtgcagctgaggcgcgttctgaaggcgcttgagcagcgaaaattggtgcgaagcattaaggcggccggcaccacaaagaaaacgtaaaattcggcgcaaaaaaacgaaacccaattaactaaaacagttaatttgcgtttaaatcgcttctatttttcaattttacaggtacattctgtccggtttggaggccgacgacacactgacaggtggcactttttactcggatcaacaactcgactcggaatttgtccaaacattgctccacgtctgcgtcaattggctgctggtacatgaacccaaaatttctataaaaacagtttcttttgtgtccttttatggttggcccgccgacttggaattgcttaatttttctcggcagttccatggcattcgaacattacttaagttctcattgtcagaaacccaacaatttttaattttaatttatcgctttttaaattttcctgcgcttttcagcagcggcgtcgcgccgcggaagagaaacacccgggcgacccttacgcgcagagggaggcgtcttttgtggagtcggacgaagtgcggaagagccttttgcacattttagtgttacctcaaaccaaaggatttctatgactaacaaaaacttattttaggcacattacttttcgctcgtctatttgttgttttttcaggtcgcccgttatatccacgaaaaaggcctttgtcgaatccaattgggcgtcgcggatgttgagaggtgtgcaataaacaaaacaattaaacaattacttctcacaatcagtgttttggacattgctgtgctggacggtaaaattgagaagcggttgaaccacacatatcggtaaatttttattatctcatattgtggcgaattttttgcattgatttcgtcacatttttcagtgcgattcgtaagcagcaactccatccgtctccgttggcttcggtgccctgtctgcaatgtccggtcagtgccgagtgcacccccggcacaggccatctcatctcgcccgaaaattgcgaatatttccgactccattttgatttatgacctattgtttgttttagttgttgatttatcatttcttttaacttattgcctcatataaatcttcgttttcttttttttgttgctttgttttttacctttaatttaatatttaagtttcatcatttttcatatcctttttatatttctccgctcttttggtcctcagaatgtcaacccatcgtttgctcccgtccctcccgcgtttaaaagtgccaatcggacatcggccgcaacggcttaaacttccgtacattcccaacccgcgtgggcacttggaattggtgcgcaagttggtgaacagagtgatcagagaagaacggtgcgaattgaagtacaatcgagcggaagagtgccgtcagtacgtggagagggtcagtggcacttggcaactatttgctgatggtttcaaaaatttcacagctcatccaactcggcatttaccgtggcccgaactgtgcctacaccgcggaaatgtttcagtggtggttcattgagcaggatttggtcgacaaaatgtggtctattttggtgccccgtttttcgcattatccaatcgatcagtcgtacaccgaaatctatcgattgccgaccattcgactcaagtcgaaagtcaacaaagagacagagttctggaaccgttactcaattgccgttctagaactgaaaggtcgagaaactccctcatcatcagagtttccatcataattctgattgtgttttatttagagaacccttttccgccaatggatgacttagaaaaattgcgcaagaaaaatctggtcgattatgtggagaaggaattgctgaggactgaagaataataatagacgtcaatcggaatattttattgtttcctttccatcgattattatgcttgtttccttttttggatatacatatatccgaccggaaaaaataaaacaaggattcccgaagtaaattcagttttttattaacagagataaagaaatagtacaccaaaatgagaggtgtgtttttctctgctctctctatttattggttcatttctcttttcgggcactgtgttaagtcaatttcgatcatttacagtattttataatttttaaatagcaatatgcttgtgcttttttttggggttgggactaatttagttgcagcgccctttaagtattgttgtcagttgtcactccctccctctgttatgccttcactgcgtcgtccataaatacccacgtcgattgacctttcccgtcattttttttcttttttaaaacttgttttctcattccattaatattttttggtttgattattcctgatttatttttttgcggatggggcaactattctcttatttcaagtctttgtttggtcatcgggaaatgcgaatactaatattgggcctcgacggtgctggcaaaacgaccattctttacaggcatttttaaaattgctacagaaaaacacaatagtgggtggattatgttttgtaatgggttggatttaaaaaaaaaacaaagtttcgaatcggtcttccactttccaatgaaattgaagaagaaatctaaacaattttttgaacatgaaatttcgaaatattaatgccttttccttgttcaggctgcaggtgggcgaagtggtgacgacaattccgaccattggctttaatgtggagcaggtcattcaatgtcgtccatttaaaataaaacagcttactttctctctttttaggtgacttacaaaaacttgaaattccaagtttgggatttgggcggccaaacgtcgatccggccctattggcgctgttactactccaacaccgatgcaatcatttacgtggtggattctgcggacagagaccgagttgggatttcaaaacaagtgagtttcgggtgacaaaccctcacaaaagtttggttgcgataattgtaattcatattcaaggaattggtgtcaatgctggaggaggaggagctgaagaacgcgatcctcatggtgctggccaacaaacaggacatccacggctgtctgtccctggcggaagttcacaaggcgttgggcttggaggtctgtcgtccaaacttatttgtattttatattttcaatttaggcgatacgaaacaggacattccaaatcttcaaaacctcagcgaccaaaggcgacggactggacgaagcaatggaatttcttgctgcttctcttcaatctgccaaatgatcagaccaatgcataattatttccaattattgtattacagatttttacgttctcaatttatttattttttgcttggtaaatacaatgtcattcaaaatgttgaattggtatttagtatatataggtataacccttttatatttaacttgtgaagagctagcgcaactaaaattctcccatattaaattgggttcatttaccgtttattttaccagagacaattttcttcactttcaatgtctttgtggcgttcaattgggtaaggtacacgcgttactcgcaggtaaaaaggctcaaaaa

SEQ ID NO: 12628 - DNA, 2107 bp, Heterodera glycines
  unsure (1)..(2107): unsure at all n locations
cgaaacgctnttttgtaccaatccgccggttcgcatttttccaatacatcggccaatgtctattaaataagaaaagcattaaaaaactgactttcattacctgaatttccaactgctcgattataaaatttgccgtttcagcatccattttgttcatttccgctccctcaactttgccatttttacctgccatttcatcgccaatgtcttcttcgttccctttttcactttttgcttttttatttctgaagctaacggaaccaaggatcactaactaaacgacagcaaacattaattctcgttaaattaataattacataccataattgtgttgtatacgataaactgtggaattttgcttttgtcttccaaattatttttccacaatgaagtttccgctttttgtctgtccgatgttgagaggaaatataaattgttgcagttcaaatagcgtcgaagttcactatcggtgacatgaacggatggaaagtcggcagcttcgctaaaaacaaattctttatttttttcaaaactcccccatcttttcaccgaaacaaaagttggtaagatgctcggaaagcattcataaaaaaaaagtccttttgctgcagttggtcttccattttgttagtttgcgagaagttcagtgaggcgagatggttgcgcaggtcaagcagttctttgtaactggccattgtcttcactatgtattggtggtgtgcataacgctccttagaacggacctcacgcacacccgcggccaacaaagaataagtcgttttagtgcgcgattccttgagaaaaaatgaaacaatgggtcaaaattttaattggcaataattaccggaacgtattcgtgcatcagtgtacgaatcacttttggattgggccaaaaacgggagactggattcagaaaaaaactgcatgctctgataagtaacagctaaaaaatgaattagttttatggcaatgccaagcgacgaaggaccgaccatatctctctcgcgttgcgtgaagcgacttcggaggtacgctttgtgctgaaggctaagtttgtccacagtgtcatagacgcggcggtcttttttgttcaaatgtcgtaaattggccactgaacttgggaattgctcctcttcgttctgtttaatttgctccctctctttgtttaatcttcgtttttttacgccttgtgttggtttcgtcaaccgacgacgttttgcagaatccacgagagaatttagcgaacgctgtgaaagcacagaaatgggtgtccccgctccctttttggtgtatttcctaaattagtaaaagcattaaatccattgacccaccaaaaacatactgcatcgagattcgctggagtgtgttgaatgttttgttaagtaatgacgcaccaatttctttttcctccacttcctcctgcttcaaatcggatgtatcaacaattccatcgtcactttttccgcctccattttcggaagtctttgcttctggctcttgtttaaggcggacgcccgagggaaaacttttgctctgccctttgaattccgcttttatttgtttgagtgcttcaaaaatgagtggatgttccaaagtttgtattttcggagctgtgatcacgtcgacagagtttgacaatcctcgctcagttacctccaatttcatcgtattaataaaattcttttttgctaacgcaattatacactttttcaaggattttcgatcgaccttaaattttcttttggctgataatataaatgaatccttcgntnatacctnataanaatatccttctttcctttcttctnctnatatatntacttcaattttntattntnttattacanctttttcctngtaaacatattcganaattcnaaccaatctctttaaaatnacntcacttattcncaanntacctntaattaaaaaataacaatnanaaacaattcttnactntttnaaataatcatttntctncacaaaattncanatnctaaanacncacttaaattatnctgtgtaaaagttatanattcnccaantttntncgnncattcgcccctagcagggttgtttaaatcgtttgtaaaactcggccaaagca

SEQ ID NO: 12629 - DNA, 1933 bp, Heterodera glycines
tattaggtaattggattgcttaattctaatttttactagagaaagcggtgtttgccttccattttttggaaaacaccaaaattggtcagggtacgttttcatcacggcgtggatggaatttgaaacagttcgattactaaattgattgaattaattgtgacagttttcatagaacgaacccagccttcgttttggcatttatcccaaagtgcttggatatttcatatcggtcaacgccttccatccctgaatgatatatgagtgaagcaacaacatccgtttgaggtctgtataaatgcagatatgagaaggaagaatggtcatatgccgaaaaaattgaaccttaataacaaaattataatgaaatgagtgaatgaattgttaccagtgtttgaagcccctccttccgcttcatcaacgccgactacttcagtgaattcttcatcagattccatttaaaaatgaataacaataaattttgtgtcttttcagcaagaatgaattatttggtgttaataataaaatgcaaatttaataatttttaaaattagtttcattagacatcgacattttgaaaaaagttggacctgggttccattttggacctgggcctgaattttcgggagaaaaactccaaggaaaatacaggtttaaattgaaaaaaaattggtcaaatgaaaagttttgtcaaggacagatttttcgtgtttaatctggacctgggcctgtattttttttcatatttgatctacatacctaaatttcctgggcaaaaacaaggaaaacccagctgtcgaaaaatagcatgtaccagaaaaaatcaaggcctggatccaggtcctggtcaatctctagttttcattggtttgggggttcgctgcaaaagcaaaaacatgagattgaattgaaacctttcttaaaattttattctgtcaatcttaaatttatacgcacaattattatttaacgaatttatgtttacatacataattacatactttttcagtttatggattccttaatagtaacttctcttgtatttgacatcgattcattcgctagaaaattttcggccgaacaaagtgacttcactctaagtcgcttttcagaaatttttatggaaatggaactttcaagcatatttcttggtcgcttttctttttctgacttggttgaggtatggaatgcgttctctttcaaagtttgtataatatgacattgtcgaggggttttcgcgaaatccggaaaatctgaatttgcgacttttttaattgaaactttacttcctttttacagttttctgaaaatctgttcatctattgctcacgttttatgttcaccccattttcgagcactggttctgttggaaatggtgatcagattcatttcaactcagatggaatgtcatccggtagaattgcggaccgaaattacaaagtattttttccaagtaatctttcacaataaaaattttcagcaacgattatttggactttttctgtgctacagtttttactttcttcaaccttcgcaatacgttgttccgatttctgttacttcttctcagttggatgatttctatgaatttactagctccgttcttttacctgaagagaatttcgaggctctttattgtttttaccgtcttctcaacgcaaacgcattctcaattgcccctgttttgggaaatgtgcgttttaaattgttttggattttgccttttccttcagttcaatccgcttctccaagggaccttccacccgaccctcctcgacaaatcttagtctgaatcgagtggtatcgaactcgtccaagattttggattacttttttctctgagtaatagtgaagtgaagaaggtttgtgtttacaattaggtgattaatcgttaaaagaagaaaattattttagcaatcggaatcgtgcaccagcg

SEQ ID NO: 12630 - DNA, 2291 bp, Heterodera glycines
  unsure (1)..(2291): unsure at all n locations
ctctctccccctttctcactctttctcactctcactctctctctctctgtctctccacccatttatcgctctatatccccctcgcactctcttcccctctatatttctcattttctctctcccacccgctttctctctttctctatcgtgtgctattctttcactaattcttcaaaaacgcatttcacttgccattggccaaacaaattacataattttgtatttttaattttccaaattatcattttttataatcatataataaaatgacttttccatttccctgttttatcctttatttgctgcttcccatacgttctcatcggcactttgtgccatcattgccatcacccattcgcttctgatcactttctccgcgtccaatcgttttgccaccgccgccgtaagcattccaagcagcagctttttagcttctgccaaaaatacgaaaatgtacttttcatttttgaataaagattcatttgacttgttccgatcggactccaattggggtgatcgaaagtgaattgtccatggacaatttgctggaacaattgggccctttccgagctgtgaaaaggcgcaaagccaaccaagccttaagtggcgacaaaagcaatgggaagaaaaggaaaagtaattacaaatgtgcagaatgatgcccaacgaccaaatgtccaccgccacaccgtaacctaagcgaaaaaacagacatacggtacggtatttggacgatttcggtgggatttacaatacaattggccaacggaaacacctttctgagtgagaatttcgggtgcgacgtaagttggggtcccacagactgaaaatgaaatgaaaaaagcagtgatttaaatgttttaactgcggtaaagcgggcccagaaaaaaacaggcgaggccgaagtccgtcagtttggcctaaaacaaaggcacagacttaagcaatttccgatcaccgatcagccgaaaagtacgcttacggtggagtcggccccgagcagaatgttttctgaagttgaacatggtattgtcggcactgtttgtgttggacactgacccggcttcacgtcccggtggacaatgcggcggcggtggagaaaagcgagtgccgaagagatttgccgagtgatttgcgcggccgaacgttccgacagtcggccaatgcgtcggatggtctcgaaaaggtcgcccttcttcaataaaggcattcatccacatcatgatcagtgccattttaagctgattgactctcttagcacctgggcataatcgaacagaagaaagaacgcccgtcggcactcaaaggcgtcgattagtcggcaaatgtttctgtgccggcaccgctgcagcagtgcaacttcattctccacaaaatgcaatttgcttctcattcgttctttgtcaatttcctgcggcgtaaatttcactgttttaatttctttggcaacaaaaaacgcactttcacagcgtatttttcgcctttctccgagctaaatacgagaaaaacgtcggagaaattgccttggccaatttgggagaccaattcaaaagttttgtaaaacatcgaacggtcggaaatgcgagtgactgaatcggggcactgtngtgaacagacggacaacaaattaatgggccaagcgcaaagtgccaaaaagagtcatggcacaccaaccgataaaagcttttcgttgcgatttcgctcctccgagtccattcgctttagtgccattcctccgcccattctccctttgtatttgtcgctgtcttcgaagtcgtgccgtggcgaatggacccttcggcccaccgaatttgagcctttcatttttaaatatttctcttcccttttcgcttgtcattcattcttttttgtttcggcatccctctgactttggcacttccctccccccccccccccaatttcgccacctcttctccaatttcgttcgcctgcccttcccttcgtttgctgcattttctgctgattcccttcgccggtattttcgtccatttccaaagatgagatttttctcgctgttcgaaagtcattccctttgtttgccgttgcatttttcgcgatttctgctgacattggtatattttaaggttggaaggggtgaatttgtccagacgaaatgtgaattgtccaatggtcagaaaattgagccgaatggcgtggggggggggagaaattgctgtggtcgacggtgtccgccgctgccgggccaaagggtgccgtccggtggtcgtcagagtcatccccgggcaaatgggcgtaaggggtggtgtggg

SEQ ID NO: 12631 - DNA, 823 bp, Heterodera glycines
cccccccccccccccccgcccaattcctttgaattcgccccacggctctttgtccaatgtttgtcgcatttgaacaaagagcaaaagccaaaaacaacatacactatgattttctgttaaaaataatcatcagtcgacaattaaatggccaataaaataaattcgttcgtccaaaatttctctcattttttttttgcctgttaaaggaccattcattccaaggcaattgagtcgccgccattctgtcgtcatgggaacacaaaaagtacaattatttcgacaaaagcatttgcagaaggacggcatgactttagtcattcggcatttcaactttaaataaaagtagtaattaaaaagtaatcaaatcggtgctcttcaaagaaagcaatttcattgtcaaggaattagacaaattaacgggaatctatcaaaattccaagaagagttaatggacgtggtaagtagtgaaagtgatttggtggccacgtggcaagtgccaatgagtgacaaaatgcacaaaattgaattcgaacacggcacaacgacgggaaaacgaattttgcgggtggacggaaaggttcagggcatgtgtaaagattctgaaaaataaatgcctaaaaatgccaggaaatcctacgacacgaatggatgttcaaattggtgggcagggaaatgttcgaattgaacggcgttcgctgtgcggtcagtgctaaggaaactaaggcaaatgccaaaacaaacaaaaaaacagattaacatcgatgccgcgggaatattcgcctacgaatattcgctgaccgttggcggaaaagcattcgaaaaa

SEQ ID NO: 12632 - DNA, 908 bp, Heterodera glycines
aaatggaaatttacacaaaacactgtcgtttttgttgattaaactaagtttagggcgaatttgcagacgaaggcaccaaaacgcacttagaattggccacggggagttcggcatacattttgtcggagagcagcggtaaccgccacatcggaatggtccaccgtttgttcgtcaacgacagtttggtaaagccgagcgaattggcggacgaaggcgaagagaatgaaaaaccgaaatgagagaagtgtcccattttaaattaacaaacacaccatggagaaagaaagacatcatgaaaagggatattacttttgtttatctctccaaataaatacaaaacaaaattaagtcctaaacattgtacattttggtacctctaattactcgtcataagtaaaatagcccttctttaggaattttgtgaccgaatctatgaaccttttcggttgctccgcgtgcagcctgaaattttaaccaataaaatttaaaatgttatttttactttttttctgaccaatggcccgcctcggggatttcttcaaagttcgcgtgggagaatatttttcttaacgcaattttgtcgtcctccagaaaatatgtagaatttgcgccgtgaagaaacaaagtcggcatggtaactctctcgcgggaaatcaaagggtcgaaaatatgttccaaattgtcagacaatgcgtccaaattgcaacgccatttgaagggaccgcctctgcaatttaaaaaattatttttaggattaatggaaacttggacaaatcaacggaaatgccaatgaaaaaacaaaaaattaaaccttggcttatataaatttgtgagaagaaatgctcgaatggtttcttctggaatttttgactaaagcgatcggctaatttcgcttctgctcaatcgca

SEQ ID NO: 12633 - DNA, 5063 bp, Heterodera glycines
  unsure (1)..(5063): unsure at all n locations
tcggatgctcagcgtggagatgagggagaagcagcagcgatcggtcactttgaacgatttgggcattgacatggaccaacttgcttaggcctaggcttcagcttaggcttaggctaggcttaggcaaggcttagactaggcttaggcttcagcttgcttagacctaggcttaggcttaggctaagcttaatattgtaagttgccttttgtagaggatccatatccgtattcagcaacttcaaaaacccctaaaaatatcgtaccaggtgttttcgacagtgattgatttcgacagtagttgatttcgacagtacgacaaattccttgtataagatcccaaatgggtggaaaatctgtcaactagtgtcgggtttcagtgccaagatgcaaacctacaggctctagcagaattcgaaaatcgcaaacccctctgcaatgtataagagcctgtgcttatccttatttaacgaggcctataccatttagaacagttttttaaaaacaagctttactgtcgaaatcatactgtcgaaaccaacactaaatatgtttgcattgtaatttagaatttcgactttttgttcgaattcgggtccgggtttcggaattttgcaaaaaaggtcatattcgtgatcagcgccttaaattaccctagaaacgaacttttatttgaaaatttcagggggggggggtcacaaaacagaaaagtaccgtaatgtgtacttacttagataggcctaacaacttttttatttgaatttcaatgcccttaaaaattaaataatttttttttctgccgttggaaagaacaattatttattctttttaaattgaaaagtgtctgtgataagataaaattcaatttgaattcaacaacaaattcgccaagtcaaatctcccaaaaattctttgccgatcgaagtcatcaaatgttcatgatttgccctgaaaaggcacgcaaattgagcacatccaaatgcaaaattaaattcttaaaataagctcgagattaaaataataaccaaaaaaaaattgaaataattaagggttttttaattgtttttcgtttttggtataaaaataacaaaataataaatatacaaaattacgcctatttcgaaaaatcttgtagattaatcatgtaaagtttaatttcatcaacaccatgtcccctcatgataataggaaaaatcattttacaattgggaagaattggttggctcagagcatttggcgaaatgtacaaaagaaaatccatgaattggtccatgtcaatgcccaaatcgttcaaagtgaccgatggctgctgcttctccctcatctccacgctgagcatccgatcgatcaccggggagaagcagcgaagccgagcagcggacaaaatcacctgaaaaagcggatgaaacatcacaaaaatttaaaaaataaataaaatgaaatacgaatttataatattcacctttctgtcaccgatttccaccataaaatcatcgtccggagagatgagagattgatatgaacttaaaaagaaaaaaattaattaattaaacgaatgaaacagattgattaattaaacaaaatcaattagtaaatgcatttttacttttccgctgatttgtcctttttcttcaaaattctgataacaattgaacataaatcattgaggccatcgaaccgcacatttcacccctaagaatggcatttttgtgggggaaaaggcaaaacatttatacaaaaattgattttttttaaccatcttgacaaatttttatgaaatatagtaaattttgcatatgttttcttatatttttgtggtttagtgattgttgcttcaacactgatagcacttttattatgagttcgagactggttgactgtttcctttttaatttatttttatatgattaataagattttttaaaccaaaaatacccattaaaatcaatcatccttggcataatttatagacgtattgaacccaattttattttcattaaaaattcaattttttgactaaatcatgaaaatttacaaaaaaattaaaaaaataaaatttaacggaaattcataaattttgggtgaaaaaatgttacaaaatagaccttaaatttcaaaattcgcccggcgctgcctatcggcatcgccggcccctcaaaaaaaaactattttttcttaaaaaaatttgacccaaaatcgaaaaaatctatcattttttggacaaaatctgttaacaggcccatccaaattttcaaaatttttcacggcggcgcctatcggcaccgccgaacccatttctcctaaacgtctttagaaaaagagcgccgcaaaaaaaaaagccaaaaaaagatttatacagattttcgctgaaaattggccattttaaatgccttaggtatgtgcttttaattaattctatacaaaatatttatgataaaaaaaataataaaaagcacataaaattattattacgaaatttaaatatttttaagcaaaaatttataaagttttttgactatttggcataaggcaaaaattgaaaaaccccgaccccgaaccccgaacgatttggcaaccccgaccccgaaccccgacacttccaaccccgacaaccccgaaccccgaattttcaaaccccgacgtcggggacgcaaccctaataaaaatggtggcattgataccgtttttcataaaatagtaccccctgggcttaattttttcaaccatcctaaaaatggatgggggtgactatttcaaagggggactgtattttaacaaatacggtaatcattgtctgcttttccaggtatatgttccccgtgattccgcttttgcccgtctttatgccatccgctgaacaacttttgcttgccccaaccccatacagtaaaaaacaaaatcaaataaataatgaaataaatttgttttcaataaaaatttgatatatttttgaatgttgatgggttgatgaattattctgcgatataatttttaaaaaaacgtttaaattttaacaaattaatttaattatttaaccgcggttcatctaaataaatttaactaaatacatttagtcatcggtgtgccggcttccttcttcccatgcaagggcattcaagtcccgtcagatgtgcttctggtcgatttggacactaatgagatttgtccacccaccgatccaaccattcgaataccaaaaatgccacagccggaagcaaataatttaagagtacaaaaatcaatttaaaaataataattttaaataataaaaaaaatttaggaagaatttttgcggtcattgggacggcaagctgttgaacataaatcaattgactctgaacaacaacagcaaccattgaacattgatggagaccaaattgatgtggcctgcagagtggctatggtgagaaaggcatttttttgattttttagaaattttatataaaatttcagatacatttttacaacggagcaaatatatttgcaaatttcagtgaggtgagatttatattttaatggaaaatgtataattgatataattaacaaaaaaaatagttaattaattacagtcatacccaggaaaaattcatttgggaattataagaactgaaaaaaaattttccaaaattttattgttacataagaaaaaagtattgttagtttgtccaaaaatgactcagttttaaataatattttggtcagatttttaaaatttaaggagaattagtctttcggcaaaaaaattgctatacaattttcataataaatctttttcttttatttttcaaaaagtctgtaaaaatttaaaaaaaatttttttttcattctttttttgaaaattttgggttttttaatttgtaaaaataagaaaaaaaacaatttgaaagaaatatattttcaacttttaaaactgaaaattttagtttttaacagtttttttcggtggggtggggcgagctactcaattgttggattagttttttaccttattaattaactgtagcatactcgtacaattcggctttttcctcggcctgttgttgcgcttcaggcggactcttttttgcgaagtcggccacaccaaagtgaattcatcatggatttatgcaagactcaggccgtggagtatgcaaattattttaattaatttaaaatttaagctaattaataaaaatcattttgaattaaaaacggacataaaaattttgtaaatattattaaaacagaaatttaacagatattttgctgaatgttcactttgtccagccaacgaagcatatgtacgggtccaagccgggtgtacgcaagcagtacaaattggggataaggacaatggttctcgactcgttgatgcctgtctcttttaatgtacagtttaaaaagtttttgttaaaatttggatagggtccgggattttgaaaagcctgaaaattttctaaaattccccccccccccctcttcaccgttaaacgcccaccactttctttaagaatttttcaaaccaatttcttcaaaaaaatattttaattttttaacaattttcagtgaaaaattaaaaattagcttacacttataaaacaaaaaatatcttttcttccgatcgaaaatctcatattgatttttttggggatttctcataatttataatttacctaaaaaagcaaacaaaataattaatttaaatacattaaacaaaggcatatccctatggatcgtcactggctgaggccatttttctggcacgtattgaaagcagtcagcaattgttggacagaacagactcatccggcgattgtgatgatgctgattatcccgcaactgcgacgcccagcgatttggaatcaatcggttccgcggatgccggcggatggtctccgtttggcagcagatccccattgaatatgggtgtgtttaaatatatttttgaaattanattgttagggatcggatttatattaaaaaaaataattaaatttttagggaactgtatttttccctcctctggagatatcccatttgcattagaaaaaaaaattaacaatttcgtttggagcatggagcaaaaa

SEQ ID NO: 12634 - DNA, 3265 bp, Heterodera glycines
atttgccattgagcccatcctcgtatttatcactactctcattcttgcgatttcagttttgttcatcattcttcccaattcttcaaattcacctgtcctttggcattgtctctgtttcttgccattctctcctccctttgattttgtgataattgccgtcttcttcctctattcaaatttatgctcccatttaaatcgccatttccattttcaccttgctcccttatttttgggcactttaatttcaatgttcggtaatggcattcctcaaacgcaatttgttgcataaatgaggccattaaaaggggaattagtgagttatttgttacggtaatcacatcagtggctaaaggaattaactgatcaaaacgatgtcatgacaactcgtacaacggcttaagctaggcctaagctttagactatgcctaggcttgcttgggcctaggcttttgctttatttcgttaaattttcagagtacgaatttccattgagtcctcaaaatggcaataatggataaatgataatatttttcctttaaaaatttattgtttgatggaaaatgcacggaaaaagcgacaattttcctctcctcacagcgaaagcgacgacacaaaagccaagcgaagcgaagcaaaagcaaagccaaatgatgactcatccaatcatttaatcatttataagcatttccaagggcaaataaacggagaggaaaagcgagaaaaaatgtttggagcggagacattttattgcgctttattttgatgaattattcacacccccagcagaaaagcgaatcgaatcgaaacgttttttattttaaaatttaaatgaaacaaaaaaaatacaaaaagaagtaaaataaaatagtgagaaaagtcttagaaaattcaactggaaattaatcattgaaaggtcgataaatttaagcggagaacaaagaaaacatggagaaaaggacggatggcattagaggtaataaattaagtgattagtcccttaattaagtgattagtcccttttactgtcaattggcctttagctgatcatttagccgaagaaaggcgaacgatggaaaattggaaaagaaatgctagcgaataaggggcgacccgtttgagatggaatcaaaaagaaaaacaatgccgtaaacggaatgccaaagtcagagcgaaagccaactccatactacggattcacaatcattaccagccgagagaaggaccgcaacttaagtgaaagcttcggtttcaaagtgttaaccaattaagaaagaaattgaaaattggccagtactgagttggcggttcggagttggcctatttcggggagaggaacagaagccaaaggaaatgctttagtgtcaacattggcaccacaaaacagagcgccagtgccttttgtgagtgggtaacccatttctacggaataaactgaaaaattaggggggataattaattttcttcccagaatagtcttcggtttgtccaatggtcactctgtccggtggctttaattaatgtgttatttctggtgcctatgtcattggtcgtcgctggaaaaatgcgcgaaattgcggtgccgttggagttggcttccgctgccaatgctttccgaacgcgcgacgagccccgggccgctggcacccgtcgacccgtggctattgccgccgtaaagagacaatgaggagccgttggtggaatgtttctgaagataacggcactttttattcgaaagacggcacgcaccctgcacatcggctttggcagctcctcgcaagacatggacaaactccggctaaccgaacctccgccgcaggattggcacgaagtggctgaattaggaagccgaatgatcacaccacattcagtaggcgattctcgttaattagccaattaattcctaattgcaattaaaaatgcacataatgagccggaggcggtgcgcctacgcattgcgccatcgccgttgccaaaagttccgaagccgcccccactagcagagcctaaatgatcaggcaccaattagtacagctggtcctaaatccattttaatctgccatttctcacccccttcgctttcttccaaagcgccgtcgtcgacgcggagaatgtcatggaaacggacaggagaagagaagatacggcccaaaatgacaatggcagtcagaagggaggaaagagtgcagatcagcaggaacacgggaggcacaacgacaaactgaggggaagagaaggagaatcagcgaaatagcaggtgaaagggactgatcaacgcaagagacacagacagacagacacagacaacactgactgactgatcgaatcattttcgggatttgtcaacaccaaagaccagaattagatttgtcaaaaatcgttgacccttttaatgtatttgaaaatgatcgctccgctgacccttttctgctgtcgattctcaccagagaaaggagaaactttttgcggtgctgctgccaagcgtaggaatagaaaacggtgagcaccaaagtccaaagggcgagctgcgcctgcacaatgtcactgatcagagagggacgacgacgatcctgagtttcggaggaagcctaaagggagggaaaaaggaaaacaaaatgccaaaagaatgaataaatgccaatgccattttgacagactcaacgaagggacggacgagtgaattcacatgaaaaaccaaaacgaacggagaaaaggcactgattgtttgatatttgacaagacaattcgataagagaagccaattttgcaaaacgatttgtttgtttatcaatcaataacagaacggactgattaatcaataatggaacggattgattaatcattagaacggactggtcaatatttaatgggacggactaataaatcaatatagaacgtaccatcaaccaatatttaatagaatgaactgatcaatcaaagacggactgatcaatcaaattaactaatcaatattaaaaggtgactatttgatggatggactgatcaaagaggttgatcataatattaataagacggatgatcaataattgttcaataggacagactgatggatcaatattgacaggatagactggtcagtcaatatttaatatgacgtgaataatcactatttgataggacggactgatcaatcaataagcaattgaaagcccacctcactaaggcacgtgctcagcttgtccaattcgtctgacgagcttcgcatcaacggttcatcctgagaaagccatccctggaaaacataagt

SEQ ID NO: 12635 - DNA, 4795 bp, Heterodera glycines
agtcactatcttgtgctgacacgtaacccatccgggcaacttcaggtacggacagtcggatctcaattgtttccaaagcgcttaaattattttatggagtcatataacgatgcaacaagtcaaccgtttagctacctggttataaatatgcatcctaatgcacaggaaaatgaacgtcttactagcaaaatattcccggacgaacgcagagaaatctatttaccgagcgaataacgtattacactaaccgcattggctatataaagacatgaatgtagaaaaaatccaaaatgtatcaatttagtccttacgttagggaaaatacagatttttttaaaaagcttgcggccactaggtctgataaacgaaaaaacgagctactacagggagcatcagcagaccaaatacttgcccttgtggaaatttgcgcaaatattttaaaatttaattttcgtttaaattcaagccagaagcgacggttgtcacaatacgcggactattacagggccatagcacgcgctcgcagtgagaactcagctcggcaaaaacttcaacaagggagcggaattgcccttggtgctattcttgtgcctgttctcagcgttttagcccaacatttgtttgaaaaaataacagcataatgaagcacacaaagaaaatggtggtcatggttccggaaaccgaatacattgcgcttatgaacatagtgaagagtatgggtagccgaggcgatcctatacaagatgaaaaaacatcattagactcaaatatacataaaaatttgaatgataaaacaatcggagctgatattaaaatgaaacgacactcttggctgtacaaacggagacgtcaactcaaagagctgaaggaaaataaaccacagaaagtgatcatagaaggaaacccgagttctgcaataccaaacgttgctccatatatgggaattcataaaataccaaaaatagaaacagccgtagaacaagagaataagcgacagccgatacgatcaataagagcatcacgtaaaaagaaaagtgaaaacgtgtttgaatcatcggcagattattcttcggctacagaaggtagcagtagtacgccaatacgttcccaagacgtaaaattaagtcagaaaaatttttcaaaaattatgaatattattggaaaaaatccggacaaatttggaatcgatatgcaatcaggacaggttttgaccaattttaataagccagtcaccggatcgaattatactgaatcgctgaaattattatcaggtgaagatatttcttcgcctcgaggtcatacattttttgttcaacgtttgaagagggaaccggaaattgcaaaatacttatttaatttacaacagggtaaaggaaagaagagaagaactaaaagaaaactagtccttgtccaggttaaccctataaaaacccaaggactaaatagagaaaaaccaccatttaaaccagtgttatgggcaaaactatagaaagtcaacttgaacaggtttattacaacctaaattcgccggccagctacgtaggaatgcaaaaggtgctagcagaagcgcgaaaacgtatccccaacctaaatcttcacgatgtacagaagtttcttcataaacaaaggacttacacacttttcaaaccaaaaagaaacaaattcccacggttaaaaaatataaagacatggaacaacaaaagcgaataccaaaattcaaaattggtgatatcgtaagaattacaaagagaagggagacttctccaaaggatattttccaaattttactgacgaattattcaaaattgttcgggtaaactcgaccaatcctacgtcataccgaatcagtgatttagaaggtgaaaatataaaaggaattttttacgatcaggaactagtaaagactgttgctgctgaacagacaactcatcgagcagaaattttgaaatccagggtgcgaaacggtgttaagcaacattttgttcgttggataggttattcagaaaatcacaataagtggattaaggattcagatctcgttcgttaggcatggacgatttttatattgtactgccatcaaatgttccctttccgggaaatacggcatcccattttaccgtaagacttccacataccttagagcaagactcaaactggtccgttgcgctttcctccatcatctatccacactcgttcccttccgtaggggtggatgaggacgactttgtcaacataaaacttctcaatcctgactataaaccagaggtacaggtccgactactgtaactctgaaggtaaaaattccaagcatacagtttcacagcgtagagcatatgcaaaaatcattgaacagcattattcaatcggcctatgatgtaaagtttccaaaagaaaaaagggtaaaaagagcgacggctgcttctgcagacaaagaattggaaccagaaacgcgaccagaaccggataaggaactgacacgtgaagtgtcttcatctaaaacattggataaggaactgatacgtgaagtgcctttaccagcaacatatgacattgaactaccacgtggagatgagccaaaaccattggagaaggaaataggacgtgaaacaggaccagcgcaactttctgacaaacaattgggtgaattagaaggtgaaaaaccgcaaaaggaacagatgccagccactcccattgttgaacatggtgaaatatctacgatagaccaagtgcgcatggacttagccaaacgagtaacggaacaatcgtggaaagagaccgttaaattggctgctaatgcagccgatatcgcggaaaaggctaaaacagccctcaaccgagctgaacaagcccgcaaacgggcacctaatgctccacatgtaaagaaatggttcgacaggctatcaaatatggagaattatttgcgtgaacttgtggaaaagatttcacaagagtcgaaagaggcggccgaagcaaaacggaaattagatgtacattatgattcctgcaacaattgtttagctctccaacagtctgataattttttgtatcctatatttatgtataaataatgtataaccatccataggtacaccgattaaacggggatacatatatgtatatgggcggaaaacaagatttccttaacgtgatttccctcaaaatttttaagattctctacatattaaccagtattttaaaaatctacattaacgtataaattggacgtttctgtttaaaaaaattttttattatgtttccaatcaattattgctgagctcagcaatccattcagttttttctctgaccactttggtgacatctgcaagcactcgtcattcaatcgtatggatgtcgtcagcatcttcatcaatagcacgctcgacttgattgtttttggttcgcttcttaggcggctcgcttgaagatgcctcttcctcaactccatcatcgttgtttttgtcatccaaaaccttcaccgacaccggtttttccacagatatggaagaaataatccagtcaagcttcgccgtatcattattttccttaaaatatgcgtcttttagctgacataatttttgcatggaacacaatggactagctaatgtgggataaacacctagcaaaaaaaacatgaacccaccttgatgttgactttgacgagcacgggttgatctatttttgactgcaaaatcgattccaacttattaggtgcgttctctgacaggttgtaaaaagcttccacgctggcaatgctcaaaaagttgatggctgcataggaaaatgctgttgtttcctgctcgcattcctcgtcatcacaatcttggagtacaacacggaggtacaaattgcggctgggctttttcgcacggtggacgcacgaaacacaaaagtcttcactgtcgagtttcttacgacatggaatacccttacttctcattgggcaggactaaattggaagcataatgatgtaagagttatattcgcagggatttattgtccatctcaccttgtaaatgcaaaacaacacgcttacaagctttgcacgcagaaaaaaagtgccagccgagtcgaactccttgacttcgctaagcgttttcgtgcgtgaagttggctgctcctcggagcctttggactctgccgaaagaggcttgatttggaatcgtttcaggttgtttctgttcatcttcgtacactgagtggaaagaatagcgacagggaaaagcggactggtatgctgaaaatgagctcaaagtcgattatagcgacactgaaccgagagtaaataatgatgcgtaatgtcacgccaatgaacaataaaaatacagatgggagcaaatcttataatattgtggataaaaacatagcgatgtagtttccaaagccttaaagaaaaattcgaaaaattattttttgatgaataatacttaccaacactattccgtcctttttggccaaagtcccgatcacgaaagggtgtagtcaattgctgcagtacaatacaaagatgtataaaatcgtcaaagtgcaaccgagcttaatttaaatacaagattattttaaaaacagcagctctggtcttttacccgaaattgtgcgatcatacttgcgcaacaattcacaataaacgtcggcagaaaatcggtagcctataaactaacatctgaaataataatatcagtgacaaatacctaccgtattcccttagagcaatttcaagtcgttcaacgccaattgacggctcattatcgcctgctaattgtttaaagaggccttccattcctcaacgtactaaaat

SEQ ID NO: 12636 - DNA, 1271 bp, Heterodera glycines
agttcggcatggatcgagaccgggaatagaccatggaaagagcagctcgagctctacaaaaagctgtggtcagaaaaaatcggcactttaggagcggttttattttctgagaaaattccaaatttgtagaacaatttcccttattgaaaaacaaattttcaatttctcttaatatctttgtgagttcggcacggatcgagaccgagaatagaccattggaaagagcagctcgagctctacaaaaagctgtggtcagaaaaaatcggcactttaggagcggttttattttctgagaaaattccaaatttgtagaacaatttcccttatttgaaaaacaaattttcaatttctcttaatatctttgtgagttcggcacggatcgagaccgggaatagaccattggaaagagcagctcgagctctacaaaaagctgtggtcagaaaaaatcggcactttaggagcggttttattttctgagaaaattccaaatttgtagaacaatttcccttatttgaaaaacaaattttcaatttctcttaatatctttgtgagttcggcacggatcgagaccgagaatagaccattggaaagagcagctcgagctctacaaaaagctgtggtcagaaaaaatcggcactttaggagcggttttattttctgagaaaattccaaatttgtagaacaatttcccttatttgaaaaacaaattttcaatttctcttaatatctttgtgagttcggcacggatcgagaccgagaatagaccattggaaagagcagctcgagctctacaaaaagctgtggtcagaaaaaatcggcactttaggagcggttttattttctgagaaaattccaaatttgtagaacaatttcccttatttgaaaaacaaattttcaatttctcttaatatctttgtgagttcggcacggatcgagaccgggaatagaccattggaaagagcagctcgagctctacaaaaagctgtggtcagaaaaaatcggcactttaggagcggttttattttctgagaaaattccaaatttgtagaacaatttcccttatttgaaaaacaaattttcaatttctcttaatgtctttgtgagttcggcacagatcgagaccgagaatagaccattggaaagagcagctcgagctctacaaaaagctgtggtcagaaaaaataggcactttaggagcggttttattttctgagaaaattccaaatttgtagaacaatttcccttattgaaaaacaattttcatttctctt

SEQ ID NO: 12637 - DNA, 3457 bp, Heterodera glycines
  unsure (1)..(3457): unsure at all n locations
agggcgtttctgtctttgccaatccattcaacaagccagtcaaaaggcgaaatctgaaaaacaaaaatcaaatattatataattcatgctaatgatagctttttttctgattgaccgtgatcggaatgcaatggtgtccggcgggaggcaattttgagaccaagaagtaaaataatgcgtatttcggttctccggttgttcgtctattggtgctgttcataaaaaattgcttgtacaatttgttgaacattgagccaaattcgccagtttccgagtcctgtccaatgagcgtataatcgcaattgccaatggatttacagaggaaggtctgaaaaagcacatcatttatggatcatttatgtggaatttaaaatttaaatgcaattgacttttgggtcggcaaaagtgccgcagaattggcgcagtgaaatgagttgccaaatgatggtcaaagtgagcacaaattgcaacagtttgaagtagactatcttcttctccataatgatgttgccacacttataacttttgttttctgtgaaagaggaagaaacagaacgattctttaacgcaatgggcaaatcggaaacaatgatgaaaatagtgattgaatgacgcaagaatgtgagcattttgttcaatgcgttcactttaaataggcattttgaatgtgtttttttcgagtgatcattttcaaggacattttgaattctagggataaaccggacgcaaaaaggggcacctgccagaggatccaaaaagggtaaaaacccaactcgttttcagccaactcgtttttaccccaactcgtttttgacccaactcgtttttattaccccaactcgttttttgggtcgaaacccgaaaatcgatgccaaatcgcttaaatttcaaaatgttttgacctaatttaattcgggaatactttttatgtcaaagaccaaaatttaggaaatttgaaaatccgaattttctaactttctttcgaacttagttttttttttgaaaaaaaaatttttttttattacggcctgaaaacatatttccgggggttttaaggttcgctgatcacaaatatgatatctcttgctaaatttacaaaatcaaaagtaattttgtggactattttcagtgtttattcggcaccttttgagttatggctgtcgtttcctctgctaaatcttcttctgcccacaaatgggtttcactgattgtgctcattggccaaacaacggcgctcgtgctgactttgcgttattcgcacacccaaaaatcgtatccctccgacgggcccaaatatttgtcgtcgactgccgttttgatggccgaaatagtcaagtttttcacatgtgtcgccgtcttagggcatcagaacggatggaattttggccgtttgttgcgcgattttgactggaaagatttgctgaatgtcggcgtgccggcgttactttatgtgaacggttgcggcttttcgtccattgtcagcagttccctccttttcaggttgtccaaaagaatttgctgtttttggccctttccaaattggacgccgccacttaccaagtcaaaaaagtgatgcatttggcgaaccgttctcccattttatttaggtcacttaccaattgaaaattctgacaacggcctttttctcggttacgatgttaaacaaaaagttggacctcatcaaatggatgtctttcattttgcttacttttggcgtcgcacttgtccaggtgactcggaatgttcctccggcacttccaaagcgcaaatgccaccaccctttgtttttaatttatgcgagtcgcttattgctaaagtattagcatttgcaattagtagctaataaccacaagggaactgctggttcggaaatgaattcgctcttcgcaaattggattttccaattttcatttgaacttaaagctcccaaaaagttttccgaaagtccgtcactcgctgccgatgaaaacgcatttggtgctgacaatcggccgcaacaatcgaccggcgatggattcgtcggactttgcgccattttggccgcctgctgctcaagcggatttgccggcgtttatttggagaaaatcctaaagacttcgcgagtccaactttgggtttgcaatttgcagcttggtccgtccgcttcccaaattcccttttcattttccaatttcagcgttcttcagcatgtttggtgcctttgcaatgactttgctttgcgactgggctcagcttcagcagtggggctttttccacggatacaattgggcatgactcgtgttttttttcgtttgttttcgtaatccccaaacattcagataatttggacagttatcgcactgcaggtatacggtgagtttggttacggtgtttgtttgcttttgcttttgtaggcttacggtgggcttgtgattgcgcttgtcgtcaaatacgcggacaacattctgaaggtggtcggtccctccccagtttcgttttcatttgccactgttttctgctgatttctccagggtttcgccgtctctctgtccattcttttgagcagtttcgtctcgtgggcgtttctggccgacttcgttccttcgctcactttcactttgggtgcgtccattgtcattttgtccactttcctttatggttacgagccaaaacgattgttataaccggcggaaaggtcggcatgaaagtgccaacaaaatcaacagattctgtgattcgaatacaaatgcatatcattgttgttattgttttgtttaattatgattgtgattatacaataaaatgttggaatttaacttccttttttattctatgggcttttccgttgcgcatttttatgccaaaattggagcgtcacaaaggcagtgccaaaagatgaaaagcattgacttttgggtcagcaaaagtgccgcagaattggtgaagtgaacggagttgccaaatgaatgccaactgagcacaatttgcataaactttaagtagacgaccttctccatgatgccgtcgcgtgtgactacttcttccgtttgctatgaaagaggaagaaacagaacgatgctttgacgcaatgggcaaatagaaaacaatgatgaaaatacagatgaacgcaaatgagagcattttgttggaaacattccctttatataggcccatatagcattgaatcggtgtgtaaacgaatggaggaaaaattaggcagtgtgagaaaatgtataaaaggcaacatttccactcttttaaaaaggggttttggttttaattagataattacttttgccaaattttcaggacttttttgaattatggcattaattttgaaaaatcaaagttttttttttcaattcgttaaacttattttctttttccaaaagtgtccattcgtcgtcatcccttcgcttattttcccccanaataaaaatagtgcttctcacanagaaattggagacacacgcaccaa

SEQ ID NO: 12638 - DNA, 1551 bp, Heterodera glycines
  unsure (1)..(1551): unsure at all n locations
aaaattattattattatttctttgcaattaaacaggatttccttattttattaagtaaaataatgatttattcagttttttaatcagaaaaaaatcatttaaatgcctcaaaaaatgaattgccatttaattgaagaaaaataaaataaaatcttgaaaatgaaattctgtattttattatttttatttttgattgccctaattattccaattgaatcagaaaagaaaaaattgcaacaaaagtcatttggcgaaatatttggagaaaaatgggaagaaaaagaagaagaaaaacgaaatgaactcaaaaaaagagaaataattggaaaattttataaaataaaagagaaaataaagcaaaaaggaagaaaatattcagcaaaagaatggagtaaaattcaaacaaaaatagcgaagaaattggggacaaatcgaaacaaaatttataaatggatcaaagaatttggtcttcaaaaacaaatacagaaaagctacaaatcaaaaactgatgaagaaaaaattgtaattgtgcaaaaatttattaaaatgtcaaaagaatataagcaaaaaagaaaatattctgaaaaagaatggaaacaaaattatgccgaaatttgtaagaaagtcggagttagccatagaacaattgaaaattggaagaaacaatttggaattagcagtaaattaacggagaaagaaaaaatggagaaaattaaaatttattggcaaataaaaagagaaaatccaaaaatgagtgacaaagaaattgcgaaaactgtgaacacttctcatcagaatatttttaattggaagaaacaatttggagaagaaatggttcagagaacaactgaagaagaagcctgaagtgccttttgcttttaaatttgaaaatatttttttggatatctttttcaattttagtttcagtatttactgaattagtaacccccgtggttctaattcagtaaaaacggtatttgggctgggattttttatgccataaaaatgaccttttttggcattttagaaatggttcaacagaagcaattatgaaagaattagaatattcataattggaagaaactctttgggaaacaaatatttgaggattaaaaacagaagattttaagaaattccgttgagcccctccccgatcaccacttttaaaaaattgggaatttttatttatacaaaatttaggcaattcctcgatcggggtcctggaacccccgacaatttaacactcaccattcccgaaaaaaaatcctgaataaaagcattgcaaatcagattcaatgttcaaaaatgaattaatggaaaaaaattaaattcatttttgagaattaattaaatattctttaattattatcttttatatattgtcaaagttttttgaagtggttttcggaatgtaaatgcgtgaaaccattttaaagactctttgtggcgcacgaacaaagtgtaacaggctcttanaaattgacaanntatatatnaataattttcagncattttcaaaaatttttacgacgancatttttactttttttt

SEQ ID NO: 12639 - DNA, 2762 bp, Heterodera glycines
atgtttattattttcgaatgagctccagtagaaagtactataattttatttaatcattaatttaccaattggcaattattttgtcattaagataaaataattattattatttctttgcaattaaacaggatttccttattttattaagtaaaataatgatttattcagttttttaatcagaaaaaaatcatttaaatgcctcaaaaaatgaattgccatttaattgaagaaaaataaaataaaatcttgaaaatgaaattctgtattttattatttttatttttgattgccctaattattccaattggatcagaaaagaaaaaattgcaacaaaagtcatttggcgaaatatttggagaaaaatggcaagaaaaagaagaagaaaaacgtaatgaactcaaaaaaagagaaataattgcaaaattttataaaataaaagagaaaattaagcaaaaaggaagaaaattctcaaaaaaagaatggggaaaaattgaacaaaaaatagcgaagaaattggggacaaatcgaaattatatttataaatggatcaaagaatttggtcttcaaaaaacgaaatgctataaattaaaaactgatgaagaaaaaattgaaattgtcaaaaaatttattaaactgacaaacgaatataagcaaaaaagaaaatattcgcacatcgaatggcaacaaaattatgatgaaatttgtaagaaaattggagttagccatttcataattaaaaaatggaataaacaatttggcattagcaagaaaagactaatggaggaagaaaaaatggaaaaaataaaaatttattggaaaataaaaagcaaaaattcaaaaattcttgataaagaatttgccaaaatgatgaaaattgatagatcgaccatttcaaaatggaagaaacaatttggagaagaaatgtttcagagaacaacagaagaagaagcgtgaagtgccttgtgcttttaaatttgaaaatatttttttggatatctttttcaattttagtttcagtatttactgaattagtaacccccgtggttctaattcagtaaaaacggtatttgggctgggattttttatgccataaaaatgaccttttttggcattttagaaatggttcaacagaagcaattatgaaagaattagaatattcataattggaagaaactctttgggaaacaaatatttgaggattaaaaacagatgattttaagaaattccgttgagcccctccccgatcaccacttttaaaaaattgggaatttttatttatacaaaatttaggcaattcctcgattggggtcctggaacccccgataatttaacactcaccattcccgaaaaaaaatcctgaataaaagcattgaaaatcagattaaatgttcaaaaatgaattaatgtaaaaaaaaaattaaattcatttttgagaattaattaaatattctttaattattatcttttatatattgtcaaagttttttgaagtggttttcggaatgtaaatgcgtgaaaccattttaaagactctttgtggtgcacgaacaaagtgtaacaggctcttaaaaattgtacaaatattatataaataattttcagcaattttcaaaaatttttacgacgacaatttttaattttttttttctaaaaaatattaggcttattccattcgtttgtcagtgcactttcatagttttatttggtttttgtttttgcgccgacctctcctccttttttgttgttgttgttgctgattttaaaataaagtgaattgtccagacgaatccagcaagtttattacgcagggctccaaaaatgtattttcaaaatagggacaaacgaggttaaaactaagattttgccccaaaattacgattttttttgaaaaaacgacgttttaaattgttaaaacaattaaaaacagtgctacttagtgcaaatcttcaatatcagcatttagaatccaaaatcagcaattttgcaaaaatttattccaattaaaaaaaaatgaataaaaatttgcggcacgcttttttgggaacagcgggccggcgatgtcggtaggcgccgcagtgaaaaaatttgaaaatttaaatgcattttattaacagaatttcacgtccggcggtgccgattggcgctgccgggaaaatttgattgcgcttaagcaaagttatggcatgttttgtcgaaaattcgctaaaataccggattttagaaacgacctagaaccatccccgacttgtcattctgacggaccccgctcaccaacaagagttacccgacggggataagggagcttggttaatatttagtgatgctcgatatcgaaaattcctgatactctagtgactaaaaccaagacccaaaaagcccgggacttttaaggagtcgagactgtggcatttggcaagatttaggacgggtaagtcgtacaaagtggcaacatcctgtttagattagtatagatccagagaatgatcccttgaaaataacgtatcatggaattcagtccagagatatatttaaatttttgtttcccgaattagatttaagtttatttgcatgaaaattgctggatatcatgatctcaaactgattttaggcggttcagaataccaaaaaagtttcactctaatctagtgaataacattggaatctattttccgaatttaaccattttcattggatttttactgaatgcaaattctgatccaattataagccaaaaaatctagatttccagaccctgcctgact

SEQ ID NO: 12640 - DNA, 956 bp, Heterodera glycines
  unsure (1)..(956): unsure at all n locations
tttcgtaaatccgccaacgtgggcatttcgtaaattccgccactatgggcgtttcgtaaatccgccaacgtgggcatttcgtaaattccgccactatgggcgtttcgtaaatccgccaacgtgggcatttcgtaaattccgccactatgggcgtttcgtaaatccgccaacgtgggcatttcgtaaatccgccaacgtgggcgtttcgtaaatccgccaacgtgggcatttcgtaaattccgccactatgggcgtttcgtaaatccgccaacgtgggcatttcgtaaatctgccaacgtgggcgtttcgtaaatccgccaacgtgggcatttcgtaaattccgccactatgggcgtttcgtaaatccgccaacgtgggcatttcgtaaattccgccactatgggcgtttcgtaaatccgccaacgtgggcatttcgtaaattccgccactatgggcgtttcgtaaatccgccaacgtgggcgtttcgtaaatccgccaacgtgggcatttcgtaaatccgccaacgtgggcataaaaaataataatgtgacatataaaaatgcatgacttgtcataaacacacaaataataattcatggtatctatcattcaatagctcctggatgttaatattaattttataattttttgaaaaattggttataaaattcaaaaaattttaagtccttttttggccataagctttttgaaacaatgaaatgttttgaaatatttatttaatagattatacaagggaatcaaatcccaaaaaagaaaatataatttagttgcttaagaaaaaaagcataaatcattaaatatgttatgctttttgccatggtcacccacatatattatatgtagggttgtaaattatatggattaacatattttttctgcgcatatgctatgaagaaaggggctaaaaatagcatttctgcngtaaaattttttga

SEQ ID NO: 12641 - DNA, 2725 bp, Heterodera glycines
taaccattgctttttgtgcgtaaattaaattttgtcttcttaccccccctaattgctttttaagtgccgaaattgactattgaataaattatttttatagttttgtcagtttatatgtaattgcatttaccgaacccgactttttcattgttttttttatcccatttttcgcaaatttttgccaattaaaatacaaataaaaattcggaattcgtccaaaatttctgaaataaatgaaattttttgtaattttgtcatactctggcattgaatcagcaaaatttaccgtatgaaaaccataaccatttgaaaattttggtgccaaatttaccgtatgaaaattataataatttgaaatttttgaaaattttctattacaatataaaatttcttagacaaagatttacaattatttgaagccaatgcattcattgtttaagcaccaaggagcggctgagctgtgccgtcccctccctgtatacggtatgcaagcatctccgctgtaccgtaacggaggcgttggccgcgcacgcggacagtggcggcaaattggtggtgccgttgctgttggcacgggacgaggacggcattttgtacccgacccctcacacatttccctaccaattgcagatgccggcggtgcaaagcgaaaggcaaaaactaaaaaaaaatccgccaattaaaggcctcggaaaatttatcaaaaaatttggtacttttttgagggattttcggggttgctgactgattatgaatatgacatccatttagaccaattttcgaaccccggacgagaattcgaacaaaaagtcgaaactccaaattttcgactttcacacttttttgaatttttgactttttgtccgaattcgggttcggggtttgaaactagtcgaaatggatgtcatatttgtgatcagcgaccctgaaagtcattttttattcatctacataattgcgtaataaaagaatattttttttgtaaaacccgaaaaaactttttttcaattttttgctaaaaaattgaaaataaaaatgaggggatttctgagtttatcataaaaacttttcttttttttcaaaattcatcatcacgaatccaaaaataaaaatttaaaataaattggcaaaaaaaaaaaaaaaaattttgcgccatccctaaaaatttcacagaaaattcgaaaaatttcggcgcataaaaaaatgctcccccaatttttagttcagcggcgacaatgaatggtggtggtggcaccgcaaaaatttgtgctgctgattcctcggcacttgccaaaaatggcggcacattgtgcagtttggagggaaccgttccggaaaggtacaaaaaaaacaatttgaaaattcgaaaattttcatttttttcaggtttttcgcggaaaaccgcagcaacggaatcggcgaagcccaacaactgttaatgatgcacaatgccaattgacccttttttattattgttaatttgttttgtttacagttgaccattttaatgagcccttaggcccattcaaattagcaaatttttatgtacaaaaatgaaacgccacagtttttttttgtttgaccataccgtaatccattgctcctcacaatacataccaccgtaccgtaccctttcctccttctcccatctttttctgctgtagaaaaagcatttttttcccccaattttttgtccattgtcacatgccatgccggttgttttgttcaataaatttttgtgtatttattttattttttattaaattattatttaaaaagtaaaaattcttattatttaaaaagtaaaaattcatttttattgttacaaaattttttaacacaaaaaattttgaataatttaaaataattctattacatacctttttcaatttaatcattttccaattgtcctaattgagcatttaagttaggtcattaagaaataatggctttgtttttgtgatttgccaaaatttagaaattttccatttaattacccaattttcattaaatttttagagacaaaactttcgtcaaaattcaatttatttttaatggaactaatcaaatggaaattttatataaaaagaattttatttaatcaaaagaagaacattttacattttggcgaatttatttaaaaatatataaaatttaatataattttaattaaatttgaaataaatttttgccaaataaattagacggaatttatgccaattttcgttcaccgattattaatttggaaaatcgacgcgcaaatttcgcagcgttccgcgcctaattaagtaaaaaaattctcacgttctctgccgctgtttttctacaggcagagtaatctccatcaatcatcatcataatcagcaaaattgagcagtaagagatttgttcaaattgataatttgattggaaggcgtcggtcgatggaatttttttgttttcggcgctgttttctgtgccccgacccctcgcaaattttatgaaaattttattgtttatcgctgcctaattagtacatatagaaatgcattaaattttaaaatttttaccatttaaaaaatgcattttcatgatttacggtttttttaattatctcgacattttttcgtattattttgattctcggttgagaagtatcttgagccagccatttttggattttggtctcgggcttaggaaatttttcggctgcttcgagcctctgattttatacatccataaattt

SEQ ID NO: 12642 - DNA, 965 bp, Heterodera glycines
  unsure (1)..(965): unsure at all n locations
cccccccccccccacccccaataanccannnnaantntnnntncatnctnctaatnntatttntaancacatnntnttcatcccaatttaaaataaaaaatnnaatcnnannnnnncnccaaatattttcattaaaaaaaattatattcttaaataaaaattgggaggaaaaaaggacaaaaaaaacattgaaattcttcataattttaggtttgtatagtaaaaactaaaaactaccaaatatttttgggcgaaagcgtttggacccccagaaaaaaaaaattgaaattttatttattttcactccaaagttcaaagaactcttgttatgatcaatgattttgtgatatgacaaggtcgtttcagcattttctcgtgtgaccccaaagaacgccccggggtttatcaattcaattttcatttttgagcgagtgtgaaattgcacacggagactcatttaaaaaagaaaaattatttggcgatttgttttcttgctattttgcatttttttccatttcgacgaaaacgaaattttacaaattttagggggagcgataaatacggcaaaattggcttttaaatggctcagagccccataaaattgttcgacgttgccaaataaggcctaaacaataaaatttaataaatttttccaaatttccccccgattttcaaggaatggtgctttgcgagcgaacattttcactgtcagagcctttgctgcccgaaacaatcaaattcatcaaggagagcttggaaaagcaaggcgaactccatttcgaattgccccatgtttttgtggttttcggcgcatcggtgcgccaaaattttccaaaaaaaaatttcttaaaattttccccctcattttagggcgatttggcaaaaaaggaaatttacccaaccctttggtggctgttccgcgactggggagccaagaggcaaattttcaaaaaaaaaaatcgaaa

SEQ ID NO: 12643 - DNA, 2171 bp, Heterodera glycines
taatcacccaaaactgttcatacgtttttttagaaagtcgaaactttagaccaaaactctcgaacagcgctaacaattattgagtgttctatgcattattcatttctttttaattatttcaattaattaattgcattttttgtccatttggctgtacgtccagccagggtcaaaagtattgcatcaaaaaaatatttttttgaaaaatacgattttctctaaaatgaatggagggaaaaaagtattgtttacgccaaaagaaacgtcaattaatgcactaacaaatacccaaaaactgggcccgataactctctttgtcgtcgagaattggtcatgaccaaaaaaaccctttttttgatgggacaaaagtaatgtatcaaaatattttatgattgttctcttggtttcatacgatcaaaatagcgtaatacttctctgattagagtcttaatatgcgtaaacgaaattacttgtcgacaccaatcaaacaacaaattattaaagcaaaggaggcaggtcaaactgatcgagccgtctccgagcagttcaacatcagcaattcgactgtttcacgggtgtacgcgcggcacagacaaacaggcgacatcagcacaaagcccaagtctggacgtcctcgaaaaacatcggaatggcaggacagggcaatcgcaaggcaattgaaattggatccaaacaaatcggcgtctgaagtggcggcatgggcgcgtggcactttcggggtcaaaatgagcagaaggacggcatgcagaattttaaaacggcatgggctgtatggacgaaggccggcaagaaaattctcctgaccaccaacttttgtttctcaccaaaaaaaggggggttgtttgggtgatgatcaattttctcgacgacaaagagagaatatcggggcacttcctggctggacgtacagccaaatggagaaaaaatgcaattaattaattgaaataattaaaatgaaataaataatgtagagaacaagcattaattgttagcgcaattctagagttttggtctaaagttttgactttcaaaaaaacgtatgaacaccgttttggatgattatgcttttttttatcaatttgaaaaaaatattaagtcttttttagagttaaatatttttttaaattattttcttaaaatcccttttttaggtcactcggtcgcacagccacgcgccgtcctccacccgaattgaggtgctaatcgccaaaagtgacatccgtcgggcggcagtgaacgcaattagtgcaacgcctggggcaatcgttgccaatgcgctggagggcatcagcgacgcggcaaagcatcagttgccgaagattgccaatctgaaaaagacggccacccgacaaaggaagggcattggggacggagcagcgggtgagaagggaaacggactatttttcaaaattgataaaatcaaatgaaaaatggaaaaaattttcattgggattcctttcaaattaatgatcacttgacaattagttacttcctttaagaaaatccgctgccaagcagagaaacactgcgcaaaagattggtgcaaaactatcgcaacggcagtcaccgacggacaaccgttacagtaccaatgccacaaacatcgcattacggtaagggcaggaaaagggagggggggggggatgagaaagagaacaaaagaatcatcttttacaaaagcgtgggaaatttatttaaggaattgtttgaaatttggaatttaaaaaagtttcttgatttttgagcaaggcaaataaatcgacgactctttggcattttattttttatttccccattttttcgttgcttctgctgacccagcgctttcgataaaacaaagccaaagggcagaagagggacaatgccaaatggcaacgataaggtaattttagaaattaattatggaataatcacttagtctcaatacataattaattgcttgttcattagcttccgctcacttttaattttgattagtcactaattgatttattaggcatttaattagctctgccgcattggatgttgtgctagaggaatcactgccgcccaatttcatagaacgatccgaagatgcgatagctatttaaagcctgacttggaacaggagatggaggtgattttagagcttaatctgatcagacatcttt

SEQ ID NO: 12644 - DNA, 2890 bp, Heterodera glycines
  unsure (1)..(2890): unsure at all n locations
ctgaacaaactgatcggacgcgttcgagtgatcgtcttttggatatggtagatgcattattgtacatatataaactaatgccatcataatttgttcaagacaagcccaaaaaccgaaaaagccaattcgatggcacaatattcatttgtgtagctaacggagcccttttacaaattttgccatttttttttgccttaggttagatttccataaaaacaatgacaatcctttcattgtcagtgaacactttggtggtgccgtttctctctgcccttccgttcaattgcgtctgtttttgccgaccgcggacaatcgccggcgcctcttcgccagcacagtgacaatgctcagttcgttcgtcagccaattggaggaggtcgacgcggtgctgcggaacagcgaacgcagcggaggcggcggcgcggaaatggcggcgcaaatgcggaaggaattagaacacatttgtgcccataaagaagatttggaggcgtatttgatggccactgaaccgatcgtggaatggatcgaatttttcgaagtgaatcatggaggaaaaggggacgagggagggagtgacaagcagggagggcggtaggtaattagcggaattaaattacccaatagcaaatgcgaggggagagggagtatttaggtgaattaaattatccattaggagatggaaggggagaggggtgttttttgaggggagagggggtgttttttcaaaattcctgaaaaagccaacaattttctccaatataaaactcgactccctctatttttttccctagatctttttttaaacattttttaagtttagctttttcccaatgttttttaattactttaatttttctttttccatcctttaatcttccggatcacttaaaacgatcactttcattcacttgcatttgcctcaagaaaacaatttccgttttaattaatatcatacataagtttatgatcattttaacagtgtccattcaattatttataataatttcaggaaagtgatcagcccaccatccatcgcgcgttgcccgcgttggcgggcattgaaagcggactgaacacgctgcgaatgttggccatccaaagttgtgacgggaatggcacaaccaataattgtcaaaccatgtccaactcggcggtgcttcagcgcgaactgtgcgaagcggcactggacgcactcgactggaacatctctccgctgaggggcgcgaagagtgagtttttacagacagcgaacggttggcatttcctgccaaatttttactcggcaaggacagcctgactcaaggaaaattattgaatattttatattgtcatttttttccaaatgccaatttaattagctgctttgactcattaataccattaagctgttcctaaactaggacagctgtgccattggagaatggaaatgggattaatgatttgcccaaactctgaatttgaacgccgaaagcattcatgcttaattaaaattttgcttgatagtgcccgcaattcattcagtcaacaagcatttgctgtgcaccgctgccgcattgaacccgagcgcgtggcgtcgtgaattgcccgcggtgttcgccaaagtcgcgcgttggacagaggaggaggtgctaatgaacgcagaaattaaaaatggaattctgctgggagttggccaacaggagaccaccgtgtagattggcggagggggtcgacaaggacgtcccaggattgtggcttcggggtgatatcccccggaaaatgatttttttttttttgcttttcattccactttttgcgatgcgtttttcaaaaaaaaattttggtatcagatagtcgccgccggaaaaaaaattaaaaattgagtgcaatttgctaacaaattttgtccaaaaaatgaccattccatttcaatcaaatttttttaaaagaaattactgtgtttttagagtccgcggtgccgataggaccctgagaaaataattggggtcgaaaagcgctttcagcagtaatcaaaaacatttattctactttatgttttgtttcaatttaacttctgaaatcagatacttgccgaacttcgaatatctttcgcgcatgccattctttccgaaagccatcgtcagaaaatacagcagaaacacaaaatgccacggcgttctgtgttgccctccaagaggccgttgttcagctgtgccgtagaagcggaaggggagggaaacgagcgggaggaggatgagcagagggacgaagtggcggagtttgtcacggtggcgaagcagtacagacacaccaccgccaacagcagcatcaactttgacctgctcagctattggaacaacgatttggcatcactagtgggcacttttttgcatttgattttgtaattatagatggaatggaaaataattgatcataaattaattatatttttaaatgaattgatcaattcaatccgaattctgacttctccttacacaattagacattttccaatctccgtgcgttggctcgtcaaattttgtgcgtccccggcggacacatcggcacggagagaatattttcagttcaaaatgtgaaacaaaaactggcagaggaggataaatttgagggaaatgaagcggaggtgccgccccgctgttccgtcagcacttcggcactgtctttcgtttcttccattggctcggcggtgccatcaacggcggcggcggatgaaaatggtcggactaatattaatgatgcttatggcgacgacgatgatgatgataatgatgatggttgatgaatggtatatgcaacagagtcatttactgcaacaaaatgtgccaacgatcgaatgggagcagcagagcaaagtgggnggatcgatcaattgcaaatccattttctttta

SEQ ID NO: 12645 - DNA, 937 bp, Heterodera glycines
tttgcttttatccctgcggattttattttctccttctttaatcacacaaaacttctctaaaattcaagcagttattagttggtggtaatttcactgcttctctgtttactgttttttccgccccactatttgttttcttttgtcccccgtcccctcctctcctccctccctccctctctctctctctccccgtctctctcttcccttacttctctctccgctttcccctctccctctcttctttcattgttcatccagtttattattatcttttgttttttgttctgatcagataaattatgtaatcatgcgtctgtgagttcccggccctcacccataaattgcgcgtcccttccccctccctgaaaaaataacaaaattcagaaaccgtgtttttgaaggcctcaaagtgtttattcaactcggaaattttgttttgccccaacagcattctgacaacgtttaacaattgatctattttccgactgatattgacagaaacactcgacccgagaaatttatcagtcggtacactaagtcatcagttgcttaagacctaaatgaattgcaaacgtaattaaaatgagcgtgttgtatactgaagttgggcatcagggaagtcatgatgtgaagaaatgccttccacacattttggaattgcgttaatttggaaagtcacatcagataaatcatcaggtctcttcccattgaggcgtccaggtcaacgaaacgttcgcgaatgagcaattcactagtggagatcaaagtagatttgaacaacccgatagaaaacggaaagacacatttactgatcaccatagggacatccttgaaaaaagtgtcatgaaagcaaaaagcatctcgcaagggccaatgaattttttttgaggacaattagtcacttctgattagtgctgagcatctgacaaacagaaaa

SEQ ID NO: 12646 - DNA, 2443 bp, Heterodera glycines
ccaagaacaaaaaagtcatcaaaactccgactgctaattgatctcagcaagcgatcgcttttccagaagaggcaaaggcgggagacaaatcgaacgacggacagaagcagcggtagatgagcatcggttggtttgacgcgttccgcgagaacggagctccgacttggtgaggaaaaacacacgacaaaaaagacattcgttcgcttttgaggtacggcgagaatccgacgccggtggtgttggacttgcaaatcgccggccttctctccctgtttctgaccccgaccatcgcctttctgctaattcttcccggaatccgtcgcttccgcgctgtctccgctttcatttttctgttttccatggccacaggggccatcattctccgtaaatagcaaaatcgatgctttttgttcgcttgtcattgtcgccccccccccattaagtgtccattcattatccggcatggaattcgggccatattcgcattttcgccacttaccgggcccattccaacgagcgcatcaacgcccttttgggcgttcgcattgggctgacccacgtgaacatcactctgggcagtgagttcgaaatggggataaacaacatgccaaaatttaaaaaaaaaaactcattaaaaggcgaaagtctgtcaccggaagagattctgctgaaaagaacggttttggacgcgcgggagcaggacagaggcaaaatggagccggacagagccatggaaatgctgctattcaacacggacatagccatgaactcaagcagtagcagcaacgcaagcgaaagcgaagccaatggagccgaaacggtgccacaaacgacgggtccgaacagtggcagcagcacaaccacagcagcgattagagagggcgaggagccggaacaacaggcggagctgtactacaatgaacggttcaacttcgacgacggtgagacgcttttttgaaatggaaaatcgaaagcattcatttggagtgagtggcatggaagtgatcgagtggctggagaagggactgccctaccccatcctgcaggtggtcgagtacctcagcgtggacaggaccggctttctgtggggcaagcagtaccgactggccgggtactacactcacgccgtactgtggtgagtttggccggacaacggattgggccataaaccaaacatttggccattgtttcgctttgtcctcgagtgatcactcctactgattgatctgctctttcccattttcaggttggcatttgccatttggctgctccaaattgttcttttgggtgccctcccccaccgttttggttcggtaagctcaatttaacctttgtctcgtccatttccaatttcaaattcgcttaggtagcatttgcctgcggtttggccattttatttgctgatttcgtttacttttgtctgacccccggcgacctttttttggtcttttttggccccgacgaacgttcccatcgcctcactttccatcccgccctgtgcttttacgcccctttgggagcaggtgaaaagcccaaatgattttacgtcaattaattaatattaattgattatttcagtgaaaacttcttatcttcaataaatttaattaataaattccaaaattgaccccccccctaaagttcacctccaaatgaattattgttttctgaaggaataacaaaattttctctcagaaattggccaaaatgcatttgttttgcttatttttgatctttttaatgtttttcatttttggaaaacgtttttttattgtgggtcgtaattatggggaaggaataatgatggactttaaagggggaggggagagaccggttggtggtgggggggggggggacaacaaacataaaatgaacaaacatttgagggggggggggggcaaagtgttgtgtaatgtaaattaaagtcattttgatttatttgttgtcggagccgacaaaagtgaaaattggattatgacactaaaaaataaacaaaagatttaatgagtttgttaaaaaaattgatatgaattatcagggattgattgggtcgtttcgtcatttcggcgttataaattttttttattgtcgaccaaatccaccaatattggtatcatttgaaagctttctttaaattagtttagttttttttttggggggggaacggtctaaatgcgataaaaataacattcacgttgcgataaatgtcctatgacaagtttattggttgaaacaaaaactttacataataatacccctgcgagaagggagtggtaaacatgattacaaaattatcaattttttctagtcttatctactcataacggttcagaattcaataaaaataacattcacggcgcgaaaaatggggtttgaaaagcttattggggaaaaaacgactttacacaataatacccctgtgagaggggagtgggaaacatga

SEQ ID NO: 12647 - DNA, 1352 bp, Heterodera glycines
ccggaagggtttgacctttctgccagtgagttgactttgttccgctccagctgaatgaaaaaagctgtcacctctcgacgacgaagtaaagtgagaaaggacaaatgccaacaaaatatcagtccattgtcaaggcaaaccgtcgtcaaaatgccaaatttaaattttacatggcatttcatttcattcttttctcctcccccgccccccaaacacttcggtcgcgccattcattcagcgccatttccctttctttctgatgctcatctcaatatccaattgacttagtgcacgcgagggtaaaggtgagaacatttgggacgaggaaaagcgggggggggggggggggtaaagggttcaggagaagccattagcgacttggcatgggtttgggtgtggcatgggtcggctcacatttgtgtgtccccagcgtattgaatgctcacttagtgtgttttgttcagtgaatgtgtcacctttttgtgcccacatacggtaccaaaaagagcagccgaaattatggcaaattgcccaattagcacattaatagcagcgcataaatttcgtacaattgccgcttcttctttggatgggcggggggggaaggatcgttggtcgctatttgcttttaatgccaataaaatgcttcaagtcgggatttttctcgctctctaatgggttaatggcacctgtaaaaagaaaagccgcaccagggaggtaagtccggaaaacggaggcgaagaggcggaaggacgagaaaggcttcgactgcggcgtcgccacctttcgccaataactataaatgcttctcggctctccgcggctaatggtcacacccgcgaggaaagggcggatgatgagagatggcaggatgaaatgggatgggatgagaggggagggaagggaagggaagttcggtgggggggagggcggatgataactcatttatttgtcacttacccttcttctccctccctcccttctcttccgtctcccctcgctgcaccaactctccactcaaaatgccaatgtatcaattaattcccccgccttctcaatttttgctgagttttgttgagaagccccgcagtcattcgaagttattgcccaggtaagtgaatccctccggcaaagtcaatttggctaatgcaaatgaaagaatgtcactcactcttcttcgtccgtgtcaatgccatcaaaggaaaagcaagcgaaagcggaaccatccttcgcattcgaattcgaattggcatttcttttttgctttcaattaattgagtgtttattagcctatcattcttcccccccccctcccctcccttagtcaatttactttttttgtgtgcgttttt

SEQ ID NO: 12648 - DNA, 3109 bp, Heterodera glycines
tacagtatgtcattaaaaatttttttagggcggttccgtatggacaaaggactggcgcagcggcaaatgctgttgtgttggccaaggcatccggcaaattccgctggacatggccgggccgggacgcgcaaaggcagtgagcacaatgtgagtgggggacaaacacggtggtgatgatcagagtggccagatcagtgtttaaaattttgatctggtcccacagttttgatgttgatcagtttacgtgttttatccgtgataaggccttcatttttaaaactgacataatctgatcataattggttatttaaaaatgattactgacactaatagtatgaattttattctgatcaaaacaatggatgttcactgatctgacacgaatgatcacttggcacatcaagtcataaatgttcacccgttttcagttatttcttcgacgtttcattgggtcgtctaacgcccgcttcattcgccgcttttcctaatttggaagagattttcttggaccgcgcttctctgttggcacacgttgacagtcgggcattttctggactcaaaaaactgagaaaaatgtaattttaattcaaaattggcattttcccttttcgttcctcgttttttttggaaaattgcccataaattaaaaaagagttctggcatcatgttcatgctcgagttttacgcccctccccttttcagcacaatttcaaactgccccgcactggtcagctggactggcgttatgttgcgcgaaaacccgcaaattcaaacactgtcagtgggcgcccaactctcgagactttaccccgaaactaagaatagagagcaacaaaaaaaaccagtctttcccgagtcgagatcatgaagaaacaccgattctcgattgcagtgcggtgctgaacagcggcgcgttgcgcgagttgccactgctcgagatgggcccgcagcattcgctgcccatggaacgcatcgatttcagtggtgggtggtagagagcggaaatttctaattttctgatcccgctgcgggacttgaactcatcacgcgctttaatccacaaaatcccgaaatcctgcgtttttcaaaaaaaaatgcgggattgtggattgggattcccaaaaatcccgcgtttgatccagtcccactccgccggtctggagtaggtagtaaaagtgtttaaaatctcctctcattttgtcattgtttattttttgtttcaggcaattgcattgcacaaattggagaaggtaataaataaatatacacacatagacacatcgggaaattgtcggaatgcccttttttgattgccggtttcttacgaagttttttggtgccatcggaacccggtttccgatttctgaaactttttgagggcgtcggttattttcactgatttgcttagatttaatgtttaaatttcaaattgcacaaatactatgtgaaacgccgcccgcttaaggtgcgctgcgcaatgtgcaggccaaaacggtgtcatttgcggacaatgcgccatgccttcgcgcaatcaccggaaacgcattcccggcatccaaatttgtggagctgtgcgtttttttttatttagaattgggaaagagttccgccagctgccattatcattagctgatgtgctcgagagtcttctcgagccgaagatgaacagacagtccaaccgctcgcaaccattttggcacttttttccatcatttccaggcatttgtcggcaaatccgagcctggactacattgccgagactgcatttgccggcctggcacacattgagcatttggacatgtcccagaccgacatcacggcactgcccttcattggacttcgttcgttgaagcaactcacattgaaggtgtttaaccttgttagctgagttatgcgctgataatttaatagcagatagctgattaaagtggctctactcgaaatttcctaatatccgagattaagagacgaaaaatgatctcttttttcttggcacgatgtcgtgacgtgattctcgagcaccctagatgtccaattgaaacccactgatcattctttcccccggcgggtcatttaaattttgcatctgatcagttttctgcccaggctctctcattgggtcttttgatcagtcatcactttctttggtcactcccctccacgaccgataattagctagtttctcactagcaaaatattttaatcaattatgttttgatcttttaaaacttgtcgcttggcctttataccaattcctaaaatctgatcaaaggacgtgccacgcttgaaagtgttgccgccggtgttggcattcccaaatttggtgcgtgccgagttcacctatgcgcaccattgttgcttcttcaaatatgccacaagggattattatgaacggaaaggcattggcggcaaagtcggcattggcggcgcaaaaagccaaacgcgcgagttggacgaaaactttcgtgccattcagcgacgtgtgtgccgacgacggcaaacggtggcgccggaaggcgctgaggttggtgcgtgaaaatgaaattgaaatgacatttcaaatttggacaaaaaaaaatcaattcgcaaataaatgcccccaggggaaaaaagtttttccgccaaaaattatatttgatttgcattttgagccaaattttgaaataataaataagttttaggttaaaagtgccgacaaatgtcattggtctagattaaacaatattgatatcgaaatgttttaattttttccatgtgtttcttgttaaaagatttttgggtcaatttttaaaattttagcaaatttttggggatatataaggccgcacctaaaactgacaattttatggcatatatcagttaaacctcaccagataagtaaaaattatttcccagtctgttgatcatggccaatcatcgcgctctgctgatgctgatcagcaggagaacaacaacaataacaaccgaagcagtagtggcgccgccgcaagacggcggcggcgccaaagtcggcacattgtcgcgcatgacaacgcgggggacaaaatattcaagcagttagcggaatgtaacgaaacatggaactgctgcaacagcagcagcaaatgcg

SEQ ID NO: 12649 - DNA, 1555 bp, Heterodera glycines
  unsure (1)..(1555): unsure at all n locations
aaggtgtgcaaaatttgctcaatcaatggtggagtttttgggtttttgcggacgtttgtatgctgagaaatgacactttattccccagctaattttattttcagttttttaatagatagcacaattggaagagataggaaagatgagagtgcgtggaaatagtgggggaccattcctcctttgtctcttccccccgttgcaacccatcgaaaataaaatataaaatttgtttggatgtatttatttggctcttcattaaattgttgttgtggttcgttcggctgacgccgtttcccgccgtgagtcctctggactcgattaaaatgtagcgggaaatattcttgtgtgttgatcacacctgtgacccagtctgggcatgacatgcgcattgtctgtggcggttgcattcggtcggagtcggcccggacggaccaccaaatttttatttaaacattcaaaaatactagtgcaaaagacatttttttttaaaaaaacaacagtttatttcctctaatgggggaaaattatttggtcagttattaaaatataaaaataattatatgtggcaaggacgtagccagaggggtgaggtgaggtgcggatgagtgatgctcgagagtcgagaccgaaaatttcccgagtgtcgagacttaaaaattaaaaaaataaatttttaaggcttttctaactattatttttttgttgctatttttataaggttatttataatttgttgtaatttattaatatcgagcccctcctcattattcacctgcatgtagcaccattgaaagtggtgctcgaagagtgaatgcaataatgagagaccacttcatgttgcgaggttggaaaggatgtgagagtggaagaaagaccacttgtgagagattgtaagaagagcagagtgatgagtgaaaaagttggaggccgcttttcatgggattgggagggatgtgagagtaagtagaaatagtgggggactactcccactttatctcttccccgttgcatcccatcaaaaattaaacttaaaatctgcttcactatatttattggtttatttgtaagtttttgtcgtggtgcgttcggctgacgccgtttcccgctgccattgtgtcctcactgctcggatgggcctcgttgaataaggcgggaacagtcagggagatctctcccagtgacccggcctgggcatggcactcacattgtttgtagcggttgcattcggtcggagtcggcccggacggaccaccaatttttttttgaattttcctataatttatccaatcgaatatttacacagtttttgggtctttttaaatcataaatcttacacatattgtcactttaggtcatagatataactttatctaattttgcaagccctgataataagtaccgaaatcccggtttaggggctcgagtcaatagacttcacctgaaactcaggaaaataaaaattttataaataaaattagtaaaatataaatttgttcaaatccttaatttgtttctaaaaatttaaattttagcccaccatcacttgntttatacc

SEQ ID NO: 12650 - DNA, 872 bp, Heterodera glycines
ttcgtccggaaacaccgctgccattcgaggccggggaaaggtgagagaaccgttggcttactcccaacccccccccccccctctcgaatttggacaaaagtcgacaacttttcgagacagacattcgactttttcttcgaactcgtcaccgtaattggacgaaattgacacattcacttttatttgctttctttttctacccattttgcccgattgagatgacaaattggatgcccaagaactgtttgatcggagctttgctgttgaggacgaggaggaagatgaagaggaggaagaagaagaccatgaagaaggggaagaatgggcggatggaggaggagaaatggaatatttggagagagaagaagaggaggagtgtgaaaataacgaacagcgaaaaagagtgtggattaattaatactaatgaatgatggttgaaaaggcaagggtacgagagaggggtactttcctttttatggccaagttttggattttaacaaattgaattgtaagattctttaaaaaatcattgccacatttggaccaaaaatttttatacggcttttctacaagatttaaactcttctgcctaatcaactcgtacaaacggactcgctcagttcggccccgcacggttcggctcagccaagttttcggtctataacttttttctttggcaaccaaatccaacaatcttggtatcattcgaaagctctttacatactctctattagctttaccaaaagcgaaaaggttttcaagcctggaaaaaaatattaagaaaaaacttcaaaaatttcgacttttcgcaattttcatgtataacttttttaaaaggtgtctaatcgcgaatcaaaagcttagaaaaaatt

SEQ ID NO: 12651 - DNA, 918 bp, Heterodera glycines
  unsure (1)..(918): unsure at all n locations
ggcgagatttcggcggcgagattttggggtgcaccctgacagtagtccccccccccccccctttttcaaaaatttttgaaaagcgcgtcgctaaatgaaaaaaaatacatttgtaaatttaatgggttatttgagtttctttcttcgcaaatgatttgatccgtctacggtccattttacaatttcagcaccttttgctgacaaatccgttgacgctgctgagtttgaccagcacgagcagtcggcaaaacgggcgaagaaaggcaccgaaacgaagtcttttttggcacaattctcgccggaagaacggcgccaaattgaaaatgccgatcgggcgggtgggcagaagacatttatttatttaatattaaaataaaataagatggattttaagaaacattttcatattttattttaaaaatccttaattcattttcctttattttaataatgtataaacacaaataattgttttatttttcaggtgaattggactctcgcggacagcttttttcgccgtctttaacaaaaaaattgatgaaaaatcggccaaaggaaaatgtaattaaaaattgaattcgacaaatgacaaattaaacccccattgacaaatgagtgctttagtctccaacttcctctgcttctgctggtggttccaaagggcaaaaagtggcgaaatgtccaatgaatgctcaacaacgaatcgccaaaaaattgggattaatgcgcaaaaagaattaggaaagattgttattgttttcaaaaccgaggcccttcggaaacaatttttttattttccttaatgaaaactaagaaaattggcgaaatttttactgacttttttgcatccctttaagtttttgtattttattagattttttgctgaagattcacgattttttactaccaanattttca

SEQ ID NO: 12652 - DNA, 824 bp, Heterodera glycines
ccacttattcttctccacttttgctaaattgtttactttagacggtgtcaactgatcagacgaattcggccacatctgaccctcgtcctctgcccgttgtcaccgagtcggtgccggtgagtcaatagcagttactgaaaaaatgtaaaaccctaacaattttaggaagaatcgacttacgatccgccttgggacgaccgccctctgcgtttcatcaaaaccatggctgctttgcaatcgcaccgatcaacaaatgtaattgatatctctcctatctttagttgctttttaaatgttctcaattaatagcaaatttatttttcttttattgcatttttgataaattgtgtttattttaggtgctgcccactgttccctcaacatcggccgattcggaccctcgtcctctgcccgttgtcaccgagtcggtgccggtgagtcaacagcagtttcctcaattgcaaaattttagaaaaattttcaattttgaaaacagcctttgtaaagtgtaaaaatgtttatctgttgaacaatggataattttgaatttgttttggacccgggcccagccattttatggccgtcttgtttttattgaatcgcagtgtaatttttaatctttcttttcgactattaaaatcgctcattttattttagacatccgatcttactgcccttttcgcggagtttttgcgcaccaactgtgttggacatgtgcccaaagagtttcttgtcaaccatctggaggaggccatcaaaattttgaaccttggcggcggacaaagcgacgacaattccaaaatgtccaagtttcgcaaggtatt

SEQ ID NO: 12653 - DNA, 1944 bp, Heterodera glycines
ggccgattcggaccctcgtcctctgcccgttgtcaccgagtcggtgccggtgagtcaatagcagttactgaaaaaatgtaaaaccctaacaattttaggaagaatcgacttacgatccgccctgggacgcccgccctctgcgtttcatcaaaaccatggctgccttggaagcgcaccgatcaacaaatgtaattgatatctctcctatctttagttgctttttaaatgttctcaattagtagcaaatttatttttcttttattgcatttttgataaattgtgtttactttttggctgccctcctcaaaacggtgagtcgacagcagtttcctcagcaaagttttataaaaattgtcagattttgtaaacaaccaaaaaattactagcctaattcggtcgtgttttatttagatatcggatattgttgctcgtttgacggctgtcgtggacgccaacgagcttacgcgtttgccccccgacgttgtagggcacctggatgcggctgttacccacttggaggcatcagctcaacggctgaaccttggcggcggacaaagcgccaacactcccaaaatctcaaagttccgcaaggtattgtttcattcattactcaataatcgaacaggacgggcccaatggggttttaccgggtcgccgggtatcactttcttggaccaaccaccgggaagggccgcccgataaaaccctggtttttgacagggcggcccggccccggtcaatcgtctaatccgggtgctttcaaagtaccggttccacgtaaataaaaaaataatggataagttaattttttcgggtgtgtgacaaaatcatataaatttttctttagttcattgcgacgttgaagacgaagaagaaatgagtggacaccggaaatgtcttccaatttctcgccgtacacaaataccaatacaaacgaacccttaacactcacattcaatgccacttttttgttttatttttcgacatttgtctcatggtttttttcattaacataattttcttttcctgtttattttttgcttgcgttttccaagataaaggaaaatttctctttgtgcaaatttcttacacaatgttttatgtgttgaattaattggtcggtaaaatttagcaaattttttgcgattgcagatccagcgcataaaaccaaatccacccctccccccttcgataaattatccgttaattgaactttttttaatactgtttcgacaaagacagacaataacatgacaaatacacagcatatataacattgatcattccatccgatttcctcataataaagacacatcagtggcgtgcctagctgctttcgctgtcgtcgtcggtaccagtcttctcatccttctcattattcttgtcaaagattttcgaatccacttggccaagcgtcgcataatcaggatcagttgctgaaaagaaaaagaattattaggtaaatccaacgaatttatccatcattttttacttgtcgcataaccccgtccccctcctttcgcctgctgtttgattggcgctgtttttgttggtgcattattcttcacaaaaatgtccgggtcaagcttggccagcgtcggataattgggattgcgcgctgaaaaagagataaagcatttgaattgaacattctctgatcaaaaaatggttttactcgaaacgaatatcatctgtccttcctttgtctgctgcttctgctgatttgacgttgcttttgttggtgcattattcttcacaaaaatgtttgggtccaattggccaagagttgcataattgggatcacgcgctgaagggacagaggaagaagcatttgatttgaacattcctctgatcaaaatgctgttactcgaaatgaatatcggtccctgcttggtctgttgatggatttgttgtggcggttttgttggcgcatttttctcaaaa

SEQ ID NO: 12654 - DNA, 3688 bp, Heterodera glycines
  unsure (1)..(3688): unsure at all n locations
tccccggtacgaaaacggcggtacgaaaacgaccctgaccgaagacatgaaagtgttcataaaaattgttgtttttgtttgaatgttcagaattcaatcacaactcaactcacgcgttcaatcaaaaaatttatgtgttcaattaacataggtaaactagttgcataattagattagtacttgaaatagataaagatacacaaaattcttgggtttttctttgcccatccccgtgccaaaaaaagcgcaaatttgagccgcaaaaagcaacgccgagaaagccaaaaaaagatatattggcaaaaaaggaaaggaaaaatgagtaagtgaatgccattctttggatttattgggaccgtctcaaaaaaccaccaaaaaagaaaatgtaaaaataaaaaataaatttctaaattgaaaatttaatttaattttttagttttatttctgctgactgttggctttgtgtatttgatttgcttaaaccttcccaacttggccttggaattgcgctgatcagtcactgatttgacctttacatcgatgaacacttcaaaacgcgcaaatggacattgaaatctattcaaattgatcgaaaatttggaaagaatggcacaaagcaaatggcaattgtcaattcctcttggaaaccattgccaattccgcaaaagccgttgccaaagaaagtcgtcggattcgaagccatttcaatagggtaaaatggattaattaaccattttcaaatgtaaacgagtccattaattgattttcacagatatatcgactgcaataccatcgcttttctccaccgttttcgtccacttttcgccgcctgtccaatcaatttgtccatcgatacgacgaatgatcgcatttcggagttcattttgcacaacatttggccaatgctcgggaaaaacatccatggcattgaaatgtccgcctcgtttttcaatcttttgcgacaaatggcgccatcaattcttagcgaatgtccatcacttcgttttgtcattttttatgccggtgatctcttcgccgaattccctgccgatgacagtgccgcggcatcggatggacaaatgttggccaaatggcttttcactccacgtccggacgatgtgccaaaagtgctcaaatgctggttggacactgatgatgggaatttggcatcgaagattgaagccttcaaagcggtgcttactaataatttgtttatttggcactttggtggtctttgggattcgttgataaatttttataaatttttcctcattttaggcatttctcgatgcgtcttcccccgccaatttcatttttgtcatttggtttccgccgtctgctgattccgttgtgccatttgaactgatcaacgaatttactcgtgaacaattggcattggaaaggattaacaatagcgatcgttttctgctgatccgttgtccaattgtacgaaatgcgagcaaatggacaaaatgggagaaggaagcatttaattggcgaatttatgatcagcggaacagaattgacattgaaatttataatgaggatgacatcggcgatcggtcagcgaatagtttttcaaatttgtttatttcatttttatttttaggcttctcgacgaaattcccgacccgagtgatcagcagaagtgaatgaatgaattgttaagaaatgatcgaccaatttggattatggaattattgacgtgatcataaacattgttttcttttttgtaaattggactgttcatgtttggttatgttatgtcattatgatattttgtggttttctaaaacaaaacatacgcttcaattttcaatattttccccagcaaatgtgttggaatgatcaacttggatttgtgttattatgtcattaggataatttactgattttctgaaataaatgtgaaaatattattttggggtctgaatgttttcatatgaaaagttaggcccgtcaattttttattcacccaaaatggacagtggtgcactttaggcgtccaatgttatgtgaatggatcatttgcagtttaaatttggaaaatgaaagtctgtttcgatgtgctcattaaatgtttattttcaacatggatttatgcctgaattagaaataaatcccaaatttcttttcaaaatttcaggtgaattcgagagttggaccattcccgaatttgcccttcaatcgccccaccctgtcctcaagaatttccatttcagtagcagttccatgtcgttgtcgcagtgatgtcattatgcaaatggaatttgacctaattttaaattaattttttattaccacgactgttttgccaatttcgcaatccaatcacttcaaacaattaattccctttccctcttttcattcagtttaatgttgatgttgtttcatttcatttcgtttgtgtgttttctctcaatttttaaaataaaatccgccgtttcccaatttcacttctctttcaaagtgttgacaaaacaaaaacaccaaatctacacaaaaacgagaactattccatttaaattgaccatttgaacagttttttttctctttcgtttttataaaggaatacaagctaatttttcttaatttttttggttttactaagctaatttcaaatccgtctaaatctctcaattatttacctcatcaaaatgtcagaccgccgaaaagaagcggaggcaaagatggcaaaagcaatgtaaaataattaaaaatgccaattttcaatttcgattttaaattttgtttcctttttttcagtttcatttccgccgacggttggctcaaagtgttcgatttgctgccgccttcccaacttggacttgaaattgcgacgatcagccaccgttttaacgcctacgtggacgaacatttcaagacgcgaaaatgggcgctgaaatttattcaaattcgacgcgaaattggaaagaaaggcacgaagaaattggaattggccaatttggatggagaaaaattgccaattccgaaaaagccgatgccaaagaaagtggtcggatttgaagcaatttcaataaggtgagatggaagaattttgttgttttcaaatgtgtaatgccattttcacagatttgtcgacctaaataccctctcttttctgcgccgttttcgtcgtcttttcacctcctcgccaattgtttttgccatcggttcgacgagtgagcgcattttgtttttgattttggaattgatttggccaatgttcgcgaaaaacattggttcgatgtatttgatggcggacactttcatgcgtttgcgaatattcgaagcgtcatttctcagcaaatgccaatctcttcgcattgtcaaattttgcgatgacgacaatttcttcatcgaattcccggccgatgaccatgccgcggcatcggatggacaagtggtggccaaatggcttttcactgccctccctgacaatgtgccgccgaagatgttgaaatgctcgttggacaaggatgatggctttttggagtcggacattgaagacttcaaagaggtgatttcggattgtttaatccagcacttttacgctttttgggattcgcttacaaaaatgaatgatttctcgcctaaaaagacattttcgaatcaaaaacgtcccatctgttggcattttattattaaatggccgagtgccgtcccatctttggctntttgtgccgct

SEQ ID NO: 12655 - DNA, 3461 bp, Heterodera glycines
caaattccgcctattgtaaaacttgacggatgtataaaaaaagaccatacaaaaatccgcttatttgtaaaactttacgcacttaaaaattaatacaaattccgcctatttgtaaaacttgacgcatgtattaaaaaagaccatacaaaaatcagcctatttgtaaaattcgacgacactaaaaaattaatttaaaaaatccgcttgtttgtaaaacatgatgctcttaaaatgacttatttgtaaaacttagtgaacttaaaatgattacaaaaatccgcctatttgtccgcctatttataaaacttgaagcacgcattaaaaattaatttaaaagtccgcttatttgtaaaacatgacgctcttaaaatgatacaaaaatccgcctatttagcctatttgtaaaagttggtggactcaaaaaattgtaaaaaattcgtttatttaataaaatttcttaggcttttgctttgtgtatgaccaaagaaatttaaaaatttttaattaattttttcaactgactgggaacattggatctgcgcaaccacaaacgcgcacaacctacaaatacacatactcattaattaattaattttattaattaattggctaatttcaaatattttgcacctcacgttgtgtgcaacttcgatgacaaccttcgattgaataattgtaattctaaaattattagtttactaattttgcatcaaaatttttttaattaaaatcatttagttattaattaattcttttgcctacttcttttttgttgtagatgtaccattcggcacgttctccgccttcgcggcaatgtccgtatgggtgctcgaggcggaaaaattttttcttaattaattgtttattttttaatttttaagcatttttttggcataccatacgtacgccaaatgctgataaagtgccggtgggtgcgttgtaaccaaacgcgtccacaaacggcacagtccatctgggaaataaagtgatcaccgatcagcaagcattattagggccaaaagttaatcagaggctcattaataaatggccagacctttgatcagcagatcaattaccaaaattaatcggaaaagtgcccaaaataattgagttaatttatcaatgccaaaattgttcatgaattagtcagttaatgcgcctttatttccctatttccccaccccgcctaatctttcccacttgtcatgcacagtgatgcgaaagccgacagcttctgtgatgggcaaatattcggacacgttggcgtaaaccagcacacgaaggcctaatacgttgtttaattttttaaatttgttattcatgcaagaatctaatagggtgcatgtactgtatttaccgtaattggcgcctgcccgatgggccgtcacttgagcattacggtcccaattgaaggtgtaacaattgccataggtgggatcgtggaacaacttgaagtccctgatgagggtatgaattttcataaatttaatcataaaaaaatagaaaattcatttacggtattacagtaaattttggaaaaattcacacttttcaatatcacagtcatgttgattgaatgagcatttgaggatcaactcgtccttggcttgcgagaggcgaacccgttcatccaatggcttttcctccactgcaaaaatcagattttcgcgcgcttggcctttgatcgcaatttcgtcgtgcaattcccaaaaaaaatcttttttttaattaaaaaaaagatttattaaatcttttacacctcaaagcccatggcttgctcaatgatctgctgctcttccgtgtcatttgtgctgctgttgctggtttcatatgtcttcagtgccaacaccacagcttgggatacttcgccacggcgtcgaaccccctaaaaataatacgaatccaatgaaaattcgcaagcaaataggttccggtacaggatccaatacgttcccccccccctcgcggacgagttcgccctgtatcgttgttccccgccacccgattttataaaaaatttctagcgatttttgtaagaatttttgaaaaaacttgtaaatcatcaaaaattttcaataaattttttttaattttttgtcttcaaacttcttattaaaaaaatttccaaaggaaatatatgaaaggggggggggagctgcttctaaggcttatggtctgcgctataaaattatgccaacaatggaatgtgccaaccgacttcagtcagatggctgatattcaacaggttcaggtcatcgcccggcatcattgtggaaccaaaaaacacagcgacaaaaaaatggaaagaatttctcttaatgcgtaggtggtatataatagggctgcacgggtccgggtatttgggcaaaaaccgggtccgggtattaccgggtattgaaaagccgggtaccagttttcaaaccgggtccgggtccgggtaaaaccgggtattaaaaatttttcaatttatttttttttcaaaataattaccaaaatgcctttaaaatataaactaaaaagatatttcaatcaaaaatcttcataaataagcagttgattattctccaaaatcttcaataaggttttcatcgacaatcacttcctcatcaaccgcttcatcatcctcttcctgcaattgagtattaggtgcaagcaaaagctggtccaaattcgcttttataatcaaaattttttcgacaagttcaccagataagctaaaagagaaatttttgtcaagtaataaaattttgaaaaccaatttcgaagcctattgctataaaaaaaaattaatcaatttttttatttccctcaactttcacccagacccccattcttgccagtctattttatacccggttgaacccggtcctaccgggtcgggtattggattttcaaaaaaccgggtccgggtagtgaaaaaaccgggtatccgggtatgggacccggtcgggtacccggacccgcgcagctctagtttaacccaaacaatcaaaaaaaatttttaaatttaaagttggtgtaatgtcggtttttccagtgtcggattatctgcttgtgtcggattttccagtgtcggattttcctagagccgttttatcggcacctgaaagtaaaaagtctatacttttttatgatacagaacttcgaaatagcattctctccataataaatcgaaaataaaacttattgcacgcattgatcagcgtaaatctcataaagcaaattctgtttaagaatccaagtgatcagaccgaaatcaatttatagagttggctaaaataaggcttcaagtgatccggggtattgacaattacaatatggggcattatgacagtttatggacatgctgacaacgcaatacattgcaaattcagcccggtcgcatggtgtagttcagtgtatgcaggagggcgttgagcgcgttcacgttgatgttcagctttgacgccttgctttgtgca

SEQ ID NO: 12656 - DNA, 990 bp, Heterodera glycines
tcctttgatcgaccaaatttctataacaaattaatcggcctacgaatcagaaagataaatattagactggtgttttttcaaataaattatatcattttaaaaaattgaatttttttttccttttaaaattctttattttatttcagtgacgaaaagtttagtgacgaaaggttcagtgacgaaacgttcggccacccaaaaaatttgggtatttgaacatttttggccataagttttttttgaaacttgtcgaaattcctctcttattgcggttctatttttctagagaaccgaatttttggtctaaaatcaaaggcgttaaatttagagtctcaattcgaaaaattgagaggatttcaagttagttaagcgaaaatatctttaaaatgaatttgattaaatttcttgtgaaaattaaataagaaaaaaaagaaaagtgattttattatattggaaatctctggacaataaaaaggcaaaaaattgtcaatagaattttggccagctaaaagtaaaacggcggcctaatgggttatcggacgttaagtgatttattggccaaaggaccgattgttggccatcaaaacaaaggcgagatgagtaattaatgggccgagtattaattggtttttgtttcctgtggcggatttgttgggaatttttatttgaatttccgattaaatattttaaaaagatggtaaaaataggaaattaactgtgaattaaaattattatttaaatattctaaatttcgaagcaaaattggagagaatggcgcaaaggaaatggaaattgtcaatttcaatggaaacaaattgccaatcacgcaaaatccggtgccgaacaaagtcatcggattcagaggcatttcgaccgagtaaaaatgaattgaatttgataatttatttatgcacatcacactttcttttgattttcagctatttcgacaaaaatgtgctcactttccttcgccgttttcaccgttttttc

SEQ ID NO: 12657 - DNA, 1022 bp, Heterodera glycines
acaaagccctaaatgaacactaaaattgtgctttttcttcttctcccacttctcataattggttgggtcacgccgacaaatacgacgaacgaaaagcggaccgataagggaaaaggattacaacgaagtgcagaaggctctgcctttagcgcttatattaaatccgcttttcgtccgtataagcaaaaagacaatggcaaaaacgcgaagaatgaaactgatggccagcagcgagcggatgtgataggagacaatgagaagttgcaagcggttgcggcagaaaatgttgatgaacagcgcgcgtatacaacaggagacaatgagctgttgcgagcggtttcgacaggaaacagtgagcagtcccgagtagttgcggcacgggatgatgatcagcatagagcaatttcggcaggcggtgttgatctgcaagaaatggatgcggttgccgaacccatggacgtttcagcagatgggtcgcgcagtgcgaaaacgcaaaagccaagcggcggcggagacggaagcacgacgtcgatgcgcaaaagcggtgtaaatcagtcgtcgcttggccggcacgaggacgcgcaacagtccagcgaggcgacattatcagcggacacgccaaatgcggggaataatggcggcgccgaaaatgacgaccacgaaatggccgagcgggatggcgaatcgcagaagaaaacgccgaagaaaaggcgtttaatcaaacagaaaacaatggaaaagtccagcaaacggtccgctgccgaaaagaaaaagaatgtggacagtgtaagtgccagggttgtacaatgagctctactgctctcctctaacagtcgcacaaatttcgtagtgatacgcattgcaaaactcgaaaaaataaaaaacagcggccgcgggactaaaaattttttagatattgtttatgtagaagtatttaaaaaattgaattgcttaaattcaggactagcatttggttacaattttaatcattgtccgtatttcagcttattgtcctgatttta

SEQ ID NO: 12658 - DNA, 3504 bp, Heterodera glycines
  unsure (1)..(3504): unsure at all n locations
atcgggatcacacaactttcccttattaataaaaaaaatgtccttgttttgaaataatcattaatatttatacccaatacatactattttctcatttttgcaccattttgtgcgtttttagtactgaaaagccaaacattttgcagttttttttaccaatcatacgattttttgtttctcagctttcaatggagcgaagtgtgaattcgaaccctttcaaaagtgcagaagatgcgccatcattagcctcaacgagccaaaacaatttgctggaagcgcaagtcaaagagcaggccgcacaaattcaaaaactgacggaagttttaaatgaactacagcaaaaagtgaatgttggcaaagaggaagggcagcagagcacacaacaacctcaaacagtagcagcatcggtggaacaacaacaacaactcctacaacaattacatctgtcccaagagccacccgaacaacttggacaacaacaacaacagttgcccatggcacaacaacaacccgttgctgatgttcctttgcagccacaaaatgccgccccattctcagttgctcaacaatcgcaaccacaaccatttgcctctgttctagacccaattactcgtcagcgtctttcagtccgaatgataacagctgggcaactgttagccgatcgtcaacaacagcaacaacaacaactacgaatacagctacaacgacgaatgcagctacaactgcaacaacaacatgagttgatgggttcgccaccggcgtcacgttcgtccagcccaaaccgactgaatatacaacatttgcagcaacagcgaccacagccagccgctagacccctgacaagttccaacgtaagcaaccggctaatgtcagacttataaaaaaatacttacaaaaaatgaaaatccccggatccggaaatgtaataatagagttggatttaaaaagtgctataataaccgcccaaaatttaaaaaaattttcactagacttccctaaatatgaaaactttcctatcaaattaaaaaattgctaaaaaaatcattgtattttaaaacgactcctgttttccctcttgtaataaatattttaattgaatattttcataaattattttttttttattaaaaaatcgggttttaaactatttatttgtttttgtttttaaattattcatgctttgttaaatttttttaacgttttgggattttttgtcaataaaagctgaatgtaatataataaaatttttcaaaatcatagctgtccccgatatcaaacgcgcgacgtgccaaggagcagcaacggaagcaacaacacgatgctggcaccagcagtgggtcggttgctggtgaagtgcaacaacaatggcaacagccgcaaggtgactatgccattgatgcaacaccgctcagagcgtctataccccttcgcgaaggacaacccaaccaagttggcacttctggtgccggtccgtcgggctacagcggtgatcagcagcagcagattcaacatctgcgcatgagtgccaatgtaggcggaaatttagtcgagagtcaaagaagacattcgagagttgaaaaggcaaaagtaatgttgttgcattggtaatttattcaattaggataaatcgttttaaaaaagtttaatagccgtcagggctttcgctttcgcaaattttgtactctcgcgtttcgcatttaggcatgaaatgcgatattacacactaagaatgagggatgaaattcccctaaaattttcaaatttggccaacaaattggcaattttcactgaaaaccttattaaaaatgggcaaaatttccaatttttcaccgatggcgtctaacggcaccgcaggaccccaaaaactcatatttttttttaccaaaatggcaaaatttggtaatttttggcggaaatctgttaaccaattgatttattttcatttcgcttttttgcttgcgcaaattacgctttttgcattttatttttcgatttggcccatccctacataaaagatgcaccaatttatgtttttaacttttattcatataagtttttttattttatttttttaaattgattcactaattgagaacagaaaatcccaataaaaacatatataaactttataattgaagtacataagtaataaataagatttgtatgattaagagacatatgttatagaacaagttttttttaaaaaacaaactttattgtcgaaatcaatcactgtcgagatcactcaccactgtcgaaaactaacagcaccatttatcatgcttattttgccaaaataagtataaaaaaggtgaaaactaagaatagaatgccaaaaaaaaagacttaatactctttgaaaaatttcttgagtaggcgattgggtcggcggtgccgataaacgtcgctgtcgaaaaagttatctcagacagtatttggcataaggtcacattaaattctcaaaaaaagaagaccgcgggataccgctcaaaacccaaatttgcagaccccgctgctggattgagattcaaaatttttgagggacgagattccgcaggataaatccagcatttccgtaaacctcgcaaatcccgcattgcacaaaaatgcgaattgcagtgtgtcgcgaaaatctcgcgcggggtcccatcccacgccggtctcgattaattactgctaaagatttgaactaattttatattattatttaatttaatatattatatttagcaaatagccgtaaccgcggcagcatcggatgataatcaaattaagaatgtggaaaaaattgtattacaagcaatcaaagaatgtatcaaaaaaacgctaacaaaaagtggcattgaaccggaaatgttcaacctctcattaacatcaaacaatgaatcaaacaataaatacctaaatttcattcaattaaacagggacaatcctgatgacataattagcgaactgatgacctttttccaaccgaataatggagatggttgtggtgatgaggcgacgctaattatgcaaattttggaggagattaccacggaaattgaaagctttgacagcaatggtccgtcgtcaaattcggcgtcatcggtggaaagagcggcccatcatcagaagaagcgctttttgttcgcaaattatcgcctctaccacaaattattgaagctgctcagcgcaactgctcagcagctgaaagatgggcttagagaagcgcccaaccactttcaacaactgcacaaatgggtcactgcgatggtcaaaggcttccgacaaattttggagaaatttgagaaacaaaatggccacgatgaagtggggaccaaacgngaggggcgggggggggggcgggggggtgttgtgcccctgtangggggcataaataatcataataatttgaggggtcgtgagcagcgatgccgcaagtgttttagtgcttttttggntccgtttttcataatttgagatgaatacgaactgacacgactgttccgaattcagtttggc

SEQ ID NO: 12659 - DNA, 1363 bp, Heterodera glycines
tggattgagtcccgttgattggaatgttggtggattgagtcccactgattgaaatgctggtggattgagtcccggcgattggaatgttggtggattgagtcccactgattgaaatgctggagggttgagtcccactgattgaaatgctggagggttgagtcccactgattgaaatgctggtggattgagtcccgttgattggaatgttggtggattgagtcccactgattgaaatgctggagggttgagtcccactgattgaaatgctggagggttgagtcccactgattgaaatgctggtggattgagtcccggcgattggaatgttggtggattgagtcccactgattgaaatgctggtggattgagtcccggcgattggaatgttggtggattgagtcccactgattgaaatgctggtggattgagtcccgttgattggaatgttggtggattgagtcccactgattgaaatgctggagggttgagtcctgttgattggaatgttggtgggttgagtcccagtgattgaatgctggagggttgagtcctgttgattggaatgttggtgggttgagtcccactgatttgaattcgggagaattgagtcccaatgattgaaatgctggagggttgagtcccgttgattggaatgttggtgggttgagtcccagtgattaaatgatggtggatgtttagaatgccgcagatttgagtcccagagattgaattgctggtgggttgagtcccagagattggagaaaagccaagaaaatgatgcgagggcgcgaagcggccgagccagtcgattttatcattcataattctataacacaatcgtactgcctagcgggggatgcgccgaaggcgctgaccccgctagtcagataaattgaattagcgctaaattatataatttttggcgtttcaattcattttgtcggcgctagtttaaacgctgcccgtcatttcgtcccgcgtcgtttcgtcctgcgttgtttcgtcccgcgtcgtttcgtcctgcgttgtttcgtcccgcgtcgtttcgtcctgcgttgtttcgtcccgcgtcgtttcgtcctgcgtcgtttcgtcccgcgtcgtttcgtcccgcgtcgtctcgtcccctaagccaaaatgagtcgtttcgtccccaaattaaattcttttttaaaaggttagtgcttattttggcattttttagagcctaaaaatccgatccccagttaatgaattaataaaatactttattaattgagcaaataacataacataattgaaaaaacataaatcaaacaaattctaaggggcattcatcgaatcttccgtattttcatagtccttcaattttcctgcgtatcct

SEQ ID NO: 12660 - DNA, 2266 bp, Heterodera glycines
cgttgcgtactttcattttccgccatttcattccgtcttcgtcttccattttcactattatttccattgcatattcgtcgtcattgttcaactgcgctgattcgcatggtaaagtttttttcatgaaatcattttacagtgatttttttggttgtaatttcatcatcgtataaaatttaaatccccctcccatttacgaatttttgtttttaaaaatgatctttccactggggattttcaaggcgctgatcagtgatcacgaacgaacctcttccccttctagaaaatgttttgtacgatttcaactgaaaatccgttttcagaaactgaaagtcatctttccacggggattttcggggtcactgatcagtgaaatgacccccccccccctgaataaatgttttgcacggtttcaactcagaatcctttttcaataactgatttttccccacatttaaggcagatgctgaacatcccactgatgctgctgttgtggacaacttcgagacgcgcgctcgccgcttcttcgacctgatcaacgacggcaacatccaacacttgtgacagatcgcaaacggaaattggtagagagacgaaaatttgaaaaatgccataattttacccatcatttttctcccacagccgcatttgccatcggacaacgaacttcttcttctgctgctgcttcttccccggttcaattacatcacagaaagcaagcaaaggacacgcaccaacaacctgcgcaccctctgtcagtgcatggcacccgcattttgttgtgtttgagtctctgaatcgcatccctttcccctctttcagcactgatgatggcaccggcaacttcttcctgagcgcatatgccatgtcagcgcaaaaaatcgccagcgattcggagtggaagaaaacggtgggttttgggggatttggccggaaattttttatttttaaaattaattcatttatttttcagcccatcggacaaactggccttttcaacatgggaaacacgtgcttcatgaacgccactcttcagccactgttccatacgcccggattttctcaactgttccaagaaaagagcgcgcagcgattcgtcaatgggtgcgtccgcagtgccggggccgtcttcgaattttcataaaattcacaatttgttttctttttcaaggaacaactcgtttggcacgaaaatgtcttattttaaaagtaaggcaaaaatgccttaagtactaagtattttcaaaattagagccgaaaagaaaaaaagtaaagccaaaaatctttctttttcaaggaacaactcgtttggcacgaatggggtgatctccggctcattctctgcgctcaacgacctgatctggtctggcaagttcaacgcacttcggcccaccgccttcctggtgagtgactctgtgcctttgatcaatccattctaatcaaatttttcctttttttcccaaaggaattctttgctcgccgtgtcaacgccgaaatggccaaccgacagcagcacgacgcccaagaatttcaactctatctgctggatgcgcttcacgaggacaccaaccgggagagttttgccattttatgttccatttttcacgctccccccctccccattttcaggtcaacaagcgacaatcgtttgaacagaactacgacgacaccgacttgggcgccagcgcttcggatttcaatgagagggcgaaactgttctcttcgtcgccggtcaacgatctgttcaacgtgagtttggagccataattcattttgtttttccgccgccaatttctaatcattttcccctttgtttcagctgacaaacatctacagggtccaatgcagcacgtgcaatacgacgagtgctcgcttcgaggtcgtcaaccaactaaggtgggtttgagtcacagacccaaagaaaattccctaatttgaatttccctttgaatttttcagcctcgaaatgctgaccaacatcgacggcctgacgctcaaggactgcctggaggcgcacttttcatcagcagtgagcagcaccacagcctgaatttgtgtctgatcccattttcccctccctttttcagagtctcgaggataaatgggagggattgtccgaagtgcaaaaacaaacagccggcgacacggagcacaaaaatttgggagattccgaaggtgctgatcgtccatttgaagagattttcgctgattgatggacactacgtcaaaaatgacgtaagtttccgttggggttttgagcgtgttt

SEQ ID NO: 12661 - DNA, 2952 bp, Heterodera glycines
aaaagattttgagaatgtataaggtttggtttttttcccggtgatacctattggcactgccattcgcattttcattattgtccaacttgccttggattttcgccggttccgctgttggctgtgttgcgtccgcgggtttttctgtcgttgtttgcggttgttggaccacttcttccactccctcctcttctccgcccactttcgtcttttgctgccgttcagtttcctcaatttttcgtccaatttgaatttgatcattttgctctttttctgcttcttcctcttcgtccctttcctcctcatttccgctttctattatttcttcttttttcgcctctttcacggggtgtggcgccgttgggggtgcaattgcccaagaaaagtgtcgaaatgttttggcggcaactggcgaagatgcttcttgtctatcaaagccagcaacattctcatcaacttcaacatcgagttgctaaaaattgtgtcaaaataagcaaagaaagacaaaaattgttgtaaatatgtaactataaatgttaaattgcctgtgcgcaaagaagcagataaacgaaccttcctctttcgctttttgagaggtgttgttggttctgaggcgggcgatggatcgaattttgacacaaatcctcctgcaagtctaacatattcttggagacgaaaagccaaatcagctgcactgccttttgtatccagccctgaaagtttaatggtaaggtccattaactaattaataacaaaaagaatgcgcaccgcgagcttctaattctttcttgactcttgccattgggagtaaatgaatcgttgatgggttcagcccacccgaatccacaattcccgaacgtcgcgaacgcgttgacgacatactgaattaggtatattgtacctaaatagaaaataaactaaagtgacaaaaccgaaagcacaaaaaggaggaaataaaaataacaaaattaattaattaaggaacgaaaagtaacattaaggcacggcacgcgaccaaaacgaataaaaggcgcgacgcgaataatgccaatgtcaatgcggaaggaaaattaagagatacgaaaaagaagaagaggaaaagccgtagaaatgtaagaaatagagaaaaaggaaaacaatcgttgcaatgaattatccaagcaaaagaaaaagtcacgccaaaaagtttcttttaatctccgccgacgcagacactaattgtaaaagcttttgtttttgcaatgatatgtgaatttcaattaatttcacagtttattttcacagcctttttcgagaatggatggagttaggaattggagttgccagcgatgtactcttattaatagaattaacgacttaaagtgtagagcgtgccaattcgaatgtccttcagtaaatgggcgatcaaaatttcttcacaaaattaaatgtttgtttatttttattgttagctaagagtaaagctttaaaaagttttttagtaccacatatttccctcaactcggcattggaaaagattgacaatgccattgattttgttgcaaattcaatcgtaccaaaaagtgaacaaaatgtacacttttaccatgctcccgttgttttgtgcgagcatcctcaacccaagtctgtgaattggacatgtccaagctgtgcacagaccaacacttcgacattgaagaagtgttcatggtgtgacacggacagagtcacgggtagttcaagcgaaattgaattcaaagcgtagataggtaactgtgattgaattaaagatgttacaacttggtactggtgctgtcagaattcgaattgtgctcttcgccagccctttcctccgttcgacttaaaatgtcctttatgccgaacaaaaacttcagcaatgaagccgggacattccaagagtatggtgagggatttatattcgtcaatcaaatgctttaaagtgttcccatataaataccacgatacaaaaacatctaatgccatgattgtatggattaaccaagcaagaaagaacaaaacttatggcataaaattaagtctggccaattattggtgttgtgaccgagcagtagtctattgctcggtcaccacaaaaaaggaacttcaagtttttagctctgaattgagcactaagtcacaaacgaatatcagaatatgcctcacccgactgatggggatattcgctcgacttttcagtgcttttcacctacttcctcccctttatctatactttttggtgcttatcagcactacaatgctgccgtagtggcgtaatgtggaccgtggcggccttatggaattaggttcatcaaaccaatgcgagagctcagaggcccgcttgatgaattgctcaagaaggaggccaaatgggaatggggagctgagcaacagaaatcttttgagaaagtgaaagaaatcacttccaggccaaagttgagtaattgccgatcacggccaaagaaattgctgattcatgaaaacggacgacttccttcaaagatcagcaaattccccgctcaagaatggccacaaaaatgcacagacactgatttaatgccatttatcaaaaaagagaccaaataaccgaaattgatggctgtctcacgtatggggcgaccgtggggtcggggtcacttcggcgcggaccatttcggcgccgcaaattttgaaatgctataacttttttatttgtcagttagctttagccaatctggcatcatttgaaagctctatgtgtgctctatatttacatgtaaaaatagaaatgaatgattcaaaaataaaaaagttgtgccacgcggcgccgaaaaagcaatgaaaaagttaatttttgaggttttttggccataacttttttgtaaactgacgaaattttttgaaattttacaggctaatagagaatctgaagagctatcgaatgataacaaaaatttttaatttggttgatcagttaaa

SEQ ID NO: 12662 - DNA, 2044 bp, Heterodera glycines
gggcagcggaattcgcaagttcttgcaattatgggcattctcacattcattcctccatttgttattttattctctgctgtccttctccccatttacctgtttaataaattacttattatttgacaacatttggatttggtcgaaggtcaaacattttattgttgtagtaaatacacaacaattgggagcctaaaattcaatatagccatcacttccttttttgggccttcatactcctatcatttgaaattgtttaagccacaactcagtccttcttcactgaccacagcaaattcgtcaaattatgcgccgattgatgaataccagacaataatgcacagtcagaattatcacgagataatggcgttttgcgagtgggttttgccgtttttattttcagtatttttatggcgctgaatgagttgttactggaataaattgcttatttttgctttttctgaaacttttccttaaatagaaaaaatgaccaatttttcgtcgacgattccttctcccagtccaatcgttcggttgggtcacttgcccaattggagcgcagggacctcgccatagtttggttacagcccgaccaaattgtcacccgtgacggtcgactgtccaggtggtctgtgtttaacgacccccaaccgacggacattgagcaaggtcatcctccccaattcgcatctcgtcatgttccattgtttaggtctgcttggcaattgttggcttttgtctgcgttggctgtcattgccgaacgacccgacattctcgagaaactgttcattacgaaggagtataaccatagaggggtctacgaagttaggtttgtggcaacataattttggtcttatcggtctttattaggctttgtattgacggcatttggcaacgggttatcgtcgacgattttttcccatgtcatcggtcagatcgacgcctgatttttgcggttgggaggaaaaaccaactttgggtgtcattgattgagaaggcacttgccaaagcttatgggaattatgccattctgcgagctggacgaactgtggaaggcatcaattttaaatggttggggtaattaccataacattttgttcttcattaggactttcaactctcacgggtcagccgacactttccattgaccttgaatatttggacatggaccaacagtcccggaccgctgacttggacatcgcttgggctaagctgataagtgcgagagaagcgcgctttctgatgggatgttcttgtggtgctggtcagtttttttgcaaatttatcttaacttcgaactttttatgctctcttggatatttgtgatatttttatgtttaaattattttggcgttatgctggcttccttttttaaattgttttgttaatttcgtttccctcagttcgtagttattgtgtttttagttttattgttcataaatagggctgtcaaaaatatgtacgaaaaatggtcataatatgtacataaatgtgtaaaaaaaatctcgaaatatgtaagaaatatgcatgaaaacccaaaatatgtacgaaaatatgtaaataaatttttttaatggttatttttttggaaaaaatcttcgtaaagtgttaaataggcacaaaatggcagaaaaatgacctaaataggtttagaatcaccttttaagattttaaaaattatttttggtatttttaggggtacatttaaaaaaaaagttttattttttcacaagaaatttctaaaaatttttccaaagttctcaaaataggtatgtataaaaaataaataaaaatttgccgaaattttggattttttttgaggatttctaaaaatttccgtaaaaaatcctcaaaataagttaaaaaaatgaaaatatgtaagaaaaagtccaaaatatgtaccaaatatgtataaaagcccgaaatatgtaaataaaagtcccaacttttgctcgcaagcacaaaaaagaaagtgtttttcctactatttagagcattgagaatccaagaaaaaaatatgtatttacataaaattaacagccctat

SEQ ID NO: 12663 - DNA, 3631 bp, Heterodera glycines
ggaatgatttcagtcctggaaggggtactgaaaaaccttgggctttattgcagcttgcacgcccataaaataatttgactacttaatgcaccgtaattttttctagaaccacttaaattcaatattctattatcaatatttacaaaatttcaaaaagggtcgctatgtttcaaaaaagatgtggccaaaaatgttgagaaaagcagtttttgagttttctggcataacgaaattttttgaaattttgcaggctaatagagaactcttagaactatcgagtggtatcaagaatgtttaatttggttgtttataactgtaaatattaaatgcttctgttttcagggaccggttccgctacggtaactacaaccgctactacggtgtgcgcaaccaaggctttgaccacgacccgtaagtgatttgttgttcagagaacggggctatttggattttccctggatgctgaaccgagcaattcggcaatgttaattcaagaaaataacctaatttgtattctcgaatccagtctaattcccgtatcccgcccgacacaaaattcaaggagttcgaccattgtactaacgcattgtttaaatttccatttacagccgtgtcgacttgtttcccgtccaatggttccatgggcgtcgcgtgttggacattggctgcaatgttggccatttgacgcttgaaattgccaagaagttgggcccagcgcacattgtgggcattgacattgacgaccatttggtcggtgtggcgcgcaaaaacattcggcattattgtggcagcgcgcaaaaggtgcgtgaacagccaacgacgggcttttgaattgtaaatgagagcgccaccgaatgacttaaatttcatttttcggtgcccaatgactcatcaaccaattaatgaattaatattataaacggtaattccttggcagatagatgactatggttttacgtatttgggtttattccaataaaacacgcttttcttacaattagctgatcggcaaattccccgcctcactgttaccaccggcggaggaggcggaagcgtcgtcaacaaatgctgtcaacgacgacggcaaaagtgccacaaaaatggagtcggaaaatgggaaggaggaggggccatcttcgaccaccacaaagcccgccgttctcccatatgggcaattcccaaaaaatgtgtggtttttgcgcgaaaattacgtgctcgactgtgacgagttccttgaaatggttggtccatattggtttggtatcatatttttatcataataattagctaattgtaaccttctttgaaagtccggtacccaatttaaaaaaaccaagccttctcttggtctatgtatcataggcgtaactgaatttcacatgttacttttaatcatcgacatttttcgggaatgccatgggtttttattggttgacagaaattcgaatgttccccaacgggtcattaattgtcaatcaaatttgatattagaaaacattttcagtgtttgtttttttctaattttctccgccccaaaggttcgcgaggagtacgacgtgattttggcgctgagcatcaccaaatgggtacatttgaactggggcgacgatgggctgaaacggttcttgcgtcgcacctttttgaaccttcggccgggcggacgactgctgttggaagcgcagccattccccagctattacaaaaaggcaaaaatgacggtgagtaattggagaatttgccactaattggtggcatttgttttttgaaggcttgtcagtatgtttgattttttacaaattggtattttcattacagtctgatatgttcgagacgtacaaggccatccagttcaagccgtaccagttcaaggacttcctgctgtccgacacggttggcttcagcgagtgcgaagagttgggcacaccgacggcaattagcaaaggtaaagaagaggagacagtgtttagtgcataatcattgtcaattgggcgtcttttaagttcttgggttcggcacttttagaagcgcgggaattggttttgcaaattgctcattcgaaagcgctcctcctctccgcttaaaacttgaaattactatgactaaaatagtcaaatttgttacaggttttgaacggccaattttggtgttcaagaaggcgtcatcgtcgactacaccaacaacaacaaagcggaaaagggagagatgtcttcgtccgtaaagggcggcgccgagtagttcatcttctgcagacgatcagacacgggaattgtgacgaatttatttcacgaattggacatggatttttctcccgcctcaaatcgatgtgtgccaaaactccattccatcccatttattttgtttgtttgttaaacactttgttcattttaccatcaccatttttctatttttatttgaataaaataggaaaaaatgcaaaaaacaaaaattgggtagttccgcacagcccaattgcggaggcgcccgggagaaactgccgccttcggggataaatttttgaaaatttccatttagaaatgttgtcgattctaagtgtggttcttgttttttttcgtttttgttgcattttcacacaaactaatacataataagtcttttatcataattgctctatcactctttttacatacataaatatcacaaaacaattaaaataaatgattttgatggcatttttgtgccatctcatcgccatgccctcgtccccctgctgctgctgctgctgcaacatttgctggcaccgtcgctgttggttgccgcaacaacaattcgtaattgtctccgccgctgtcgtcgtcagcgtcttctcagtcgcccgttgcggtgccgcaagtgtcgctgatcgccctgagcagcgggtcggcggaacgcgtccgattcgaagcggctaaagcagtggcacgtcgcccagtgcatgtgccgccgttgctgccctctgcggcatcgccgctggaattgtcgtcgcgtgccatgcgccgctcgggcgacgcggtcatcgcctcgcgccactcgcgtcgcttccgttccgcgtcgccgccccgccagcgcttcttgctgtccctgctgctgccgtcctcgtcctgatcgccgtcgttgctctgcatgctcgccattttttggcgttgccaccactgtcgctggctgttctccagcgcgacacggcgcaacagattggcaaccattggcggtccgccaccattcgtcgtggtgccgtcaccacaacttgtcgtcgtcgttgtcgctgtggtcagccgcgacgatggcgagcaacaggacgaagaattgaacgagggcggcaacggtcgccaactgccggcgccgccgttcagtcgctgttgttgcaaatgcagcggcagcgactgctccgacattttgcgccatgtcgccggcgactgttgtcgctgttgtgtcgtcgccatgcggccaacagtcgccgctgttgtgaaggacactttccgcagctgttgctgctgctgttgttggcgtattgtcgccgtttgttggccaagcgcggagtcggcacttttgcgatgtatgttattgttattgttgctgaagttgtaattggcacacacgttctcctccccgcgcaatgcgtctgcaaaagtgataa

SEQ ID NO: 12664 - DNA, 1592 bp, Heterodera glycines
ccagtttttataacgcattcataaaatccaaattttgccgccgccaaaacatgtcaatgggcgctaaaagtcacttattcttttctgtccaatattcctagcactaatctttgctgatcgccccgaaccaaacaaagaaaagataacatctgtatggccattttgacaatgagtcaataggacggaaagaatttcgtttcacccggattataaaacttgactagaagtcattgatggacatcgagtggtgaagtccttttgttataaattacttggttttccctatttaattttgtgaaattttaattttttatttaaaataaatatgaatttattttgagaaaataaaattatttgtaaatttctttatttatcttaattattttttttaatcatgacattttcgcgttgtcattcattttgttaaggcgaggctgagtttctttttgttaattatctaaattatttttagttttattttccttttatttatggcttttttgttttttaaataatttaatttatttgtgttctttatatttttttctgaaaattaattaaattttgtaaaattttaaagaacaaaattcatttttttttcttttttttagctgaaaatgtagtaagactcaataagacacggcaaaaacctaaggagggtctgactagtcccccccccccctccggcctctttatgatcacacacatatctcttatgctctcatcagtccaaattggcatcaccccccgccgccggggcgacggtggcggcaaaaagtgcgaccaattaatggatagacggaatgtgacaattaattttccccccgagcggcgtggagtctcgagagtgagtctcgaggatcaacaacattcttcactcaacacccaacgagacggttgttgatcaaagtccaacaaccaaaacgtttgtgttgttgttttgggaataggaggacaaaaataagcaaataaaaatgccgtaaatgccattggcatttttcgtcaaaacaattttttttcacaaatggcgaacacaccggtgagaaggttgttgagaagagtgctgggcaaacagaacatgaggatcaacaagtcggcaatctgaaaaaagacaaaataaataaaaaattttggacgacgaattcatggcaaaaataattgccggattaaccgggttaatgagggaaagcttagaaattagttaaaagaaacgccattttcgtgaccatgcagcgaccaccgttaaccctcaggaatatgttttcacgatttaaattgctaaatgccaaatctccaagaaaatcaagaggtggtcagctgacaaagacctttgggcaccacaaactttggcaattttacagaatcaatttaaaattattttttgtgccaattggcattatgtccatcacacataaaattcaaaaacggaccgcaagcgatgaaataagccaatcagtggccgtcctgaatgttttgttcagcgcaatggcagccaccacgaacacgttgccgaccaggccgcagaagaacaccgcggcgtagaaggagacgaaaacgggaagagggagggtggcacgcgccacgtgtccaaa

SEQ ID NO: 12665 - DNA, 1325 bp, Heterodera glycines
attttgggtattttaattaccattttcacagattatgattggatcagggattttgaaaaattacttcgcgatgatttacatccactctccatgggtcaatgacttatgctctttggtgttgtcaagttggctattgttttgcacatgcgacacttttcggcaacaattcttcaaggatttttgcccaaaatgcatttatccgacccaacaaaacgtcataaacacaacgccaattgtcatcatagcgccaaaccagaaccaactgtttcagaacttataatttttaaatgaaaataaatgagcggttttaattcttttttcaaagagatatttattttttatttttcccaggttaattacttatccttaacactatcaatgcgcggatttgaaaatccagttgaattctgttaaccgattttgtctttgagtgcccagttttgtgatttttgtcttgtcattaaattttttctggtcataaaaattcattttatttaaatttaattcttttttccatttgtatattttatggcgactttcccctaataattttccaatttttctctcaatttaacgctatttttctgttgatgttttatgttttcgttctgcttatctttaattgcatcacatttaaaatttggtcggattttacctttttctatttttatatgctatgaaataaaataataataattagggttgcaaccccgacgtcggggttggaaaattcggggttcggggttgtcggggttggaagtgtcggggttcggggtcggggttgccaaatcgttcggggttcggggtcggggtcggggttttttaattttttattttcgctatttaaggttcattttttaaattttattcaggtaaatgactcaatatttttaatcatcattaatcatttcattttcataatcaatgagatcgataggatcaggttcaagaattgaatgcacaatttgagcaatttttgccaactcaggaaagcgaagtcctttccttccaccacaaaaatatgtcagcatcaattccaactcgttcaacatctttgtaaagcgctaattgagcttcaattttggtgccaacggcgggggcaggttctccagaaagtgttgatggcgtaattgatgaacagcaaggagattttgggttactgttccaaatgtccactaaaattttaaataaaaattaaagtttttcattcttgtttacattttaaagcgctctcatcactttcactaaaatccgtaaaatgagcagattctgattgatccatttgttgtgtttcggttaaaattttgcgcatttggttcattttc

SEQ ID NO: 12666 - DNA, 1689 bp, Heterodera glycines
ttcgtgtactttgtccgtaagttccttagatttaggcccaattttgagtacatcatgcgccacaagatgtaaaaaatgagccacacattgatgacttaaattttcgaataattttcgttcttataaaatgttttacctcgattttcctaagaccctagccattcgccgcacgtttttcgcgtcatcacggacaacggaaattaatttctcaatttttaatccgttttcatcaagtgcatcataaattgagtcggcaacgttgtcgccagaatcgtgattcgataggtactcgcttccaaaacaaaatcgtttcggttgaattcattgtcaatatgatgaatagtaatgctaaaattttaacttaaatataacataaagagaatttataaccttaataatgaaggagttgaagtcggttgactccaaccatctgttgttattgtgaaataatcgtttgaaacttgtgaacaaattttctccttgattgcatttgccatttttggtagaacaattttacggaaatattccctactatgtagctgcaaaaaatgatttttttaggaataataaagagaaaaaataacttcaaatccaggaaatgctttgctgtacagctctctcaattcaggcgattcggtgattaaaaaagatgaatttgtccgcaacattaatttcagaaccaattcgtcggccttttgcttttggtcatcagattgttgaaaaaatttcgtaattttgttttcttgcccctaaaaaattttataaatcacagaaccttttaaatttagtacttctttatttgtgtttcctttgtttttttgccattgttcaaattcgtcattatgcatcgtctttaaatgatcccataatcccttagtcgacgatttcttacacgaaaaagaattgcgacaaaggttacataatgccgtttccgatgtttgcgattttttataaaaagaccatatttcagacatgttatctaaattaggtacaatatattaacctgaaaaatgcagaaaggagaaaaattttctatttatttttagataattttattaatattggcaaaatgttctaatttcaaaattttttgtcatttcaaagacaacattcaaatttcttataacttttttgccttttcccccacgaaaatgccattcttaggggtgtatatttaaccccgaccccgagtcggggttaagggtcggggtcggggttcgtcggggttggaagcgtcggggttggggtcggggttaaccccgaaaaatggcctaaaatgtcggggttcggggtcggggcggggtcggggttgcaaccctaataataataattaaactgcaatttttgcaattttaatgggaatttttctttgaatttcttaattttatccccctaccttttcatagtaatcaatagggaggcgatttttaagtttaactattttgtttgctcaattgttttgaagaaaagagctcaaaaacgcatttctgcgttttaatttttcatttgaacgtcatttatcgtcactagaaatcattattttggcgcttcgtcactaaaaaaagttaaaattcactattatggagtattgtcacattttatcactatttcgacattttttggaaaatatatttttggactttttcgcactttttcgtacatattttgcatttttttatgatttttaag

SEQ ID NO: 12667 - DNA, 2866 bp, Heterodera glycines
  unsure (1)..(2866): unsure at all n locations
taaggtttgcatannttcagtggtttanccattggtctctggtccaacatgggtttattatggcaataaatatgcccacgagggccaatgtccaagttggagtcactcattgtcctcctcgatcattgttctgttaccacgaccatcattcggttcatggtatggttatcttatgggcagtcctattagctgttggactgatctgtgcactgttcttttgtttctgcgcatgtatgtaaatcgtcgtcataatttgctgtatggttacgatattacgattacggcaatatgacttttgcatttcgtgctacagttctgttgtcaagccccaagtgtttcattttgataagctgaagtataactgaatttcttggccaaatttaaaataattagattttaacactttttaaggaaaacgagagccctttttaaaattgccaatttttcaataaaaaaatattttaaatgaatttttcataatcaaaaaacatagatttatttacaggaaatttcttcttttcaaatttaaacacttgcctaaggcattctatgtgttgtattctttttttcttctggactttggccattctgttgaaattctctccaattcttttttattcatttaaacattgggtgatactgtcattgatttaccgtaacctatttactatcgttccaggaaattgttctatttcctttcctatttgaatgtttttattattatattgtatttccactttttctttctgtcagataaaaattttgctttcagtttgccgactgttgattgtcaaaaaaataactattaaaaaggtgacaaaaataatgataaaaaaaattagtggcagggaaaatataattaataatttaacgaatcaaataattggaagaaatccttaaaataaagtacgtctataagtagggaacggttttttagttgtttaactattttttctacggctttatttcgatgagaaatgcacgaaaaaacatattagctcggaaattcttcgttttaacgccactattcatcactaggaatcactatttaagggctttccactaaaaaaaactattttggaagctggccactaaaatagttttttgccactattttggcgttttgtccaaaatttgttaacacagatgcaataaaaacgaaaaatacaccccctaagaatcgaccaaaaaaaattcagaaaaatataccactaagaatggaccttaaaatttttaaaaatagacctataagaaatgaaatttttttaaaaatttaatccccaaatttttttttctcctctgacatcttgcgacgtgcaacgatctttttccgtttacgaatcaattttggccgataaaagtgtgtcttttacccccgaaaaaaattctaaatgtacctcatttgtaactgcaatcagtgaataaaatccttttcatttaatttaaattagtttcatgcaaaaaaacagctatttaaaaaattacacccctaaatttggaactttttcgccactattttggcatttttttgtcactatttaattaattattttgggattttttgccactaaaaatcctggccctatatacatataagttgtaaattgtgaatttaatgaaatggtttaaatttttgaccaaaatgaatttctacaattttttgtttctgctggtcatttttctcaacttttttgcggcgtgctttttccaaaaaagcttggtaacaatgggtccgtcggcgccgttagggaaaataggattttttctatgcgatttattaacagattttacaccaaataatgccataagttaataaacatattggtatagaatttcaaaaaattataaaaatttgagtgttttttccaatgcttattttcaaggataccttaaaacaaggaaattttcaagtgagaggacccaatttcaaggacgtacttgccattccgaacgaatagcagccctgaaataagacaaaaaggcttgatttctacaaccgacagcaaaaatgtgcttttttaaaagacacaaaagaacaagataaactcgggtctgtttttatttggcccaataatttcactcatagacaatataaattttagagtctctctattgcataccagggttgccgcgggtcgagaaaaatatcgggtcgcgtttcgggtcgagaaaatgtagggtttcgggtgatttgcggcaaccctgttgcaaacccggtacccgacccggtaggtccgggtccaaaagtacactggtaagaatggggttctggatcaaatttttgagcaaagttggaggaatgaaaaattaatgaaaatttaattgctcctgtggcttagtggttaatctctttgtttctgttccttctttctcagtttcaattctttctcatggttagctcttttaaacatttttgaagattgaaaactgatatttattttttgtatttaaaatgattttttcggcaattttcttttatactgctgaagtcaaaatttaaccaagaaaaactcgagtctgaagaatctgctggaggagaggggcgggtctaatcatttaatttgaatgtaaagcaattttatttcgctaagttcgcaaactaacccaaattcattcatttcgccaagcgatcataattcggaaatttacaaataagaaagcttcaactgctattaaattaagcaatagcataaagcattattatttttgtaaattccattgctattaactttaaaaacaaaatcattggcctctcaaatctgtttttgaatttattttctcgcaaaatgaattgcaaaagcagttcaattaggaaaaattgccgaatacgttaccaactcaaaattacataaaaacactttctgag

SEQ ID NO: 12668 - DNA, 3930 bp, Heterodera glycines
  unsure (1)..(3930): unsure at all n locations
cgtgcgtttcaggccacgggaagctcaggaactaccctctagggcgnaaaanccttaaaatattagncttagtnatccttatgggcaaaaagtcacgaaaaaattcaaaaatagtcttgaaaaattagccaaagttaaaaaagaatatccattttttaataattttagaagaatattttataaaaacaattaattttgaatacaattgctaaaaggtacaaaccattgtcataaaagtgcaaaagataacctatcccaaaagtagaaaaaagtctaaaaaaatgcatgttagaagcttcaaaccaagcgtataacaaacactttttaagccatttaaagtcagcaaaaaaagtcaaaaagtcatctgacttaaatttccagccctattgctgaccatggattcatatgaatatggcatccatatttataaatatattgaattcaaataaaaagtcgaaaattaaacaataaaatgaccaaatgccaaatattcatagtaaaataaaatttataaaatccgaccattggggtgtcattttaggaaaataaaaacatcccaagaacatttaaaacaattgcttatacatatttacacgcttaatttagcaattatcataacatttacatttttgcgttgcgctgcccctgaacaaataaataaatctcttaaacatcccacccaaattattagctgttcaattttcatcaaaaacaacttcgaatttaaatgttccatcgtcacagcatttttcgcaatttcccccgccttaaatcgttcgacgctaaatcccgggaaagcgcctcgtcgagaggcgcaaacgatcttctcgcttatttgagtcggtaagacagcgaatgaatgaatggaatggcacatggcacctcacaagaacatatttcagaatattcgttcatgtttcatgcatatttgccttaattttttcaaaattatctcatttttgaacggctcattagcgtctttgggtcagaaaattttcttaaaaaacactttgaagggaatgcttaaataatttttcagaaaattttaaacaattattaaaaagtaatatcaaaaatggaataaaatatttttcccaaaatatcttaacccaaacatagtttttctattttaaatgactttgacattaaaaatttttttctaaaatttaaagaaattttgtgaattttcgggtgtaaaattcttttttgttcaataaatttcgtttaatttctcaaccttcaaacattattcatggcttttcaattttttggccttcccccaaagtgtcgtctttttcttccaatatttttccgtttgcttgttaatccgggaagagccatcaattttacgcattataaatgtgtgctgtcggaggaaaatttgttttgctccgccggagggaatttcaatttgcaggcgcaggttttaagtcggaaggaaaaaggcattttgccaacatcatttttgttattcacaaaataattaactttttttcgtccatttttatttttattaatccgccatttattttttggggttattcccccaaatttcttttgtctcatatcaatgcaccgtctcccaattatccatcatccttttttaacaattaagccctaatagccgctaaaactgctgcaccaaagagtgaccattcattgctcggcctccgtcactttccgctaaacatttgccctccccggggcactcactttggccgctgatccctccccccggggcaattcatttcttcaaagtgatgcctcaggggatttttgggccacggacattccccggcggattgaatgaatttttcacctgtcagctcaattagagagggccagccgtcgtcactgtttgctaccatccggccaagcactcactcattcaattcattgtgtgtctgctcagtttgacttggccacaatggccggcggcagtctttctaattgatcagtcactcgctttgtgctgatcagtcattgcttcccaaattgatcaattcgccattgaacaacaaataacatcttatccctttacactgactaaatgccaacggcaaaattcatttttttaagtttttagaatttttatttggcaatttgtccaatgtgataatgtttttccctttctgaattttgcattattccgtttttcagtctttggcaattcgtccgtttttgtctttttttcaattttgggaaatttttgcactttggcattccgtaaattgtttggcattttgccttcccaaatgtcctcttcggtcgcttcgacccccgcttcgcccatttctcttacggccgccccacgccgcgcctcagtttttgccgaccttttgacggtattccggcgcaagagtaccgccaccactgcgcttagcacacggcgtcgttccatttaccatgcgccggtgccgtcgtcgtacacggcacggaaccgacgcagcggagcggcaaaaaaggcggaagagatggaactgttcacggacagagacagtctccagtaaaaagcgaaaaattatagaggggaaaatataaaaggatttacaaaacaaatatgttaaatcgaacttagatttttgattaattaaaaatttgatcatataaaaaagaaaatacaaaaaaattcaaaatgatttttttttaaactatccaatccatttgcatgtgaataataaatgtcgtagaattgtttaattgtaaaattggctaattgaccaaacgatcgctaatcctaattaactaataattgagctatctaattacatccaaaaatcaattgccatttttatttgtcactttttcagtgaggctgatcgcggagaaaaggacgaggaggaggagacggccggcaaaccgttgacacggcagcatttgttgaacaaaattcgcgaaaagaaggaagtgatcaacaaactgcgctgccaggcatggaacatgaacagaaagagacgaacactaaggtgggatacggtagcaaagagaagaggaggaaaagaaaaacagtgtactgtataagcggaggaaaaggaaagaaatatgtactgtagaccaaatgtaatttaataggcgccaaaaatggaagaaatattcgcaatttttggacatttataataaatccaataatatttaaattttgttaaattatttcccaagtcaataaaatacaaaaattcagacttgcccagaaatacttggagcagaacgagtccaaagtgtccaaaacgcatttgtacaaggaggagttggtgaaacggtggcgctggttcctccgttggttgagcaacattggcatttattttgtgggaattgtgccactttttcagtgttttgtgatttattttcattttaggtcccttgggagtcgcggataaaacgaattgaaagtgaaaatttcatttaaaactgagaatttaatttaaatcaaaggccaatttggctcagtcgtgtccagttacttcacattccttcgctgggtgatcttcatcaattttattatcactgtaagttcttcccctttttcaaaatacctttgattattattattgtattaattaattatttattttttacatttcctcagtttatactaaaaaaagtaattttaagccatttttattttaattgtttttccagatcattttttattactttttaaattatttttttgtcattaaattattaatttatatttcattactattttctttcttttataaataataaatttcaaatttcccaggccattatcattgcttttgtcgttgtgcctgaatgtgcggccgacgcgaccgccgatgccggacgccaaaatcggacggcaagtcgaaaacgcattccgcccgaggaacagtcgcacgtggacgagtgggcggtggtgtggcatttcgataagggttggcacnaatgccnaaattcggcaaggga

SEQ ID NO: 12669 - DNA, 1624 bp, Heterodera glycines
ttattaagaaaaaacttcaaatttcgacttccttcaattttcatgtataacttttttggtaattgtctaatcccgaagcaataccttacaaaaagcttctaaacgtgttaatatttcgaatgaatgcactaaaatatgctttaaaaattaaccaaaatgtcttttaaccctcaaaaaaatgccaaaattgtgtaaaaatacagaattgactttaaaaacatcaaaacaatggctaaggagcgtttttatataattgcaaaaaattttgattttctaaatttatatatgaaatttcgagtttttaaaacttttataatatgctaaaacaaatttacatttttcttatatcaacaattttttttcaaaagttctaaaaattcaaaatattttccgattttcaagggtatatttttatccaaaaaagtcgatctttgggggtgtatttttcactttttttttgcatttttcttgtgaaaatttaccaaaataggccaaaatatggattaaaaacgcaaaatggcaaaatatttcaaatttttattttaagctcctttcttcatagcatatgcgcagaaaaaatatgcaaaatcatacaacttataaccctaattataatttgttcaatttggtgaggtaataaatagtattctccaatttaccaaaaatgtttgcttcttccaactataaatgtttgctttttttccattttcctctcattataaaaaatatttctaacacaattattcccctctttgtgtgacatccttcgaaatattgcaaattgtgctaattgccacaaatgaaccgacggtttggaatttctcttcaaataaccaattttaatttagcctaactattccacaatttcagttgggtttgcagcgatgtttggttggacattttccctcattttgaccgtcctcaactcggcttaaaattggcacttctttcgaaccgttttaatgcgctggtggacaaacatttcgatggcaaaagggaattgtcaatttggagtgacattacaattggcaagatgggagcaaaagcaaaattgtctgtggagaagagcaatgccaaatctgtgcgctttccattgcccggccattcgctgcccaacaaaattcgctttaattaccttcagattgagtaaatcaaacaaaattcaaagaataattaactaataaaagcatacccttacaggtacattgattacgccgtcatcaaatttctccgtgccaaccagcaaatttttgccaaaggcaccgatttggatttgcatgtgcctttcccctataaggccaaggatgtgcagaactttgcctgtgaaatttggcccgtttttgcgacaaacattcgccatttgagtgttactgatggtcgtcatcttgaaaatttgcgtcgccacacttcgccgacaattctctccgacctcaacattaatgccatccattccgatgatttgttgcccgatgcaattgctgacgatgggccaaatgcaactgctggccaagcgctgtcaaaatggttgaacattccgagaagcgatggacagccaaaacaattgagttgttgtggtgctgtgtcaagaaccattaaattggtcaacagtttcaaagaggtgtgg

SEQ ID NO: 12670 - DNA, 2215 bp, Heterodera glycines
aaagcgaaagaagcgttttaatcgtgaaaatcaaaatttataaattcccagcacagagagaatattattcaactaataataacagacagaaaatatgaaaaaacataaaaggctttgtcgaacactcataaaatattaaatctttctggaattatcatttcgaacagtcattttatgctgtgatttgtgaatgaacatgtgaggggcaacatcgggtaaagttaccgtcatttgtttttcatttccattgtgtttaggcatttctccatgccaccacttcttcggccagctacataattcgacttgaagattttgaaccaacggaaattgagccatttgaattggtgaacgaacggaccaacgaaatgcttacattcgagaaagaagacgaccatcaaaatactaataatgttgcttgtctgttgaagcgatttcaaattggggtgacggcgacgattcattgggtggacgaaaacctggacaatttgaacaatgtcaactttcatctttatgaatttgggtgaattgggcaacaccattttcttttgtttcaaatttcacttcattcatcaggccattgtctccaccaaaggcgggccaaatgaagtcaaaaagtcatcggaaaatgaaactcgggcccagcggacagcgaaataaaaagaagaaaaagtgaatgaattattgggaaatgacaaatgattgatcattcattatgaatggaaattgatctgctgataattgctcctcacatttgttgtttcttctttcgtttgaatacatttaatttgcttttttgaccaaaaatattgagcttttttaaataaattgtaatgctaatgaaaaaaaaaaccaaaaaaaaattaactaaaaaaagaaaaaaatcaccggatttttttttaatattttttttctgtttttgttttttagttagcatattgagcaataaactaagcgaagatttagcatatggggtgggggatatcctccattttgcatgtcattccgtcctctgttctcgaatcattcggttccagccccctcccctgagtttgtcaatgtcttccgaaaagggcaaaatcatgagaatttacctggacctaatcctcgccaggcaaccgaagctgatcagatcatttttcgtgaaaaaatcgacgcaaaacaaaacaattctctgtaaattcaattcgagaacttggtaaacctaggataaggaaaattttaaacctaaaattttttatcaagaaaaaaaatgaaattttggcgataaatttttgagaaaatttttcatattttctgaaattttttcaatacttacaatttaggggtgtattttctgaaaatttttcaggtcacttcttaggggtgtattttcctgattttattgcattttttatggaatttttcgaaaaaaacgccaaaaaaggcacaaaaatggcaaaatgccaaaaaagtagagtattacgggaccgggaattttgccaaaaccgggacctgagaagccgggaccgggacctcggttttttttccgggaccgggaaccgggaccaaccggggaatttttaaaaattcaaaaaaatttaaaaaattcaaattttaatttatttcaagtgaaaataatacaaaatttaatttttattttgctatttattttttaaaacccaaaagttaacgcaaaaataaattataatgatatttaatcaatatttcaaaccaaatttacttcaattattcaaacagttaatcattttttgactaatgatcgaatattattagaggttagaaataagaattttgtgaaattctaagcatgaaaaaccgaagttgatttttttgcggcgcttttcccaaaaaacttggggaattgaggggccggcggtgccgataggcgccgccgggaaaatttttgtaatttttaatgcgatttgttaacagatttgtccacaaaaggggaaaaattgagaatcttgaccatatttttagcagattttcattaaaaaatcattaattttgtgcttttttggaaaaaaaattggttcttttctggtttttataaaacatttagcaaaattttttggaaaatttgggtgagattttcgttttgatgctctattaaaaacccaaattattaaatatgtattgtaaaacattatgccaatttatcaaaatttaaaagattctgaggattttccccaaaagcctcaaaatttctcaaaaa

SEQ ID NO: 12671 - DNA, 3097 bp, Heterodera glycines
cggcggcgcctacctgcaccgccgcctccctcctcctccttggtcaccaaaaagttttttcaagaaatacgccgcaaaaaattttgtaaaattaataaagggagtcaaaaatataaagttaataaatgttttgttcgaattaattataaaaaataatttatttaagcaatttgaaaaaattttctgatttttgactcaaaaataagatttttttatttcaaatttctcctttataaatttttctatatatttttaatttaataaatggattgtcctttaaatttgtgcattaaaaatatttttgtgagtttttaattaaattttcgaattactcccgctcccgcccgggactcccgttaaaaatggacgggattttacgggagcggaatttttacgggaatcctgttcgggactcccgtcccggaaaattttgaactcccgatcccgctcccggaaatttttttttaccggactctagttaaaattgaaaaaaatttaaaaatgtaaaattggccaattggcgattcgaatggatttaaaacattgctgattttcacttttcatttgtatataaatgaacgagaaaccgtcacatcttttcattttcccatcgaaatacgaatcttctctgtttctctctcacatatccacaaaattgttccgtaagtttttttccattaaaaaacattgtcctattttctctcttagccaatgctgcaagctcatcagtaccaacttcggcaaggtcatcgtcgcgtttctgctcgcagcattttggcccatttcggtttcgaattctcgaacgactaccgacttggctgcggacattacagtaaagtgtacaaaggtggagtaaggggcagagtagttgtgtattttcgcagatcaaatttatcttccaggctatttcaaggaagcgcaacgcacttttgccatcaaagtcaccgacttggaaagcgtttccgagaagttcaagcaaaagtttctgccacgtgagctggaagtttggcgggaattggaccacccgaacctcgtctatttgtacaaagatttccagtggaacaattatcagttcgcagtgatggaattggttgttggtggtgacttggtaatttcctcttttgttttatgtgtgttgcattacttcaccgtttactcttcagctttcgttcctccaaaaatgtggccacgtcagcgaaacgacctgtcacaattggatgctccaaattgttgctgctttggattatctccaccgtaagggaatcgctcatcgcgatctgaagctggaaaacgtccttctttgtgaaaacggcgtcatcaaagtcactgactacggattctctaagcaggtggtgaaaattgtttttgcttatttgaagttgattttcagagttctgatttgtcttcaacattttgcgggtcgcgttcctattcgtcaccggagattttgcttggcatcgcttatgacatgttcaaatcggacatttggtcaaactctgttgtgccatcctttttatgctgatcataatttcaggtcattaggcgtcaccgcgttcatcatgatcacaaacacaatgcctttccatgaagacttgcccaaccagcaaatcgttgactcgcagcggaagcgccgttacaaatacccgtcatggcttaacattacgaagcaatgccgcactgccatcgatgccttgctgacttaccaaccggcttttcgtccggtagagttttgcttttaattcgcttctcattttctttcccattcagaacatttccgaatgtgccaagttggaatggtttgctcaagattccgcctctttgtgttgcggtggtcgtcgtgccggtgttggagtgatgggtcaagtgcgtgggcgatgataggccatgtgatgaccaatggacagaagatacatttgataggattaaatccaagcctaagcttttcttcattttgtatgcgtatctttagtctttgtttgtacatacacacacttgttaataggaataataataataaaaaaatgtttaggtttttgctgaatcccttgtttcaccgcctaattcaaattatccaaaaacctccgctattttgcttccgttaaatttggggtggaggtacggtctctccccgacatttatgaccctacgggctaaactacttgccctcagttatggcttttgatccgaaaagaatgacttcgatggagtccattttgtattgttttgtttgttgtttttgttaactttgtgctcttggatattaaattaaacgtggtttcaaaaattgctcatgagtcatggacctactgattgattcaatattctggggtgatgcttcagcagcgacagatccgatcgaaaagacaaaaattcagagttagcccctgagtacggtatgccaagttcggtacctcgatgccattggtataaaaggatacagcgaaatatgtaggcaataagaccgatatgtttatcattaagcctgaaagtcgcttttgtcactaaagtgcaattaaaccgcgttcttttttactcttcccgaggcattcatcctcctttatattttaatgtgattttttaataaataaatcaccactataaaaggtgttcattcgcaatcgcttttcccatttgcttagtttttggtttttctattcatctgcaacatattgtattatattatggccattgctcggacttcggttctgtccccgttgctcctcttcatctttcttctgttcaactgttgcctttgccagccaaatgtcttttcgcctaatgatttcgcttgcgcgaagaaaaatgccatttttcacgatggactgttcactctcactgaagacaatcgactgtgagttgctattggcttcaaatgttttaaaataatttgttttgtttttttaataattagccgcattgacccgtcgaagcaaaaaacgaatgacactgggacacaactcgacgctcttctcttgaatcccatcaaagaaagactggtcttttcgctcattttcatcaagggaggcgaaaactgcaagcagtttttcatgaaacatgccgaaaggccgagttgttgtctgttagcgatgaaatggaa

SEQ ID NO: 12672 - DNA, 1594 bp, Heterodera glycines
aaaaaagggaaaaaaaattttcaaaaaaagtcctctttgccaactagcgccaaaaactttccccatcctctcaaaagacaattccatcgccatttcaatgcatagctaatttcttctgacattttttgactgtttctaccatttggcccaccacgtcgttcgacgaatttgaaactaattggccaagtcattgtcccctctgttaagtccactgggaattggtgcttctccacggctcttctttctgttgttctgtccaaccgcaccttcccaccccaaaaagtcctttcattcacaaaaattcactcatccaaatgacaaaaacgcatttttgttcaaaagttgccaaaatgcgaccacactttggcccctctctcctctcgcttttcgttttgtctcttctgatctttgccatcgcttcgttaaacgccgctgacgaaatgccgggaacagaaggggaggaaataatcatcccttgtgagtaccaaccatcaattgtccttcgtctcatccaccaatgatcatgactagggatgccaatcatatggatatccatatttttttcctggactgttgagggcctgaaacgcacgaaaaacatgtttttagcttggtttgaagcttgtaggatggatttctaaatccatatttttccatatttcgcgatttatgtccatatttccatattttggtccatattttatgtccatattttggcaattttcaaaaaaacctctattagaacggcccccagcagctaaattagcctttttgagcccaaaacccgaaaaatttttcaaaaaatcattttttcgccaaaatttctcgagaatattgaataaatttaaatttccttaaaaattaaaatgattgcacgtaattgcggaaaaaattcgagaccaatttccgaatgttgaccgactaattgcaaaacgaaagccgtctttgtcaaagcgccttaccgagtcaaaaaatttggaaatgtatctcatatgcaatttcaaccaataaatttgaagaaattttgcactcaattttgaaaaatttatgtccatattttgacatttttgccatttatttccatattttgagatttttgccattttatgtccatattcgcgatttttggtccatattttatggccatattttgcgattttatatccatatttttggcatccctaatcatgaccattccccgcgtgtttagggaaaaaactctaccgaccgcggggccccccgcgttttggaaagcgcgcctttgtgctgctggatgatgaaacggtgccggtcgcttggaggaagcgattggactaaaggaaaagtgatcgaccgcgggaagaaaggaaaagcatattgatcgaaaatgtgaaactgaaattgatgaacaataaacagcagcgtcccacaaaagcgtcaattacaactttttcaagggagcacagaattgtgggaattacgggccgggacgttttcgtaccgccgttttcgtaccgccattttcgtaccggggacgttttcgtttattgtttattgtcagtaaagaaaaaagagtccacaaaagggaaaatccgcttacattgaggacaaaaca

SEQ ID NO: 12673 - DNA, 2455 bp, Heterodera glycines
  unsure (1)..(2455): unsure at all n locations
aaggtgcgccagcggaggagcggaatggacgcggtggagtgcgcggtgggcaaagatttggcacgcgagttccaacggatggacgagaatccgttccaaatgcgcggcggtgcaatgcttcgactgagcggtgcgtgccgctaattagttattaattagtccaacatttaaaatgcgtaaaatgggggtggcaaacaattttccgggcacacagtttggcgccagtgaacaaaacagcgccaatttgaaaacccaccgaattttagaccaccaaaaggcggcgctgagcgcagcggacattgaggcggacatcaaagagcagttcaaaaaggagacgctgctcagggacgaacacgaagagatgtgagtggtttgttgggtatttttggaattttgaagcctaccaaaattaatttggatttggcaaatagcccccaaatgcatcgctttaagaacatgagatgtgtgaatttgcacgccttttttgcaaatttttggtgtgcaaccccaaaacaggaaagtgccggaatttttgtgccttatgttaggttcctggaaaatcctttacctcgggggtggaaggttcggctatttcctgtccgggtgctctcgataatcttacgttttaccggctaactgtttctcataattcgattgatggactctctggcgctactgtaaatgttaccgattttgaaatttttttcacttttttttcatgcaattttattttctattttttattaaaattagcattattaatcacaaaaattataattacaatgtaataaagcaacaaaagccttaaacagacatgaacatttacgtgagactcaaagcactattgtgaaaaaaacttttgtcgcgcactgttttgaatggatgacattggtgacagtgccactaaaaaaaggacttaaaaaaagatttttttcaaattacttcaaatccatcctttacaaaaattgtaaaatctcttcagaattttgggaaaaaagccatctcaaatttatatcgtccaatgttggaaaagcgatgagtgacagattgttggaatcattaatggaatatcttgaaactttaaccatttgctaaaaaaagtttaaaaagcatttatagaaaataaaattgcatgaaaaaaaagtgaaaaatttttcaaaatcggtaacttttacagttgcgctgactctctcatatctcctttcatcattggacaggcgtcgctatgtggagacgcgaattgcctccgagtgcccagcagcgttggcaatcgccgccgcaaatgccaaagagagcgccggcgacggcggtggcccatcgacggccaaaaaggtcaaagtggcgggccccgaggacgacattctgtaccgggcggccgagcaggtcaaacaccacggcagcaaacgcaacgaggaactgttgtccaaccaaatgctggtcggcatccccgaagttgacctgggcattgagtgagtgtttgttggttgtgtagcatacattaaaaaatgggtggggggtcgattttttttttttgccgggatatggggttggtggtcaatttttaccaagggtccggccatgtaaatcgacgaccttttttaaacaatttttttgcggcgcgtttttattcagaatttttgggagttgtgggtccggcggtgccccaggggaaactgcaactttttaataaaaattgaagttttttggtccggttttgctgataggcgccgtcgtaaaaaaactaagaatttttaacgaattttgttaagaaattagaaccatttgtctgtctcggaatgtgtttaattcgatcatttttgaggactcgaatgcgcaacatcgaagcgacagagcagaagaaggtggagctgttgaagaaaggtatttttgtctcaatttttattttttatcgaagttatttcaggtgcaattccaaaacgcgtgaacaattggcagccgttgctggaggaggaaacaacggaagaatgaatgaatgactttttttttactttgaattttccattttttagtagtcaaacaaaaaacgagcaaaaaataatattttttaaatttcatttttatgcaaaagtatgcaaacaaaaagtggtctaataagacaacaaaaaaagctaaaatacatcaatggatgggggaatgtgtgggttcatacagcccaaattcatatgataattaattggtctcaaattctgagaaatgattattattattatttttcataccgattgcaatttctgatcaatgatcactttcattgaccatatgaaaaagcgatttgatggctaatataaatgtcaaatttcacttaaattcatcaaaatttnttacaatttattanntattattacataacatacaaggcaagttttttagtgtcggtgtncttgtgtgcctaaaaggggggaagaggacaaaaagaaaatagtcaaatggctaa

SEQ ID NO: 12674 - DNA, 1159 bp, Heterodera glycines
gcgatttcggaaaattttaggggattttgtacagaattattgtagatccccaaactactaattgaacaattagctaattgccaaaagaagcacctggaagcagtcaatgtcgcccccgtcggtgccggtcacacaaatgttcggcacttccatgccgtccgggctggcggagaagtgccggcacggcgacgactgttgttggtgttgtgccatcattgctaccgttgtcatcggcgtctgctgtgaccaatgctgctgctgctgctgttgttgttgttgctgttgtcgtagcagcagtgggtgctgttcagacatggcaaatgccgtcaccgccgggctggtcggcgcggactgtgactgtgccatggcgaacgcgttgctcggcatggtcaactgctgcagttgctgcggttgggcggaaaagtgatgctgctgttggtggatgagcgacgtcggcgtggacagtggtgaacagccggcggacgacaattgcacgcctaatttttggtttttaaaattttaaaaatggaaaaccgcaaaaaatcttaagcgcctctgtttacctgacgctgtgtacaaatgttgtgatgtcgtaacaccgtcctcacaatttccataaccgtcatgttgttgttgttgctgctgttgttgatgttcctaatgtgccaaaattcatcgtaaaacttttttttttaatcattttcaacccgaaattttctaaaagtcatactaatcttttaatatgaaaattttagcataaaattttgaaaatctagcgatatttttttcaaaacgttataaaaaaagcaaccctatgggcggtgttgttgttgttggcattgatgttgttgttgggttgttgttgttgctgctgattgtttgtgccgccaccgcccgtttccatcgtttcggttggtccaccaccacacatggcagcagcgtttggcgaggaggacgaggacgcaccaccgtaaccaccatgactgttattgttactgttgccaccacacccgttgctgctactgccggtgttgttcatctgctgctgttgttgctgttggtggtggtgggatagagggacggaactgactgcaaatctgatttcaatacgtcacacacaataagaaacggacaaatcacaataaacaaaaaagtttcc

SEQ ID NO: 12675 - DNA, 2901 bp, Heterodera glycines
ccggaaaatttccgaaaaaaatcattttttaataaaattctctcgaaatataaataaaatttaatttccctaaaaatcttaaatttaagtcaaaaaaaagtaaaaaaaaaaagttaagtttccctttctagttgattttttgctaaaaatgagtaaattttagatttatcatatttttttcttctaaaatgatttttaataccatatttagccatttttgaaagttttactttaatttagcgaacttgaaggaattttgaaaatataaatgcaattcaacaaataaatttgaagaaattttacactcaattttgaaaaatttatgtccatattttgacatttttgccatttatgtcaatattttgaaatttttgccagtttatgtccatatttcgcgatttttggtccatattttatggccatatttcgcgattttatatccatatttttggatgccctacaaatgagaagtgatttaaatgaaaataccgttaattaaaaatgacaacattgcctttttgtgcaaaagagtgcaaatattaaacaaacaaatataatacacattaatgaaaaatttacaagacaaaattaatttgtaaattaaataataatttaaaaagaatgaattgtttaaaataaagaatttaaaataaataagaaataaaaattaatttagaagcttttcttcagcagaaaaaacagtgctagctagcatcggaactaaatattttgtaaattagaaattgctcattacaatactttaacatattaaaagtctaagtgaaagaagtttaagtcaagttatgcatttttaaatctcaatatattcaaattaaaaaagacagataataaacataaacttatttaaaaatagatgtatttttaaaattattctattaaatgttcaaaaaccataaggataaataaacaaatatattattaaaataaatatttttgagtgattcatattactcaaaatgatatgatttttggccaccaacaccaaattaaagaaatgcaaacgttaactgaattgaaaaatgattaaaatgatttaaaaataatgtatgaggaaatgcaaaattaaaaaaaattccagcttttggattgccgtttgataaccaacaaatataaatcaacaatgaaattacaacgaaaaagggaattgtcctctgaggctcggctggttgtagcaaaacgctactagtccggtgttttaacattaaaatataatttttgatatttaatttataggatttttgccgcaacatggggcaaaaataattttggtcaatttcacagatttagcgcatgccaacaacaataattgcataaaagaaatatttgatttggcaaaactcggcaaaatcgcataatatgctattttaaaacgtcgaatcaatagttattaattttttttaataaaatatgaaaaatatattaaaatatttattatgtaaaaataattagaagttttgtcaaaattttaaaataactaaaaaaatatttaacaaaaaaaatttgttttattatgtaattattcaaattttattcacttattacaaaggacggcatcctttccattgtatccatcatgatgcagctcatgtttaacggacaaatttatttaaaaatataaattattttaattccatttaatagcaataaagaaattggaaataataagcggtgaccaatgtctaaaaacataatagaattcgcattttatgggttaatagagccatagttaatattcaactataaagaattaatgaagctttaagattttggcttaataaataaactaataaaaatataaattttaaaaatcctcgaaacacctaaacttaaaaaaaccttaaaccttaaaaaggataataataaaagattaaaacattttattagtagcaatgaatagtagaattcaataatttatataataaaattctaaataattaaatgtttcatttggccaataaaggatgggtgatgcgacatttgcagcgctgacatttgcggcgctgacatttgcggcgctgacatttgcggcgctgacacttgcggcgctgacatttgcggcgctgacacttgcggcgctgacacttgcggcgctgacatttgcggcgtgacacttgcggcgctgacacttgcggcgctgacatttgcggcgtgacacttgcggcgctgacacttgcggcgctgacatttgcggcatgacacttgcggcgacgacacttgcggcgccgacagatgcggtgcccagtcaaaacgacttttgcggcgccgacacttgcggcgcccaatcaaaacgacatttgcggcgcagaattaagtgaccccaaaaaaatttcaacaattatattgattaaaaaaaacatgtgtttaatcactctttaagtcctattcttccaagtttcatccataggcggtattgcaatgtatgaatgtgattaattatatcatcatcgattttgttttccttattgtcaaaatcgatgactaattgacggatcgcttcatcatttcgcatatttttttaaacgaggtctttcggcaatcctacgacggtctacgtcagttggcacgtttgggccccagcaagtttttggactataacttttttctttgtcatccaaatcaaagatttttggtatcattcgaaagcccttcaaatgctctattagcctgcaaaaatccaaaaaatttcgtcaattttgaacaaatttatggccaaaaaggttggaaaatttgcttttttgaatttttctggccataacttttctgaaccataacgaaatttttcaatattttgcaggctaatagaagacatttatggctttcgaatgctacaatgttggatttggttgacaaggaaaaaagttatagccaaaaaatcgctgg

SEQ ID NO: 12676 - DNA, 1701 bp, Heterodera glycines
attttaatattaattttacttaataaaagcaatatattttcaattttatttttatacgaaaatattaataaatatatgtacatatttaatttttgtaaaaatttatccttacacctttgttaatttttatgcttatttgaaagaattattattcgagaaactgatcgcatttttaaatgctttttgcatatttgtttatttcgtttaggtgagcagtatattttgaatattcatatgttatggttaaattgtttttttttcatttgtaatattgaatataaatttgttaaataagatttacaagtaatttttactgttgtgaactcttgttatctttgtaaatgattgattctttttttattagtttattccaatgtatttgtaaagtaaaatcttgttttcactccacaaagtgatgtattatgaatcaagagacttgctaacctagtttataatgtgatgaaaagtgttattaataaaatgatttgttatttgattaattcattttttattttttggctactttcactagttagcatctatttggtataaatattttcatcattataattatacatgcagattaccacatttatgcaaaaatttttatttttctcaaggtattttaaataatttcattagaatattattttgaaactataattgatgttattaattttctgaaattccaatcaagtgattttttatattaatttttgaaattattctatttagtgaattataggagcgagttttacatttattatttttaattatagaccaattacttgccgaatacactaattaaatctaaatgatatagtaaatatcaataaaagactctaattcatgagggttttatttttaacccttatttttcattcaaaataaagcaacaaaatggtaattttttggtaaaatttcaataaataccgaattcaaaccaagctaaaatatgttttttgcttaatatatcggaaataatgcgcagaaaaaaaagcatatggttcaaaaactatttgagcaaaaatccaataaaataaagaatattatactgacgcttataaacagtaccaagcacaaagctatcaaatagaaaatctgcttttatctgttcgatcgcttttttcttatgagattgttatttttaatggaggcgtgaactgacccgaataataatgtttaaatttggcaagatttaacagaaattttcgaaatgcgagtttaatttagcaaaaaattaaaattgaaaagaattattattctgcatatttattccttggtgcacaaacacaattatgattttgtcgatttttatcatattataagggatttttataataaaataataaaaaaaacaataaaaatagattcaaatagaccataaatagaaaaagccagaataataacttttcaagagcgatcaacgcgccagcccaactgatgttttacaaagtaaaaacaaggcaaattttaaaaacatctatattcggtgacgagctttgagctttaatttatttaatattaataaatatataataaaaagcacatggctgaatatttgtaccatgtactaactcaatcatagatcaaatttgaatatgatactaatatttatccagcccgtataaaatttactaacaaaattttttcacaaaaaatcatgttttgaaaaacatttgcttttcgatatgaaggaga

SEQ ID NO: 12677 - DNA, 1521 bp, Heterodera glycines
gagacgcagttggccatttgacactaagacgcagtggccccaagatgcagttggttcagacgcagttggcccgttccgtgggagtttacggtattctcccgtaccaaaattcaaagcatttcaattggaaaattatctcgaaaaattagcaaaaaattttatcactcatgatatttgaaaaatatttcaaaattaattccaaggacaaagaactataaatgaattatttaagtatttgatttaaaaaaaaatcaattaattagtcagctaatattggtagaaaactgcagcatttcttatccatttctcatttttggcatggagttttgtcagtcctattttaataatataattgtaagccataagagtgaagtcaccggccgaagaataaagaggagaagcgcatacttgaaaacaaattggcacagtttgccaaataattttattttagtttaattgaacgggcgacacatttaatggatattatgaaacaattattctgaccaattccgctttgtttgcttttaagaggttaggaccccaaacccgtccacgacatttgagcaaaacgttgatccaaaaatgattttacaaactaggcaaaatgtgcaaatgatagaacaaagtaggttcatcagcagaaagatgatctgatcaaatttttctcgatttattttgggtccaaaagtgattggaatttacggccagctttctgatttgggtttataatgaaatgaatggccaatgtgcctttgtcttcgtctttgtcataaaagccattgttcgggtccatcaattccttaattgtccctaattaggtcaattaagggaaacaaactcaccgcaagtgtaatgaaagaagggaatccccagcccttatttgaattgttaaaagctgcactgaaattgtcagtccaattcctagcttcatcattcattcgagagacaatttgaaaggttgccgagcaaacgcagttccaattcgcatcgtaaaaacatcgattccgattcgaaaattgcagtgggtacagtatgccgtcggacagatggttatggtatttttccattccgccgttaaaacattggagggaactgtaaaaaaaaaaggaaaaatcccgtttccggatcaaaaaaaaaattttaaaaattgggcggcgcgctcggtctagaccaaattaagagcagtcaatgggaatagaactcatatgttcaaaagctaaagcaaagcatttacccactgcgctacgccaccttaatagtggaaagtgtgaaaagaaatgaaaaggaaatctttttttgtgttattcaaggcaggagatgagaaaaagccctgcaggtaaagaagtaaaacaaaatgtagagattaattgcattttaaattccctaattaggtatatattggtaaaccaaaataataaagaagtgtctcaaacttgaacatcgattccgattcgaaattgcagtaagtacagtatgccgtcggacagatggttatggtatttttcacactgatcacttctt

SEQ ID NO: 12678 - DNA, 1960 bp, Heterodera glycines
  unsure (1)..(1960): unsure at all n locations
ttataaaatatcttccaaatctcctatatttcacttatgtgaaaggacctcgggtctgggctctttcattcaattattggatttctcaaaagaaataacaactttttaatgaaacaaataatttatagcaaaattttctaccttcaatatttttgcacaaaaaatttaagaaataacatagaaagccacaaaaattgtgaggtcgtgttttttaattgttttttgaaattgttttggctcatcagaaaccaaacgatcgtaggaaggagcatcaacagacgggaaaattagaggggccattagaaacgccggcggcgggaaaagacggtttgtagccatttattctttggcacttatgatcccgcgcacttttaacgctgcctattgtgtggcattctgcacgaaaaccaaacgcactaataatatntaattgaccccacccccaacagattccgtcccaaatccctcctttttctgtttaattttctttcgaaaaccaagagaagaggccgagtgagttgaatagcagcagcataatcaagagggaaatggtgaaaagttccgattttcttttttggtgccctccctctccaagctctgggaccatcgcccctgcaagagtgactgaccgagtggcactaactttaatatatattaaatttatgcaaaaaataagtgatcggaatttaaacgcgtgtcatttgctgacaatgagaaaaataaaagcaaaaagaattcattcactccgtcccggcatggtccataaaatggaaagctttgaattgaccaattcgctgctccccgtcgtaatgaaaagcacggaaacattttctgcagaaaaaggcgggagtcatcggcagtcgatcgctttcggtcacaacgaaactgaaaaagaaaaacattttcagattgttaaaggccgaggacattggcatgcgccaaaagccaaaaaaacaggaccagctccctcccccccagctctggaattttttcgttttcaaaatttcttagaagtttttctaaaatcaaaaagtttgattattaacccttttaatattttttattatttccaatgaaatttaaaaaaaaacacggtagttaaagtttacagtttttatttttttgaaatttattttaaaaagaaaaaacgtttgaaaaagttaattaattgcttagaaaatctaaaagcatctaattgacaataagaatatatttaaatacattttaaaagggtcgcttgaaacaacaaattctaaaaatattatcgagggattccaaattcttttttctttgtctaacttggacctggatttaaaataaataaagtaacgccattccaaagagctgaaacaaagctccattagacttaagaattcgttgttaaaaatgactttttatggctgtttttttctatgacatatggcaaattaagtttttttttgaattgccgaaaacaaaaaaaaattagtcggaggaatgaatgcttaaagaatgttttggtttcatcacctcgctgccgaatcggtgcacacaacgcacattttttggtggaccgagtcgtacagtctgatgggatattccgccaagttttgctcgtcgcccggcaacaaaaggcgaaggtcggagaaaatgagactgaaattacgcaaacaaaaaggatgtacaacaaatgttagcaccgtaaatttaaaaaacggggggtgggggcacgacggactttttctgattttcgtcccagacatttttttttgtggttattttgctaaattaggccacgtcggagcacaaattgcgttttttcctcaattttggcccgaaagtgtcttttttatttaagagaattgttcgacggttccgagaagtgtcgcccggtgaaaccttgacaaggtctgtttaggaaaatcgagctnaattttcatattttgtcaccagattttctctctaaaatttatttttttcc

SEQ ID NO: 12679 - DNA, 1206 bp, Heterodera glycines
agtttgaatatttgattaattaaagaataataaaaaccctttaacgctggtacgatgctgattttaatttaagcagtatctttaaaaaaggagattaattgggaagataacagacacttcgcatgaacattttaaaaccttataaataaatttacttctaaaactgtgaaaaggccatacccaacaaaattggcaaaacatgcaaaagtagacatatgagttttaaaactcaaaaaaatgtcaaaaaactttttcaaaccgttagaaattggtttttgaattaaaaaatagcaaaaaaaaaacaacaacagaaactgctgcataactcacggagcagtcgtgatgttgtgctgccttcgtcgtgctcggcccctgtccacgttgctcgtgccttcattgtctgttgtcgtcggctctctttttgtgccgttgtggtcgacgacctgttgagatgttgctgcttgcatttgcctatttatgaacactttaaagaaattaatgaatagggttttcaaaaatatggacataaaatcgcaaaatatgcgcatcaaagtgagaaatatgcacatgattatacattaaagcgaaatatgcatataaaagtgaaaaatatgcacataaattattccaaattgaatgtaaaatttcttgaaattttttaaaattaattaaatttaagcttaaatctcgaaaatagctaaatacgtttaaaaataattgtataagaaactatcaaaataaagttaaaattattaatttgaaaaaattgtctaaaaaatagcataaattttccatttttagtcttatttttgacacagatttccaatttttaaacgttttttattaatattttcgagaaaactatccaatattaatttttagaaaaattttcagtcattagggattaaaaggccgctttaatagagggaccgatttaatactcggtggcccaaaaaattctttattttcttaactcgaaaccaaaaattggtcattttggacaaaatctgttaactaatttcactcaaatatctcacttacaattagcgaaaactgttgaattacaaaaattttgttcataaattttacagaatttgttacctcgtttttcagccaattgacgctgtgccgtcgtagtgaaagcagacatttttcgtggtgacgatttaccatgcaattttggtggaattcgaaaactgtaactca

SEQ ID NO: 12680 - DNA, 2672 bp, Heterodera glycines
gcagaaaaaaatggtcatgtaattggtcaatgaatgaatttgttaatgtgccgtcgtcatttgtatcttccgcacaaacattaaaattacccacctacttaaaagcaatgtttggggattggggcgggggtaaggaagtttcatttggccaaaaagggggaagccgagccacaaatgggaggtgaagagagggagagagaaatggagtgggtgacgggggaggggagggggggggggacactttccccctttttactcgttttatagggaggcaaatgagtgccggtgccgaaaacagcgaagaagcccagtcaccctgtcttaaaatggacacagaaaaatccgtttccccttgagggattttgttataaataccgcccgcccctcccccgcccgaaacgaaatgcaactctcagcgttttgtgtgaggtgcgttttttgaactctcatgggacggcacttttttttggcacataatgtgggaaagggggaaaattggctgcttttgcgacaaatgatgctgataaagtgtccagataagccggcatcaaaaaacgtgcttagagctgcttttttgggttttcatgggcaatttttaataaagacaaacatttttgactgagacaaaaattttaaacaattattatggaaaagataggacaaggaaataaaaggtaatttttaattaattttcccagcgggtgaagaatgtcttttttcttatatttgacaaattccgtcacaaaaaagggtcattcaaattaacgcgaaaaaaatataatgccaaagagagaaagagaaagagagagagcgatggacaagagagggcgaaagagggagaaagaagagagagagcgaggaagagagagtgaggaggggagaggaaagagaaaacgatagagaaagagtgagtaaaggagagaataaaagaaaagataaatgagagagagagggagaaagaggaagagagtaaaggataaaagaaaggataaagagagagagaaaggagaggacaaaagagagtgtgaggaggagagaagagattaaaagagagagagaggagagtagagaataaaagaaaggataaagagagagagagagagagtaaggagaggacaaaagagagtgtgaggaggagaagagatgaacggagagagagaggagagtagagaataaaagaaaggatagaaactatagagacagagtgagtaaaggagagaataaaagaaaagataaaatgacagagagagagagtgaggagcatagagaggaaaggagggagagagagtgaggaggagaaaatagggaagaatgagggagggagagagacgtggttggcctcacaaaaagtgcaaagttgctaaatttttgactaaatcaactcataacttttctcagacacacataaattgcacaatcttggtaatatacgatagctcttgaattgctttattagcttgccaagtttcaaaaattttattatgtttttcaaaagttttagccaaaaactggaaaaattgtcataatttttgaaaaacataataaaaatttttgaaatttggcaagctaataacgcaatttaagggctatcgtatggtaccaagattgtgcaatttggttctgtctgagaaaagttataagttgatttagttaaaaattttttaataatacccaataatttaaatggttggctttttgttgcagtttctaaaaccaatttaaaattttatttcgaaacaatggtgaaatggtaatttcaattttcactattttaattatactttttttgcatcaaaaagccctagaagcaatttcaatattcattttgacaccatttttgcctgctttccaattgtttactttctctttgttttctcatcacacaacagaggaaattaaaaatttcttttgataagtaatgaattttaaaaaacaaatacatattttcgaataaaaacttaatttattataaaatttcaaattatgagtatgtttaagaaattagaacaaaattggatcactagctccaaattaggaaaaaaaatttttcttttcaaattaatatatttaaaaagccctcagaagaaatttcaatattcaatattggcacaattttttgttacatccaaattgtttgttttctctttgttttctcatcactagggttcggaacaaacctgaatagtcgggatatgccaaaattggcattattgtgatgctgagttcgcatgattcctcaaaattccggacatttcagaacatcagattgcctatttccttcaggacaaatcaaatctaaaaaattgggatattacaacaatgccaatttaggcatgccaatttttttatgtttgtcctgatttggaactaggcaatctgttgtcctgaggtccgggattttgaggaattcatgagaatttggtccttaaaaatgtgtttaaaatgcaaatgaaaacaaagacatttattcacactatccgtaaaattttcagtttttgtaatttttatagtcataattagaagccgacttaaaaggcgtcaaaaatcgcgaaaaatagagtataataggcaccaaaaaattgaaaaaagacattgaaaggcacgaaaaacccgaaaaaggcatgaaaatacatttaaaaaatttttttattaaggtttttttagggagcaaa

SEQ ID NO: 12681 - DNA, 3587 bp, Heterodera glycines
  unsure (1)..(3587): unsure at all n locations
tttttattaatgaattatcgacttttagtttgctttcctatatgtaagccatttcaggaagcaaaatgagaaattcgaaaatttgaattttctactttttgctcgaattcgggtccggggttcgacataggtcggaattgatgtgagatttggattctccgacccttgaacccctaacacaatttttatcgaaaaaaaatttcaaaaatttgattttttgaaaaagggggactaccatcggtactattacccaatcatactttaaacaagtcaaataaggttttttagagataataaaatatgaattaaatttttaattacgaatctttaagtgccttattctctttgtttgtctttatcattaggggtgtcaaaaatatgtacaaaaaaacccaaatatgtaaataaaattttttttaaatggttattttttgaaaaaaaaaatcctcgtaaagtatgaaataggcacaaaatgtcataaaaattacttaaatagtcttagaatcacttttaatattttaaaattccttttttggtatttttcgtggaattttttcaatataaattttcaaaatttcttaaaatatgtaaaaaaatttgccgaaattttgaatttttttttttgaatatttccaaaacttttcgtaaaaaatcctcaaaatatgtaaaaaaaaatgaaaaatttgtcgaaattttggcttttttttagggtttccaaaaatttccgtaaaaaatcctcaaaatatgtaaaatatgaaattatgtaagaaaaagtccaaaatatgtataaaatcccgaaatatttaaaaaaatgagtaaataaaagtcccgattttgttcgcaaacacaaaaaagaaagtgtttttcctaccaattagagcatggagaatccaggaaaaaatatgtatttacataaaattgacagccctatttatcacctataactcgcttcattccccactgaaccgaactttcatagttctccaaattagagtagagcgggaccagggctgggcgaaacttcggcttcgaaaacttcgggttttttgagcttcgaacttcggcttcggctattttacccgaagtttcgggaaaaatacacccctaaagattgagttttcaatgtgaaaatgcaccactagtgattgacttttggtaaacttaaaattaatatatatttaaactatttgcttatttgtgttttttcgcatgcttggtcgagtggtggttctctcggctcttttcattatgtttccttgggtcagttcccatcaaagtagttgcttttcttctaatttttcaaaaatattcatttttttcgacagaaatttaataaaatttaacaattaaaatcgcaaaattttttcattttggactaaatctgttaacaatgcactaaaaatttcaaaaatttcaccggcggcgcctatcggcaccgccggagctccaaaatttcctttattttttaaatcgactcaaaaaccgtgaatattctaagaagtataaaaatttacaaaatatattgcttaaaaagttaattatatttatttatcgaaaagggttggttggtctctagaaactagagaccggcgcgggacgggatcccgcgcgggattttgcaggatcccagtccgcaatcccgcattttttgaaaaatttccgatttcttgcaccgcaaaaaagtggttttgaaaagaaaaaaaatagtcaaatttatgaaccgttaataatttgatttccgatcaactttttaccgtcggatccaatcgaaaaatcttagtcgacccatcaaccccttttaatgcatcccgccagcccctaaaaatttattttcagcattttttgatttttggaaattttttgaatttaattgaaattttttcgaattttccaaaatcccgcaatcccgcacgggatcccgcaaatttaaatgcgggatttgcgggattaattccgcgggatcccgtcccgcaaaaaattttgagttccagtcccgcagcgggatccgcaaatttgaaatttccggtctctactagaaactgcgtcaattgattaaatttgatatttaaccgaaattatgtgatgaaaaaaattttggaattaaaaaaaaattttgaaaaaacttcggcttcggcttcgaaaacttcgaaaacttcgggttttttgggcttcgagcttcggacttcggcttcgaataaaaattgggcttcgccttcggcttcggcttcgagtactaagccgagcttcgcccacccctggtcgggacaaggacgtccttggcatccaaggacattttttattttcaagaaagagggcccaatttcaaggacgtccttgccattcaaggacggatgggagccctgaactatctataaatggtagatatagagtaatgcttgcgaaccaaatgagaaaaagggcggtggatcagcaattctaactaaaacaaatattccttatcagacactattctctgggacaaaattccaaagcgaaattttacacattaaattactttttaaaaaaccaatccaaatcataaatatatattgtccaccgaattgtacagttcagaatactaaaaagctactcaaatttatttcggaccagagtaattctgaaaatatcatatattgtggggattttaacatcccaaatattttatgggatgaaaataaggtaaaacatataaatgatcctacgtcaaatatgctgattgagttaatggaccaaaaacaattgaaacagcatgttaaagaaccgaccagagaaaatacgattttagacttagtaatgactagtgaatcagaattaattaatgaattaattgtattggaacatttttcaacttccgatcataaaatggtcggatttaaaataaaagaaaaattccggcgtaataatcccagtgtttatagaagagattttaaaaatattaatttttcgaaattaagtcgggcgatacttgaaaatcgaattgatttatcaataaactcagtgcacaccgttgatcaaaaatataaagaattcttaaataaagtactgaattatatgatacttttataccaaatagacctctaaaatcgataataaaactatcgtatcctcaaaaaataagagatttattttcagagaaattacggttacataagcttgtaagaaaatttcctgaaaaaagtgaaatcattttaaattacaaagttatttctagtgaaatgaaaaaacaattgcacaaattaagaaatgaacaagagtcaaaaattatttcccaggggcaaaattcagttaacaaatttattagaaataaattatcaaaagttaatgaaattcctacgttaattgatagtgctggaaatatgttttccagcaatgttcaaaaatgtaagatattagcagaaatatttcaaaagtcttttttaagaaaatcaattgttaatggtccacaaactcaatcaacacagaatatgattanaatttctgacattgaattgaacgctggcataatttggaatatattaagaagacttcccaggcgaaattccacttcaccggataacattccttacattntattanaaaattgtgct

SEQ ID NO: 12682 - DNA, 1089 bp, Heterodera glycines
cttggaaaaatggtcaaaaataaatgggttagaaatttcaactgaaaaattttatatttagggaaaaataatatgaaaaaagaatattttattaactcacaaaggatttcagaatcggataatgttcgtgacttgggaattataattgactcgaaactgaatttttcagaacatattagaaaaattgtacgaaatgcatatcttagaattttccaaattttgagagtgttgaaaagcagggaaataaaaactctaacagcagcctataaaacttttgtacgacctcaattaaaatatgctactgaagtttggaaccctaatcttaaaaaagacatagataaaattgaacgcgttcaaaagtttttcacgagaaaagcatttagaaaattcggtttttgtacaaaaaatatggggaaagactaaaaatcacgggtttacacaaattggaagaaagaagaaaaatcaattatttaacaacatcttttaaaataatcaaagggttcaccagcctcgattctgggaaaagtttctttttctcaaaaaggctcaggaggcctttacttttacgggtaaagcgccacacggccaaaactcaaaataattttttcaatagaatagtaaaaaactggaataatcttccagtggtagcggtacaaattaataaggcaaaggaattcagggatttactaaaagcaatgagttctgagtaggattttccatgttgccatatttacactatatttttatcacctgtgaatttttaacaattgattgaattattttattcatttttattacggtattcattttgtatttttaatttgatcaaatttatttgttgttttctttttggcaccatataagagcactaatgtgcctttggtttgctcgataaattaaattatttatttaaaaaacacaggattttttttcctcactttcatcactttttgtcgaagattttctctaaattattttcttttcattattttataaatgcaaaattgcatttttcacctcattcatttcgagcaactcgcaaaagcgtctttttctgcacaaatttgcacattataattaaaataaatt

SEQ ID NO: 12683 - DNA, 1842 bp, Heterodera glycines
aacaaaaactgaccgtccatgttttggcgtgaccctttgtccggtattgcggccccatggtccaccgtcgattcgtgcggcatcagtgccattggagcgcggaagaaatagaagaccggataatgaaccaagttgaggcaggagccggcatacaaatcggcataccgttccacctgaaaagggcgaaaataaaaattgatccaaaaaatttttttgttatgaaatttagtcagttttacaaggaagggatctcctcgccctaataaagtttttaaaaatcggaataatttatattttcccagtaaaaaaaaaattttttttttttttttggggggggggggtaataccccacggttataggacattttgcggcccgacaaatgtggtcggacatttgcgtccacagccaaaaacgacatttgcggctcagctttttcgaccccaaaaaatataaacgtcagaaaattattttccatccaatttaaccgattttttatgggttttcaagtaagccgattcaagtctttaaaaaaaacttttataacccacacccaactggaagcaacgaagaggaggaaaagaatatgagcgaaacaaacccggggccgaggcgcaaaggtccggaccgcaaatgtcttaacacgtaccccactcgttttccgccctcccttcggaaatttttccaaatttcttagagttttttctagtaaaaaaaagaaaataaaaattcccttttgaaaaaccatgacgattttttcaagaattcaattttttattgaaaatttttaaattttcttcgagcatttttggtgggggcggttttcataaaaaaaatctgaatgagttggcatggcatcgctgaaccatgggacttttttataatgtaattaaatgccaaattcaaatgccatgactagggatgcgatttttaggtaagaaaaatcccagaataggtacttaaataggtaaaaaaaaatctcaaaataggtattaaataggtacaaaaattccaaaataggtaaataaaattttttattaacgatttttagtggaaaaaagcaaacaaaaggggaaaattttggttctatttctttgtaaacgaataatttaaatatttttaatatgttcttagaaaacattgacattttaaattaaaaattttgttacataaaaaaacaaataaatttttgggaaaaattttccaattcttagtggtgtattttttgattttattgcatttttgttaaggaattttctgaaaatccttaaataggtataataggtagaaaaactccaaaataggtaaaaataggtattataaaagtcatcgtagacacccaaaaccaagtggaaaatgcttttttcgtgcttatctgtgcgtattaaatgcgcaaaattttaggtatttaactaaaaatcgcatccctagccatgacccatcaattcaactaacacccacttgagaagcgaaaaatgaggtgcgcgtgccgcttcggaacagagagccgaaaacgccgtactgttgttccattgactgtgtaacttcctacaattaaaatattattatttttttcacaaaaagtttttgtaaattcgccataatttgcaaatgccaaaaaagggagcaggtcgccccccccccgtcgtttcccgtccgaaaaatttttttttaaaatttcaaacctagaaattgttcataaaaaaattcgtaggaaattttttcataagaaattctaagaaaaaaaaaaatttttttttaaagtttttcagcgatttattggaaaatttttgaaaaaacttagtagttcattacaaaatttcaaaaaaatcgctgaaaaattt

SEQ ID NO: 12684 - DNA, 3358 bp, Heterodera glycines
aatttcgtaaaaatttacgaaatagaaaaacgaaattcaatttcgtaaaaattttaacgaaatgcgattcaaaagcgtaaaaattttgagttttttgcacaaaattttgatttttttttccaatttcctaaaattttcccatctttaccagtgctttttcgattttggccaaaaattttacgaaattgcctcggacccaaaatttttatagaaattttccacgtcttgccatccagtttttttcgtatggaattttttgtaaacattttttttcctagaaaaaaaacaaaaatataaaaaattaaaaaaacaaattttcagcaatttttttttttttgaattttatgatgaattgctaagttttttcgaaaattttttccaaaaaatcgctaaaaaaatttgcaaaaatttttcttggattttcaaataaaaaaatttcgtcggcgaaattatgtttccggcgaaattttggggtgcacccaacacattgaacctatggtaacaaattttctccgccctttctcgtaccttggtgtactcgtagtcactgttggtcaacagaaatgtcttccgtccggtggcccgcagttgggccaacagaacgccaatgcgttcgtctttctccacaaaatcgccaattcgggtcaaaatttttttcttcaattgccccacactgatgccgccgtgcacatggtccattgcggcacgaatgtcctacaaaatgataaaataaatgaaaaaataataatgggacagccaaaatcgaatttttcacgccgcttggcaaaaatgccgtacatttttcatcaaaacagattttatatatttttgaaagaaaatttataagggcaaacaccgtcatggattttttttggaatttcagcaaaaaaattaaataaacctatggcaggcagctcccaattttttttttttttaatattttcgtgtcaccgacggcaccgcgaaaactgggaccgtccatgcaacctcttatcgaaaaataatcaaaatgtgtacctggtaaattgcgttgtacgacattgtcacgtcactgtatcggacgcccgttctgtctggcgttctaaaaataggactgttatttaaaaaaaaaactcgccgaaaaattgtttaaaaaaattaaacaaaaaatttattcgaagttttgaataaaatgtcgggtaaccggattcaggtaaggaagccaagaaaataattttcttgcaacatttgttcctgcttcggcttggaaacgagggatagattcaaagaatttctaaaattaagggcaatcatacaattttttagaatttgcctcctttccgtcccctttttgccatggcgaaaaaccctaacacaaacaaaaactacaacgcactgttcgaatttgtcgaaaaagtcgacaagccgtgtgatcaggtatgcatccggcaggttgaacaatgtgttgagcacgtaaatttggcgttccgacaattgcacaaatttgttcgggtagcaatcctcaacctctttcctgaaaaaaatttttggaccgaaatatgcattgaaattttaatttaataattttcaaaaaaaaaaaattccaatttcagcgttaatatcgtaggcataacttttattacatgaaaaaaatcgggtgcaccccaaaattttgccgacgaattttttaaaaaattttcaaaattagaaaatttcaagaaattttttttttagcgccatgcgattttcctataatcatgagattttcttacaaaaaaaaatctaaaaaaattttcgcgacacttaaaaaggcataaaacgctaaaatttatggtcttaaaataaaaatccatgaaacacttaaaaatgatgaggtgtttaagaaacaaaagttatgacctaaaaaccgtcaccgattggacccctaaaatggaatagagccaattttttttgaggatttgaaaaaaaaaacaacaacaaagttcttttacaatcacatcgattgattgcaattaaaaaaatttttttttgaaaaatttgtgtgaaaaaccatgtcaagaatcggcggccatgggacgcgcgcaaaatgttgccgaaaccgtccaccttcaacaggttgccgaacttgatgtcaaaccaaaggccacgaatggaaaacatcgggtcgtattcgaattcagcaatttctctggggtaactaaaatttaaaaattcaaaaaaaatcaaaaaaattagaatttgatgaacccaattcggatcagatagtcgatgcaaaacttgaacgtttcggcctccatgattggcgacttgtactctgaaaaatttgacaaaattagaattttttgcgtaattttatgggttgtcccctcgatttttcaaaaaaaaaaacaaattccaaaatcaagaatcggcatccatttcgaccaattccaatcccagacccaaactcgaacaaaaattttagttcgaattcgtgtccaggcttcgaacttgtccgaaatgagcacagtattagtacccaattttttcgaaaataatttacctttttatgaatttgggataaatgtatttaaaattagtggggaggggtgaattcccccagccaaaataatcatttcggacgagtaaaaaagggttacgaattccattttttctcaccgacgctgggtatattgtaaaaaaaataatgaaattttctaattaaaaaaaacgtcgccttaccagccaatgtgtagtccatgtcaaagccaaacaattgaattttctcaagccgaaccgtccggttgacgaatattctgcaatttggaaaaggggaaattgaatgaaaattgggagaaaaaattgtcatagattaaattaggcccaaaaaagttgaagcgaaggctacggcggtgccgtaaagaaacgcattttttttaaaaaattttcatgggtcattttttttttttgggtgtcgtaccgcttttcgggctcccgtttgttgatgatcgagatctgtttttggagatgaaatggcacactcatgctggggtttgcattaattgctgctgaagaattcattttgaattaaaattagctaaaaaatcaaaaaaaaaatgagagtgacatttcaagaaaaaaaaaaaattttttttttgtcccattttttgacggtgtgtatcagggatggcattccgaggctcaaaaaattttcggaaatcggaattccgggggtcaaaattttttcggaaatcggaattccgaggcccaaaaaattttcggaagtcggaattccgaccccaaaaacgtcggaaatcggaaatttttgaaaaaataaaaatataatcaaatattctaaatattttaataagctaaatttaaaaaaaaagaaattccgaaa

SEQ ID NO: 12685 - DNA, 2172 bp, Heterodera glycines
  unsure (1)..(2172): unsure at all n locations
aaatttagcgctgcctatcggcatcacagggcccaaaaagtcataaaccttattaaaaaaattggctcaaaatcgcaaaaatttagcatattttggacaaaatctgttaacagatctaaccaaattttcaaaattttcccggcggcgcctatcggcaccgccggacgccgtaccctttctccttaagtctttagaaaagagcgacgtgaaaaaagatgttttggaaaacaaaaaagtaataaaaaattttaaaatttcaagaaaaaaaaattaattctatacaaaatttctgataaaaagaaataaaaaaatataaaaacaatacaaatattattatggaaataataaatattatttccgaaaaaatattaaaaaaattttgactattttttacccatgtgaatagttgtcttcttcttttctcatgtcttcaacgcatttgtattgccgccattccatccatttgaatcgattttggaagataaatgtgaatttttttgaaaaatgaaattttgactttttgttcgaattcgggtccggggttcgaaattggtcgaaatgaatgtcgtattcgtgatcagcgaccccgaaaaccccaggaaagacgttttgatgaaattcaaaaaaaaaattcttttttttaaaaaaggggggggcaaaccctactattaccgaaaattatgtcactatttcggactttttgtcactatttcttcactattttgggatttttactcactattttagttaactatttcggtatttttcgtcactaaaagttgctgccctagtaatcagtagagcccggatttttatgtttttacatattttttacggcttaattatggcgagagaagcccaaaaaaagcattttcaaaataatttttgctttagagcgacttataaaaatataaaaacacatattttggccttttggcacataaaaacatatcgcacatacatatttcggggttggcacatattttgacattttaggaaaattttgtaagaaaaacagaaaaaattgaaaaatacactcctaaaaatcaacattcttgcaattgcttacaacattttcaaatttttaaaatttatttcaaatgccgatagtaactaactcaaattcttattttgtcattggatttcgaaattctctgctggagcttttaatttataaaaatttttaactgaaaaaaatatcaattttactttcgaacaccttgaaatgtatttgttttgcaattgttcgggcgaaaatgataaaaaaataagattttttggaatttttatgcaaaaatgcccttaatcccgcatttaaaatttgcgggatcccgcgcgggattgcgagattttggaaaattcgaaaaatttcaattaaatttcaaaaaatttccaaaaatcaaaaaataccttggttgagaaagaaaaaagttatggtccgaaaatttattcagtgattctgtgtaaaaagtggcgagtgttttcgggcaacaaggcaaacaaacattgtgaaactaatgggacttacaacgcaaaaatactcaaaatctcatctccttaaatttttcttcgttcttctttcctcatgccatgggttcgacgtaaaagttcgcaaattgtctgtcgtagtccaagataatcggcgttgaagaatcaacatgtttgcgacgcaaattcgcttatgtactgtttggccctcatacagtagttctgcagcaattcctattgtcgcagttggcaaaaatgtaaagtcattcgacttcagaaatgcaatgtggatgcttttgacgcatggtttcgtttggtgctggcggtcggcgtaaataacacggatacgcattttccgagtagacatagccataagagaatggcttctttaatatacagaatattatcttttacccaaagaaggatttccaaccggaaaatgttttttgcattttccatcaacaagataacgttgggctgagtatgtatgggtatgctttgtggtgattgttttgtagagttcacgcatcctctttgcctcttctgctgactgaagtcgcgtgtccggcatagaagggacgtccgcacaaatgtactcactcatgtaatcttctggactctggatacngcatgaagtcggatgcattcccnatccatgtatactaccgaagctggactcgagcg

SEQ ID NO: 12686 - DNA, 1616 bp, Heterodera glycines
tcaatttaccgtattaaatatttttgtctagttttttttgcttcagttacatttctttcgaaataattaattataattagaaggcttggggacctttccacaaattacgtcataattccacagtttggtggtgagttatccttcattttatcgactgtatacataatgagcaaatgcattataaaatcagaaaagagttgaatataaaggtcatcaaggtctatcgactccttccttcacttggcagtgagttatttgattagtgcgaattgttaccatcggcaaggtatgataatgccgaaacgtctcacaatcagcctatttaggtggagaataaaaaattaaatcagaatttagatcacatcacgcaacaaatattttaacatgacaatgagatttatgagttttcatccgagagagaacttctctaaaagattacatttaacattagtaatattctccaattctccaacgttaattatagatcttataagaagagttctggtatccaaattgttttccatataaatgctagtcctttctatatactgaaagaacttttttggaattttgcagggtaatagtgcatctgaagggctttcgaatgataccaagaatgttgaatttggttggcaaagaaaaaagttatagttcaaaaactccgccccacgcgaaatcggcccacgcgaaaacggcctggcccgtaatatgttaacagaaaataataaactgaagcattcgttttaataattaaattttcaaatatattcatttgacgagcatcagctggacagggagcaatgcgaagagcaccatggcgttgcgtttttggtgaagcagatgggagcagtgttgagtgtgtgaagtgaaattgtatgtggtttgagctgaaaaaatgggaaaaccagaaaattcggaaaacagaatttgagggcggttctattgcagttttcccgaccgtaaaaattcaccggaccataaaaaattggacaggaaaaaacgaaagaattcaaaaacccgattttttcgcatttttgttatcatgttttgaaacctttgagggaacccatatgttgtactcatagatctgaaagataccaagaaatggtggattttagttgccctagtttttttatgggtactgtatgttaatttttaaggtcggatacatcttttaacgcctaattctgtatacccgcggtgtgtttgcgttgttcataaactttgtaaaattatatgtactcaattttccagtcatgtttgtggtgatgtaaaagttttagcatttctcgcttttcttgttatttaaatttttttgattattgacacgataacattttccttttggcattgtgtctttatttgaaaaaataaaaaaagcagaggcagaagatagatactgaagcgagacgggatcacgcgcgggattttagcgggatcccattacgaggcgggacaccgtcccaaaaaaaatattccaaaagtttgaatttttgttctatagcagccgaagtagaggagcgccaagtcaaatcaaatcaaggcgactcagatttttccctcatcaaaatttcataatgtgattttttcccctccgattttcctaattacagatt

SEQ ID NO: 12687 - DNA, 3779 bp, Heterodera glycines
ttgtttagcgacggttcgacccttaagtcgtttctttcatcgtttgagaaaggataagtctttgccgctaatttttgtgaaacagaaagttcaacaaattttgttgagtgaggttcgatcagtgtactgtagacaatgcgtacataatccgatttattatcggcgcattcaaattcgatcagctcaccattttgtgagtcaaaaagttcagctgattggtcgtagattttgacctttattgccattatttgccgattggaaatgcttctttttgtccgtcatccactgtttcatcgcattttgtccaaaattttcggaaaaaatccaacatttcaggtgtattgctgataacaccgtcacactgaacattggaagactcaacttgcttttcgttctgttcgaccaggaaatttttttttagaaaatttcgtgattgctggtgttgctggcgctgttcaaactgattttgttcggatttttggctgacattcggatttgaatgtgtcgccatttgtgctctattggcaccggtcgcattttgattttggccaaaatatcgacgctgatcctgatctgcaaaacgcttaaaacaatttctcgccacatgtccctctcttccacaactttggcacgtgattcgattttcattgaatcgctggaatttgttcggctcaaatgcgtttgtgctttgtttggccatcggtccatcatattgtctgtgtggctggctacggccaaaattttgttgcgttctgtccgaattggcccttctcgccgcattttgggtcgtttcggcacgagcagctagagctacaaactcatcaaaactcattcctggccgacgatttagctccaaactcaaggcaagttcggcattatcgaaactgcggattaggtgtttaatcgaatactcgtccgccaaatttcgcgtcagtcccggataggcccttcgcaccaggctcacaattcggtcggccaaatcatccagcccttctcttggctttcggcgaatgccttgcattaattcatcaaatgctgccatttcatgacaatccgtcgcctcaagttgttggagaatgtgtctttttatgttttcaaatataaacggttcattggccaaagccgaattaaatgctcgctctgcgcgcccactgagtttcgattccaaggaatcaatgcgctttttattcggccaatcgctggtatactgtgaaaattttttgaaaaaagatttaatgctgtcatttccttcattgcccttaatgtccggcaatttgtccagaattaaaacgcattcgaggccgttaagagctgtttgctggccatttatttgggttggactttggtgacgaatttgggtcggttgcggcaccttagtgttcgcatttccaaacatttgctgatttgggtaacccataggtggtgggggatgtggatagtaaggtgcgggatatccccaataagtttccggaattggtggctgaactggcggatataccgcaattggttgttgaataacttgaggtggaggaattagaacgtttgggttggcctggcgctggttatcagtcacagttttttgcaaattttgccgcacaaaattaggatttgcttgaatattgggagggttttgacgcgggtgctgaatatgcaactcatgaataatgtgctcgttattaggcgttgatgtgcgcagaaaatttcgatttagaatgtgatgactgtgatgaccactattgttttcgttcccagcttgccacaattccctttcactgttttctcccaaatttggcaagcgtctgaaacgcattctcaaacctccatgttgctgcgtcaaattcggatgaattgccaaatcttgattttccacattttcttcatcttgtccatgtccactttgtcggtttgctgacccaacattcaaaacggcgtgaagaatttggtcgtagttcatggtgtgtgctaaaatttcgccatcgtttacagaattttcggcaaccccagtgttagcggtgttaatcggccgattttctatattttgtggttgttcatttctgtcattttggagatgctggactggagcggcttgttgcattctgagcctttgccttgtcagtggtggtgagcggaaaatcatcagaatttatcaacacgatataaaacaataaagatcagttttaaaacaacacgagcttttaacaaaattcgttaattcgtaaagcacaacacgagtgcttttaatcggcgagcagaaagttgtaaggtcggcaaaaatacgccgaatgatgctttaaacccaacacgagggtatagaaatcactttgttcacttgatttcacaaaaattttatggccgatattatcctttaatgaatagtcgccactaagccaaacctttgtcgccaggagcgccaagttgaacaaaaccaacaaatttggatggggatgggttgtctcttttcagaaatggatcaaacacaattatctgtcggcttgtcagcacctgtttcaaaacgaattcgcaaacactttaataaataaacaaaacaaaataatttacggcgataaattttaaaccgcaacaataataattaaaaagacgagaccacaacaatcaattgagaagaagtcagcatcaaaagaaattcaaagcaattcaagagcagacaagaaaacaaaaaaaaccgaacagtaaaaaactcacaaatattttaaggtccataaaaaaaggaaaacaaaacgccaacaaataattataattcaaaacataaaaagaagtcaaaaggtcaattaagtaccacaaagcaaatcccccgatgcacttcgctcacagagaaaaaagcgttaccgaaatggataaggacggacaaggaagggaaaagaaaggagccctttttaagtgggccgaccgtcctcccctccctgtgatgacaccgcccgaggcaaaagacagaacgccgcgtcggttcaattgggcgagcaaaatcccacatttagcaaccctgctggctgttctgcccctccttttcgacagtgtgaatgccggttcacgggttctcacttgtgatgaacggggaatttggatttttttgaacccccaggctgagaatgcactcatatgctgggaggggatttgtagcagcaggggccatccctcaccctatttgcttcccctccccccggacttattggctagtgggtttgaatgccatgttgcgtattcaattgcgggtgaaaagatttcatcccaaacgcaatgtgacccagtcgaggggtgtagtcttataaaatgctatttatgctgggaaagggtacttaatccccattgttcgcccttccttctcgcctttgtgcttggcacggttgccggctcaattggggcggcactgatcctttgttgttgtttcctttggtcattaagaagaaatggtgtacggtactattgggggggggggggggatgtacgaacttttgccgcaaaaataggcgaaggagaaggccggaaccatcggtggaatggcagggtccagttataagagaggcggaatcggatgaagggagcgaggtgcgaatcaggcaccggggattgaccggaagattaagcccaccacatcaagtgggtggggcaaatcccgaggaaagtacgcttcaagcccctccgcgattagccaataacataaatagcctaacccgccttggatacgccttggctccgtccctactcgggctcattgcctgtcttaatagattgttttcaccggttaagtctgacctggaagt

SEQ ID NO: 12688 - DNA, 1394 bp, Heterodera glycines
cttattggggcaatatttaaaaattaaaatcccataaatttacataggttctaaatgtgggggtttctagcttcattttgaagctttttgagcggcaaaagagggcaaatttcaaaaattaggctttaaggattttttttgtaccgtttaaatttttttgtaaatttgaaaattaataattgtggaaaaacaataatttgacaactattttcaaaatatttctcggcgacattcaccggcagttcggcaccaccttaactaacactaattcctatctaatttttttaaaatatccgaacccccccccccctccattaccatatttttaaaagaagcaagaggatatgatgctttttgagcccaagcgagactttattttttgtggcacgcgtttaatcaggcggtggtacttatgggcttaatccactggaaatcccaatttctactatgatttacgtggagcctgtatttgtctgaaattggaaactggggcattcattcattctttctgggatcccggccgaattcaactcacaaatccccccccccccgccacaggcactggaatttttgtggtcggttacgcttcggaatggtacgcgcgtcagcgatgtgcccaagtgtaccaaaacgtgttggtggacacgctcgtgccccgcagttgggcatgccatcggataagctaaagaaaagccatccattgatccaaaacatttgaaaaataatttattgtaaatttttgatttttttatgtagattttgttagaatgcataatgtatattacaaatattcacatggctaagtggtttaaaaagtaaaaattttcaataaatttttttgaaatatttcgtcaccgtaaatgcgcttttcttagcacaacggcgaaaacggtggcgactgagggaaagatgaaaaacgaaaatcacacacaaaaaattgttaaatttcccccccccctccgtttttttgctttgtcggtatggaaggtggatgatccgaatcagattatgaggcgcggggcattggtggccgcaacgtgcaaaaagggggagaaaaaggcgggggagataaatgggatttttgctgttttaaacattgccaagtttatccttttcaatatctccgagtgccatgccgtgttgatgaattctaattgtctcaaagaacaagcccagtggttgtttcggagtgtgctgtcctccgccggcgccgccgccgttgtttgtgggcagtgccgtgccgaatgagtaatccatttgctcattgggaatttggttgttcaagagtcttggtttttagtctcgagttaattttgatgcgttttttgtgtcagtcttaagcacaaaccgaactttgttaaacagtggtcaatccaaacgcaaaatgccaaaat

SEQ ID NO: 12689 - DNA, 2238 bp, Heterodera glycines
  unsure (1)..(2238): unsure at all n locations
aaaaagtcgctctaaatcgaaaatgtttaggagaaaatgctatttttgggcttctctcatcataactaagccgcaaaaaaataggtaaaaacctaaaaatcncatccnctattgattgtaatattttttaatttaaaattttttgaaattatttattttgtacagaaattacttaagattttggggcattcatttcttttttccatcgactaattgcttcgctacaaatgctaaattcttgtcattgtgaattcgtcaatttttgcaatgagtttttaataaaagattaattaggagcattaattcggttctttgaacattgatgattttcataaatttactggccatcaaactatcacagaccatcattttcgctatcaattcaattatttaatgatatttaggctatcagggaattattggaatttttgtgtatttttaaagttttttcaaaaatatgtatccgtccaaagttatcttttattttatagttctttttttgccatagaaatcgatcaaatattcatatttctgaaattagggatcagttttttaaattttgccgtaattcaattttcaattcttcgggtgtatttttttgtttttattgcattttttatgaaatttctaaaaaaccaaaataatggcaaaaatagtgacgtattattttaatggtaaaaattccaaaatagtggacatttttggagaattattatataaaaaatcaaaagattataattgaaatctattctggattcattcttctctgtcataaaaaaacacattaattaaaagaattccattttggcattgaaataaaaaaaggcaaaaaatttggaacgcttcacgaatttgcgtgtcatccttgcgcaggggccatgctaatcttctctgtattgttccaattttagtatatgtccatttggaatgaacagaacaaacggaacagcttttccttatatatgaaagaagagaattttgagcaacttttgtgatgggtttaaatggcagcgaggcacagcttacaaattagcgatctctcaatttctctttttcttttccttacacactctctttacatctcccatttctttgtcttccctcctctcctattatctcttccttttttttgcccagctgtgcatttgtctgactgttgctaccttttggagggagagaaaaagacggcgagcaaaagagtgaagaagttttcatccaaaggacacacgagcatgggaaggaaatagtgcacggctcttggggaaaagaaaagagtgtgcctgtggaaagagtgccttctcatcgctctttttctgtccatctcttcccccactttccaccccatctccccctcatccttccatcgttcctttccttggacttgctgctgctctttaaacttacctggctggggagttcctgcgatcaccaaggcagggctcctgtggcgaggctccaccattgcactttcggtcggggctgacccgcagggcggtcccgaactgggataggcccacagctaaatttttgagtgctggggacggcgttcgcgcctcccctttaaaacctttgcttcatctaccgtatttcctcgattataagccccggggcgtctattgttcaacccccctccaaagggggcttatattcgaggggggggcttccaatcgagggggggcttttattgttcaacctctttccctatataaattcttaaaattttttgctttctgcataatggtacaatttaaatcttaatctaaatttttgaattgaaaagatttttcattttttggcccttggaaatttaggcgaatgtttgaaaattcataattcacttctaaatgaatcaattaaagtgcaaaaaagcattaaaaatagagaaaaatctggagcattttatacttttttagaattttctatcttcaaaatgaagaagttattacataaattttggaaaaattcgttttttgagaaaaaaaattaatagcgctgttctgaaaaggttttttgaaaaacacgaaattcttcctctataagcttctgtttattctatatttttataagacttttgaaaaaagtacaaaaataaactgattttggaattcgggatcatagatggaagcaaatggtttttttgggccatgggttcagatccacttgcctgtaaaaatgttttttagggtctatgggaccactagatcaggaacttgacatccactttgctgagttccaaag

SEQ ID NO: 12690 - DNA, 3888 bp, Heterodera glycines
ctcttcatctctgatttctctctctttatctctcactctccatctctgatttctctctctttatctctcactctcttcatctctgatttctctctcgttatctctcactatttctctctctttatctctcactctcttcatctctgatttctctctcgttatctctcactatttctctctctttatctctcactctcttcatctctgatttctctctttatctctaatttatctctctccttttaatttaaataattatatttaagttgaaataacccgcgcaaaagtgtacactttggcaaagtgttccacagtgatcgcctctccagtgactttctgcgcactttcgtccaatctccgcatcccaaagtgtttggctgctttgaccatttccattcgcttgtcaatgtccaatttgagcagttcgctcatgcacttggctatgttaccataaacaaattcgagcagtactcggaaaatggtcgcgtcgcattcgctcatttccaacagtccgttgggttttctgctgataaaaagcgcatttttgtgcacgactaaaagtcattctttcaattgtaacttcaaaatccggcgaaattcctccgaagcattgaccaaaacaatgcgatggccataaacaatttggccatcgctgaagcgaaagcgaatatcggacagatcgggcgagtcgacaaatttcgggtcaattggcaaaatcggagaaaaggacggcggaggagccgtggaggagccgaaaaaggcgttgagttccctctcaaaatggaccaacgaatgccgttggagttgcgcaaaaagcgaagagagagcacgcgcggcaccaaaacggacggaagagagtgacgcggaggagagaagacggaaaagctagagagagagggggaatagaggggagagagagagagagagaatagaggggagagagagagagagagagagaatagagggggaacagagagagaaagaaagagagagagaaagaggagagagaacagaaaaaaagaagatgaagtaaaaaaggaacaccattttgctaatttaaagaagttacttgacccgatcgccttttcgacccccccccattttctcaccaattgtcccatccgtgccattccgtcgtttctgttcccccgccccattctgcctttctccccattttttgtcaattcgcttgcgaatgtcgtcccgaactcgtccaccagctgcgtcaacttccgctgatcatcgctgtccatggcccattccatcgcatccatccaaaagccgacatttggccacccgacgcccaattccctcagcttaagtgccatttcccatcttaaaaaagaatcatttttggacagattttccgtcttccgtacctttgtgtctctgctgccaaataaatggcttcggagaaagcccatttttcgtagtcattaagagaagcgaagcgaagtgagtccatttgaaagggcggctgaggggaaaaagcgtcggaggaacggcacaacgcattttggccttgaggaaaagccacggaaaatatgagccgaattgtttcagtttaacctttagtattgtcccattgttggcgcaaaaccgaacaaaaagtgagaaaaaggccgaccaatttttgatcaccgcgtgaggcggcgatggcaaaggcggagggacaaatttgggaagggccgaagggaagggacgaaaagggcaaagggacgcagaggaagggattggcaccggcacggagcaaaagctcacagagggcaaaattaccagtcgaagcagcgatctgaaggaggaaaagggaaaaagatcagaaaagaggaatggcaaatgaatgaaatggccaatagccttttcccttccccccatttgtcaaattgttcaattaatttgaattgaaacattcgaaaatgatgcccctgggcattactctcccccccccccccctctccatcaaaaatttttttcctctcccttcccacctgaatgtttttctcttcgcatctcaccgccctcgcccctttcggctgtccaatcgctgcgcccactaattccgtttcttccattgctattgcccaattcagcggagtccatccaaaaaaatcagggaatattttcgagtcgatcggaacggccgatgatgttagttgatgcgaatggcattcagtgcccaaaagaatggcttttgtagcggcacaaaaggggagactccacgaatgatcatcagcgaaaagttgggaagcagtgggaggagggcaatcgaagtgggggagaagcaaacgagcagcccaaaaagggaggggagaagggcattaaaagtggcaaaggaaaagccaaagaaaaagccaaatggaaaagccaaagaaaaagccaaaaggaaaagccaaaggaaaggccaaaaggaaaagccaaaaggaagccaaaggaaaggccaaaggaaaagccaaaggaaaagccaaaaggaaaagccaaaaggaaaagccaaaggaaaagccaaaaggaaaagccaaaggaaaggccaaaaggaaaagcattggaaaaagggcaaaggatgataattaatcggaaaagggcgagtcagaagaccaccccacctgaacgatgtcccagggccgaattgttctcgcgcgtctctgaagtgcgtacaatacgccctttctcagccactgttccaatggcggtgccgtttttgtactgatgaaatggtgcagtgccaacaccgactcgccattcatgcgcaatttgtcgccaaccaaagtgccaaattgtgagatttctgtcgatgagtcatccgccgaaatcaattggccaagtggcgaattttggacaatgagtgacaattcgttaaaggaatatccgtcggatgcgatgggcggggacaataagtgaaagttgcgcgaatgtggcaaagaattggccaaggagttgagcaattcagagacagaaacggactcggaggagaagggagcgcaatggtgcagaaagtgggaaaggagaaagtcgaaaatggcggcgaggaacagagagacctgccgatgagaggggaaagaatggcaccgaaagaatggcacggggagaagagaccttctcgtcaacaatggcaccaattcgagagtcggtcatccaccggagaaagagtccgccgtttaaatgcttcaattggcttcgatcactcagcgattgccaccgctttgactgatcagcgactgttcggacgaaatgttcggaggttttctgagcatgacgaatcgcatgccaagcaagagaagtgggcaaaaacagctgaatttggtggagagtgaaggaaagtgccaaactcagccgaccaaagtgactgtgccaatgtctctgcacgtgcatttgcccaacacagcgcacaatcggcgcaactcaatgcccattctgacgagaagttcagtcagcacttcgactgtcccgttgagctgatccctttgctccttctgagcattggccttttgccgaagcgcaatcgcctccaaactgatcggggcggtcgcccgaagttgatcagtgctgatcagatttgtccacacgtacaaacgcgggttgtgccgcttggatgcacaaatggcactagggctttgagttggatggagtggcgttgcttttgacggatggtccgatgggagtgagtgtcggtcggttgtgcctttgtccggctgcttttcgcgccccatgccacccgtgccctcctccgtctgattctcccgaggcgtccctcccctcgagcggtatccgctgtccgtcgatggtttctttttgccgcctatctctcgcgtcgctccatcgaaattagcctcgtcccgcaacgatgttgagcatttcagtgaataactgctcaatgaactttgcaaagagcct

SEQ ID NO: 12691 - DNA, 1753 bp, Heterodera glycines
gttgcagcgattgatccggtgaattttaattttgaattgacaaatagggttaaattttaaagtacaagaaaattagtttgaaaatttttattaatttaaatagctttaacttttggattttataaaataaaaacctaaataaaaatttattatttaatattttcacctgaaataaattaaaatttgatttttttttaattttttgaattttttaaatttggggtagcgacgagtcgggggtcggggacctcggggggcgacatgtcgggggtcgggtcggggaataggtcccaaaaaggtctcgggtgggggggggggctcggggttggggcttaaccctatttgaaacaatcgcgtcgataaattttcatttttaaaaattatgctaaaaacccaaaggttgcgaactgcgcaaaaaaatgttgcagatcacgttcgtgctctacccctggactgaaataattcattttttatttaattattttaaaaccaatttcgcatagatcgctccattttccgtgtaaaactctgatcgctttgttcgccttttgctcttcctttctcctttttggaacttccatcaaattcttcgtttttctgtttggcatcaattacattttgcttaagcattgcttcttcattcaattagtgcctctaattggctcatcaattgctgtcactttgcaacttggcattggaattgatcgtctgtttggcgttatgttaccactatggtaataattaggggctaatatttataggtgctaaaaactagagtagagcgggaccgggaattttgggcaaaaccgggaccgggacttgccgggacctgagaagtcgggaccgggacctcgatttttgttcgggaccgggaaccgggaccaaccgggaatttttaaaaattaaaaaaaattcaaaaaattaaaaaaaattcaaattttaatttatttcaagtgaaaatattaaataattaaatttttatttaggtttttattttataaaatccaaaagttaaagctatttaaattaataaaaattttcaaactaattttcttgtactttaaaatttaaccctatttgtcaattcaaaattaaaattcaccggatcaatcgctgcaaccatttattttgcaataaattgatacagaacaatgtaaaattgagaaggtgagatttatgctaaaatgttatttaaccaaaaaaaaagctacagatcgccaactgaaaaattaataaaaatttcatacatacagagaaaagaagcaaaaaatctaattatttttttaaaatttactagaataaaattataatacagtcatggtcatatgtttaacacaccccaaaatttttttataaatttagccgtaatttttttactaatagcatatgttagatgctttataccgaagtagttagtatccaggtttcgctgtagggtgtgaaaatgattaatgggttttttccctttgatctttgccgccggcccggggggggtgattaataattaatgaggtgagggggggggctaattatgagggggggggggtgagtgtgcgaattgggaggagcagtggctgtccagtacaggggatgggttgatcattgatcagagtgttgatcagaatttggtgatgatggaggggggtgtgcgtgtgttgaagggatgggggggcgtcaacggcgaatgatgctgccatgcatatattatgcaggcagagaacaaaatgaagaaaagaataaatgagagagagag

SEQ ID NO: 12692 - DNA, 3286 bp, Heterodera glycines
aaagggtaggaggcaagccagccgatggtcaagtggttactgtgcttgcttttggtggcgtggtctctgtggttcgagtcccattgtgatgtttgtttaaaggaaattaaaagggtggaggcaaggtcgagctttttgcaataaaagaaaggaaggaaaatgggcattgaaaggtgaagtggcaagcggccagatggtcaggcggttagtgtgcctgccttttatagtgggttcgggtcccactgcttcagagtaatttgaaaaaatattatatataattctactttttgttttgtttttttatttaattaactttatggaaatatttgtttatttgtttattcataaaaaataaaaaagtcatcagaagggcgaaaaccacttactctgacgactattccggtaaatgtgtcgtagagtaagtgacaaaatatatggatgatcacaggaattaaaaaaagacaaaaatatgtgaaaataaataataaataaattgaggtcaaagtcaaatgaggtcgaaataccaaatcacttagaaatttgttacattctagctttcccggtcttacatattaccctagtgaactttaagttttattttaaattgatttaaagaatttgtttttattagttctttatctagttgattccacaattttgttaccctcccagcaaagggaatgaattttttgcccagtttgtattttgtgttaaatctataaaaggggatgttaaagcgtgctgatggattaaaaatagaaaatagtttcagatctgttcggccataaacaattttatgcgccatgaacagatcaaacagctttcgccttttctcaagtgttggcagttgcaggtattctaatcgattttggtatggaattggcggaaggctacatttaaaaaatacttttttggtgaaatatttttgacacttttcgatttttttaatatttttttgaagagacggattccaaacctctggagcgtattccaataaaggcctaatataagttttatataacgtaatccaaatcttagacgatttggatttaattattctaaacaaggaacgcatacgtaaatacgcattccttgttatttggttaatatgatcggaaaattgtaatttgttatcaatgtttactcctaaatccctaattgtatccacagcatttattgtatttccatcaaatttatatgtttcttttggggtttttgaacccaaatataatacaaaagttttttgcattgaaacttttatttgccatttatttgcccattcgaataaattatgcaatgctttatgcataatctctgtgtcggttcttgctttataacaaatatataatttatcatcatcagcatataattttattttcactcctgatggcaaagcatcaggaagatcgttaatataaatcaaaaataataaagggcccaggacagagccctgggggacgccagaggtaacttttttacttgaggataaagaatccccaattttaactcgaaaagtcctattactcaaaaagccctttatccacattaaaagtttgccctttataccaattttttccaatttgtataaaagtaaattatggggcactgagtcaaatgctttttgaaaatcaatataaatacagtcaacattttttccatttataattgcctcgtaccaatcttccacaactgttattagttgacttgtcgtagacctatttctaacaaaaccaaattggtattccgaaattttattgttttttaggagaaagttgtaaatattttggctaagaattctttccataaccctgcaaagtgagcaggttatagaaataggcctataattttcaggattaaatttgtccccttttttgaaaagaggaaaaactattgattccttccagatatctggaagagaaccagagtctaatgaaatcctgaataggtcagtaataacagttgctaatgaagaatggcagtttttcaatattttatagctaatattatccggggaggtcccgtttttattcggaagttttttcaaaagtttttgtgtctcgatgatgttaaagtctatatctgatataaaacattgattaacaaaagtattgcccaagtttaggtagcctgggtcaacatcagaattgttaaacgaatttgcaaataagttggctaataattcacatttttcatcaccatcatgatagcatttgttttcaaagactaaattcggtatttcaaagggattaacatcgtatttttgtaggtatttaaaaatggaatttcttccctttgaaatagcctttttctcaatttgcgagtgaaatttatttgtttgtatttttatatgtaaactaatgctatcataaagtgctttttttgttgggtcagttttacattgcctatacagtctggctttctctttgatggaggccaataaatgcgttggatatttaggggtcaaatcttttttggtaatttttttcattggaatacactcgtttaaggtttctagcaatgtattattaaaggcgttgtatttttcgttcatactaaaatgctcgttagataaagcgctaattctagaagaaaccataatattaaaaagagaaacattcgacggaaaaaaccgtcgattgtaaaagaagtttgttttttgtagtgtttttggaatagtcaatgtgaaaatttgcgctaaatgatccgatgaaaaaacaccaccttcaatagtacattgctttacaatttgatcatttgccggcaaaactaagtctaaccacgaatttcccctggtgggtccactcgtggcattgaaaaaagaaagcttactaaaaaagtggcaaaaaatttcaccaaatttactcatagaaatgggctgcccttccttccataccaggtctttattcggaaaattaaaagtgaatcgctgtggaaaccgctaacttctagctggccatctttcaatttatataagcttacggctcgcactacagcacttttgatcatgggtacttgcgaacctgggtcaaagaagaccaaaatcctaattctctttgtaggatttcttctggagaaaattgtgacgtatttcgccattagaagcactctttttggatcagaaaccatcgtggctactgttccattttctgttgaaccaattgtcgttatattgacttctgcatgtgttctcttgaattgtgctttcggctttgtctgactagtgttccattcacggccggatttctttgtattcggacaaataactttgttatgcgctcctttgcat

SEQ ID NO: 12693 - DNA, 1651 bp, Heterodera glycines
ataaacatacatatgtattgatatgataagtcaaatttcattttgtgtccataattttcaattttaccgattttatatttcggaaatctcaccaaatttgaagaaatattaacaaagaagcaatggttgaagtatttctggtagagttggagcatccgatgtgctctgttggcgatttgatgctgctgaacaccaaagggataaaagcaaaaagtgtttaaattactgtcggaatgtcggattttgagtccaatgtgaagatgttgaccacaatggtacctgacaattttatcgtagtcattgccaatttggccaatgcttttggcacttcttctgttgccttaccattctcggccaaattggtgctcaattccttgaccgttttctcctccgtgaattcatcctggggacactttcctggcgattctgagttaatgccatggcaaatgtcaacaacgatgaagtggaattgagacgctttcatttcaccggaaaaattcagttagtagaaaaaagtacaaaattacagtatctttgtgcctacccatttttgggtgctcaattaatcttgatcgtgccgtcaggtaaaacgccgggttttccacaagaatgcggtggtgttccgtctcctcaaaggcgaaccatttcttggctatgtaatgcagcgcagggtttggttcgactacagtaacctcatactgtatgaattgttctaatacggtaagagagaacaaaaagcgtaaaatgagctgacttttgttgataaggtggcgaagaaactgttcactgctgaacctcgaagacccaagcagagaattctccgcacttttccgtccaaaactttccacggagtgagcgaatgggcgaaagtttcggtgataaaaggctgagcgacgagcactttttggtagtcgacggtgattttattggtcaaaacggaccattggcgagcatttttaagcgtaaatgtgtaatcttgagaagaaagacgcactaatcacttaaataatccaagcaaaacgcacggagaggaaagtccaaatcagactcggacagcaaaatgttgtggtgcaattccatcgccagggatcgggaaaagccgcttaaataaaaaagtgcgaaatcgccgaccaaatcggtcctgccaagacggaccttccgaaaagggacggtccgtcggacaccaaataacagcccgtgtgctgcttcttctgtcgttgcttttcctccgccactctctgttccctggggcagactttttcctgcacaattcgttcgccttctctgccccctctttcgatggccacccattggggaggcaatttcctgcggggaatcattccgctgaaaaggcaccggcgaagtgagacttacgcgctccaatgttggctctgccaaaaatgccacctccaatggacgatgaacagcagttgagcggcctttagcaattaaatgagtcaaatttgagttttggtcgggccaatgatcccaggagattactataaatccatcaattttagcacatccctgcccaattaggaaatgataattttaaaaaactcacaataataataccggagaggaaaattagcgcaaatttccaagagcttccactgagtttcatttgtttaattggggggggggggtaaaa

SEQ ID NO: 12694 - DNA, 865 bp, Heterodera glycines
ggtcccgaattttgaaaagctcaggtcacggtcccggtcccggtagggcaaccgggaaccgtgaaaaacaagcactggtaagaatgggggtctgagtgaaaaattagtgaagaaaattggagtcaaagggaaaaataaaaaataataattaatatattctttaaaagtaacactgcccaagtgtgcaaatggcctaatggctagtctccttgactttcccttcttctttcccctggttcgatccctcaacagaaactaacatattttgaatttttttttgtatactcgtgggtttcctatagagaaaaaatgattcctcatagttttttttaaattgatacatattttatcattttttaaatgaaaatcctaccaattgagcttaataatcccaaaaccaacctttttttgctgaaaatctgttaacaaattacacccaaatttcaaaatttcccccggcggcgcctatcggcgcctatcggcaccgccggacccccttcttccccaaaaattttttgaaaaagcgcgccgaaaaaatgtgatatgaaaagcaaatattaatttataataatattcaatcatttagtccaaaaaatgattaattgtttgaaataattaaagaaatttgtttgaaaaatttcattaatttaatttagctttaacttttggattttattaaataaaaaacaaaataaaaatttaatgttgtattattttagttgaaaaaaataaaaatttgaattttttaaaaaaatttttgaatttttgaaatttcccggttggtcccggtcccgaaaaaaaaccgaggtcccggtcccggcttctcaggtcccggcaagtcccggtcccggttttacccaaaatt

SEQ ID NO: 12695 - DNA, 1533 bp, Heterodera glycines
tcatcaatcatcatcatcatcattatcattcgtcgtgccactcggccagctccacaaatgagccctccgtgctgttggacgacggcgaaccccaggtgccgaagccagaacagccggcctccgtcgctggtccatgtcgacggcgacgccttggcggacgaatgtgctgctgctgctgagggctgactgtcgcttcagctccgccgtggtcgtcatcgatactgtcgacatcgtcgttgctgtcgtcagcaccactggcgtcgacggtcaacgattcgcccgtcagcatatgacgacgacagagtgggcacgcccgactctggcatgcgtgcgtccacaaacaaacgctgcaaaagcgctgagcgcagcagcccgtgcacaacagcacctggtccaccaacggctccatgcagatgggacacgcttcggccccgacgtccgccttccggtgcaccccgtcggacagttgttttagctccgaatggtccagcggggtccattcgtcgacggtctcgtcgtgaccaatccagtcgtccaatggtcggccgtcggccaggatcacgtcgcgggtggtcgccaactggtcgccatacagctgccagtcatcctcctccagcgccctgtggcgctcgtcttcgccccactcgtgctccaacagtcgccagaatggctgccgttcagtgcgcagacgtctccgcaacagacgttgtcgacagcgtctgctggagcggcgttgctgcttacgacgctccgccgccgggtcgccggtcgtcgacgactgatggaagatcacccggaagaggggtctgtagcccggcgcacggagccgtgcgcttcgccgcggcttaagcacaaaagataaaggatcgcacgcgtgcggcccagtcattaagcgaccgaccgcgtgcgttcctgctgaaaaatgatcacaaagggcaaatccgacattaagtgaccgcccgcgggtggcccattcaacaaatgatcactcgcgtgtgacaggaacataatgtaaccgttcgcgggcgttacagtcgtcaaatgatcacacacgtgcgccacaaacataatgtgaccgctcgcgagcgctccagttaacaaatgatcactcgcgggcggtccagtaaccaaatgatcacacgcgtacgccacaaatataatgagaccgctcacaggtgctacagtcaccaaatgatcacacgcgggcggttcagtcacgaaatgatcacacgcgtgcgccaaaaacataatgtgaccgctcgcgacccctacagtcaacaaatgatcacacgcgtgtgatctgaacataattgagcgctagcgagcactccagtcaccaaatgatcacatgcgtgcgacacaaacataatgtgaccgctcgcgagcgctccagttaacaaatgatcactagcgggcggtctagtaaccaaatgatcacacgcgtacgccataaatataatgagaccgctcgcaggtgatacagtcaccaaatgatcacacgcgggcggtccagtcacgaaatgatcactcgcg

SEQ ID NO: 12696 - DNA, 2962 bp, Heterodera glycines
agcattccaatcactgggagctcaatccttcgtttttcacggattcttcggcatcgtaatagtcgaggactcagttatccgacattacaatcactgggtctcaattctccgccattccaatcaccgaggattcaatccttctgtattacaagcaaagaacttagttttacggattgatcgtcatcaaaatcgcgggagttagtttaggcttggcaagcatacatcggcaatttaaaagaagtagatatcatgtggatatctatatgagtatatagtgattttgttcataaacgttcattctccttgacttccttcccgcgaaatcacacccactcccacacacgcatcctcacggcacacatacccatacaatacaaaatatgtacgtctgcaatcgctcgccaacataggcttacatcgcgccttagagttaagataatttatttaaaatattattaactatggcaattttttgtatgtcatcaatcatcatcattatcattcgtcgtgccactcggacagctccacaaatgagccctccgtgctgttggacgacggcgaaccccaggtgccgtagccagaacagccggcctccgtcgctggtccatgtcgacggcgacgccctggcggacgaatgtgctgctgctgctgccgagggctgactgtcgcttcagctccgccgtggtcgtcatcgatactgtcgacatcgtcgttgctgtcgtcagcaccactggcgtcgacggtcaacgattcgcccgtcagcatatgacgacgacagagtgggcacgcccgactctggcatgcgtgcgtccacaaacaaacgctgcaaaagcgctgagcgcagcagcccgtgcacaacagcacctggtccaccaacggctccatgcagatgggacacgcttcggccccgacgtccgccttccggtgcaccccgtcggacagttgttttagctccgaatggtccagcggggtccattcgtcgacggtctcgtcgtgaccaatccagtcgtccaatggtcggccgtcggccaggatcacgtcgcgggtggtcgccaactggtcgccatacagctgccagtcatcctcctccagcgcccggtggcgctcgtcttcgccccactcgtgctccaacagtcgccagaatggctgccgttcagtgctcagacgtctccgcaacagacgttgtcgacagcgtctgctggagcggcgttgctgcttacgacgctccgccgccgggtcgccggtcgtcgacgactgatggaagatcacccggaagaggggtctgtagccgggcgcacggagccgtgcgcttcgccgcggcttaagcacaaaagataaaggatcgcacgcgtgcggcccagtcattaagcgaccgaccgcgtgcgttcctgctgaaaaatgatcacaaagggcaaatccgacattaagtgaccgcccgcgggtggcccattcaactaatgatcacacgcgtgtgacaggaacataatgtaaccgttcgcgggcgttacagtcgtcaaatgatcacatgcgtgcgccacaaacataatgtgaccgctcgcgagcgctccagttaacaaatgatcactcgcgggcggtccagtaaccaaatgatcacacgcgtacgccacaaatataatgagaccgctcacaggtgctacagtcaccaaatgatcacacgcgggcggttcagtcacgaaatgatcacgcgcgtgcgccaaaaacataatgtgaccgcccgcgggtggcccattcaacaaatgatcacacgcgtgtgatctgaacataattgagcgctcgcgagcactccagtcaccaaatgatcacatgcgtgcgacacaaacataatgtgaccgctcgcgagcgctccagttaacaaatgatcactagcgggcggtccagtaaccaaatgatcacacgcgtacgccacaaatataatgagaccgctcacaggtgctacagtcaccaaatgatcacacgcgggcggtccagtcacgaaatgatcactcgcgtgcgccaaaaacataatgtgaccgcccgcggctacagccaacaaatgatcacatgcgggcggccatcaacaaatgatcacacgcgtgtgatctgaacataattgagcgctcgcgagcactccagtcaccaaatgatcacatgcgtgcgacacaaacataatgtgaccgctcgcgagcgctccagttaacaaatgatcacacacacacacacaaacacccacacgtacaaccaccccttccctaccactcaaaacacatttgaataatgcggtttatcaatttgaattatttttaacataatgcatttacgatacatcatcgcccctcagctcaccgaggtctgctgatcgcctcgcacttctcggacttcatcagagaaaacgaacaaatcatcatcttcctcattttcatcgacttcgtttctcggttgtagttgtggctgttgcgcgagattcacggtggcggtgcccgaagtgccaactcgagtcccatctgttaattggttcataatggcaataatttgttggcattgtaccttcaaaatttgcaattgccaaaacattctgtggcaatggcgcgctccccgttggcgtccactctgtaattggattattaattaggcaacagtgacaatgaatggcatccccacacgctatccaaaactataccgtggccggcatgcgcgatgatgttcatggttgaaaactgcccgtacgtagtggaaaacaagaacgtgttttcgaccgtggccccggccttgctggtgacaacgttgagacggttgagttggacacggtcgcgcggctgagcacgggcaagctcgctgggtcgatcatgccgctcccactccttcacggtgaggagctgcgtcacttccaattcaaacttcaagaccaattttcttcctccgaaaatggacttgtcagtccccattgggccacattcggccacca

SEQ ID NO: 12697 - DNA, 2359 bp, Heterodera glycines
tttgaaccgttgccgcttctgcaagtataattgacgagacaaaatcggttcgatacatacgaatggtgaagaacggactcaatcgccagtcgatgagcaatggattcttcggtacatttcctattatcactaacgcttttctcaccatcctctgtcatcactccgtaaacatttgcctgaaaatttggccatgatttaggctaacgaaacaacagcaacagacgaacccgcacataatcgcaataagtacgctcacaaaaccgacgactttcccacaccggttccacacgaaaagtgtcgtattcggccatgatgcattccaaattgtccgtcattccaacgggccacgctgactgcccatttttgaacctgtaaagaaattggcttacattgttttcactgaataatactttgaaaagcattgcacatggccaaatttaaacagcgaaacaggaaatgcctgccacggataccagtaaagttgagggtccattttagccaagcattcctaaaagaacttttgagtgtaaagtggaagtgttcctggcctcactgaattcatccacgccccgtatccttcgtcaatgaaatgaacgtaagcaaactgataacagcgttcactacgcgcattcaccacctccaccaattgagtaatcttaatatatattaggtaaatcaatttgaatttattttttgttacatactcttcctcgagaataaacattttcctcaagcggtgccatcacatatttataaagttggatttccgaagaaaagggcgacgaagagtaagaaccaactccttcgtcctcactcgaagctgtctcttcagattcgtgtcttctcttgtttcgtgcatcagttgaatttattaactccaacgcactcaacggctcgctaaaatgagagactaataaaattgattttaattaatgcattttacgttagatgaatttgcagttgatcagttatatgattgtgcagtttgaaccatacacagttgggtgattgaatgtgagccaacttgcaaattgctgatgacccagaaagaacaatacgatgaatctgaatatttttttacaattcaatataaagacgtagtatatatgtttgtaagattatttcattaaataacacattttgccttttcctcatccgttatcaattcacgctgacgtcggccaggtccttccaaacgcttaagaatcggagaatttgaccggttacaagaagacattccagcactttcactgtttagtgagcccgatttttggttctacagtctgttaagaaattatatgtaggtccaagaattttttctacttcacagatcgttttcgcgccagcccgaaggcgccgctcggtaaaatttgaaaatttgagtgtggtttgttaattaacagattttgcaccaaatacataatgccataaattaataaaaaaaaattgtataaaatttcaaaaaattgtaaaaatttgaatgttttttgttaatcattctgatttttggatatggtatgtagagtaatatttaaaattaaaacaggactttttgtcaaggatcctgtcgggttcacctggaattcggattctggtccgggttttaacattccgcgttcaacttatccttatcaataaaatgaccagggtttccgcccgaaattcatttgctgtcgaaatcaggcacagatagtgagaaaagatgaaataacttactgtcgaaatcactcattcgaaaccaatcactgtcgaaaagacatagcaccggcgggggtgggatcccaaggattttcaaccccatcccctgtttttcctatacccgaaaaatgggattgcagaagcagcaaaccaagttaaaaatatatttttcgttcgttccaggccattttaaattttggaaaaaatatgcatgtgaattaattattacacgccctattaataataatctaaatataatatttacaaatgttcccacaattagaaagacaaacaaatcattaacaaattatcgacatttgtttatgtgttttctgcgtttattatttttaggtccaaaaattcataatttaaatttaatttataatttaacaaataattataaaaagaatttttaatttttatggtgccaaactttattgtcgccactttcatttatcaaataatccataaaatgcgccttggcaatgtcatcaaattttcgtcccctcaagcgttatcatttatttctgttcaaaatgtcaaatgctgaaaaattacgcaaatttttttggttggtagggaaagaagatgaagaatttgtgccgtaatttaatctgtcgtttttagtggttggactgccggggggggagggattttattt

SEQ ID NO: 12698 - DNA, 1777 bp, Heterodera glycines
ttcttaaagctgctggtggaatgccattctttgttaaggccaatttgtcagtttcagtgccatggggcaagtcaatggccaagctaattactcccataaaatggaaaaagattgctcaggagcacagtaaatgatttctagcaagtccggtcaaaacacccggtttagttcgtttttattccggcattacgcgccgttgccaataaaattaagagcatttacacggcggacattgccgacgaagccaaaaaaggaaaggatttgcctcaagggatgaaaagttcttcattagcttcgccatttgttttcccattttctccaatgttttaaattcttttttaaattgccgtttcaaattcaaaaaccgcaaattaatctaattggttcggttattttaaaatgtatggcttagacgtcacattaatacataataaattggatttattgacacacgaaaaatactaattaattttagcaagctaaggactctttttgccttgctctgacaatgcgtttgaagcttttaatttcattttttcatcattagccttaaattgaaattcgattaaattttattttaatttaatttaatttaattattttcgcctttttttaattcccacagtttttcgaatatcagcaaagcaaactttccattagcttatgaattcattttgcacactctttttaacattttctcatttatgtaaattctccaaatgtgagaaaccctatcgacggaatgaacttcaaagaattcccgcaattattaattaccagtaattgtttccccgggctttttttctttagtgtctgagcttttgatactaatgttgcatattcattcagcattcattttaatacctttacaaaaatccatttccattttttggccaaatgataattttctaaggctatcaaaatttagggtgggaccgtttaatttaaaaaaaaaaaattattttcagaaataatgctaattggtcatcttttaaggagttgggggttggcgcgacagaattggccgcctcgcttctccccgccgccgccccctccaaatacccccgcggcattttctcacaagtcacaacgcccacttccttctcgtattatttggaaaatgattgcttcagggatcacgccggtgtttttaaatttgcgaatttaaaaaccaaaaaattccataaaataattttaatcataaatctctttaaaatttatttccctgtttttcgaaattttgaaaaggtcatttaaatttttccctttttattttttaaaattggccattcatttgcaaaaatttcgtagttaagaaaaatgacagctaataagcaattcaacaacagcttccttttcccctcatttgtcgtcgtttaaattctgttagcaaccatttcacttacttttgtttggtgtcaaaatttgttgcggcacaaaaaaaacttttaaatttaaatgacaaaaattacaaaaaaagaaaataatagaaaggaaagtgttgaaaatttagacattcattttgcgtttttaagttaataaaattttcaaatttaattccttgaaattgtccattggttccgtttgccatttgccgatgcttttccctccaatgcttttcccctaaatccctttcatttctctccccccccccccaatttcggcaccattgcgccttccgtcactttcttcgccttttttgacaacgacagtcctcccattggctcccccgcttcttcttcccttttggccactgcttctgactctagaggtcccc

SEQ ID NO: 12699 - DNA, 2436 bp, Heterodera glycines
  unsure (1)..(2436): unsure at all n locations
tttttgcactggattagttccctattctgttaaggacatcanaattagtcttatattaaaacgcttaaaattttagtttaaacgattaacttcaacaaaatcctctcatctaaatttagcattttttccaacgctgatcgatttgaagtgaaaaccgaatggcacataagcaaccttctaattctaacaacgttcaagtcccttcttgggatgaattcaatttggtgcaagaggaagcaaattcaaatcggctttctgccaatggatttgaaaatgaccagcaggaaattggaccaatttacgaacctggacatgctgaagaatttggaccgaatttaccaccaggtttgttagaccgagtattttcctacattaactttaggatttgtccttggtgaattacaacaagaggattcggtttctgtcggaatgaattgtgatggcgcaaatgacgacttttctatcccaatcggtttttgcttttttattttaagttcttagttttttttagaagcttatgaccttgatgacccagaagaccccctccagggcggcgcagctgcacagaaaaaggcgaacaatttggaggttcacaatcatccattggtattgccgaaagttgtgcaccaaaaaagtggtcggtctgtcactttgcgaacagagtttagcatttcttaagacgaacaatgttcgctcccttctctgagcatttcttcggggcaattggccgattttgtgcccgtggaccaaaggccgtgcagcagttcgaccatttttcagtgcgacgatgaaaaaacttttgggccggcacttcctcccgaattcgtttctatagcgtcgcaacaatttgatggttggtgaataattaaaaagcaacgtttatcaatctattattttctaacacttttcattgtttgttttgttcagaatacgatattggaacgtcgcttccaccggatgagccgcagtgttcaatggacttggcaaagaaagtgccggaagggactaacattcatcgcaaaccaaaatcgattctcgaacggacgaacttcggcccgactttgccgagcagtagcgacgaggaagaggaagagaaaaaggaggacaaaacggaagacggaggaaacgaacattttgggaagggcgaagggactgatgagaggcgacacgacgtggggtgggaagagggggaggaagaaacggttgggccaatgccaccgatgcccgggaagacggaggaggagggacacgccgaatatctgggcagactgacagaatttgaattcaacaaacacactcaggtcatttgaggtcccaaaagaagggacaaaagcaattatgactaattaaaatggtaacggaagactgcgttattttgcattgtttaagtcaaaggaattacggcgttgaggaatggatgacggagttgccacaaaaaatgctcaaaactggtgcatttgggcttactgcgaagacttcgttttctcgaaggagttccgacctttcactgcagaagtccgacctttggacgaatgtgccaaatggaaactcagcgacgactaagccgaaaaaggaggtgaccccgttgtttggctctatttgtctgaccaacgacttacagaaactcggcgaagttgggtcttcgaccaaaacggcagaaaacgaacggttggaacagcaaaaagtcgacgaattaaacgtaatgaaattccattttgtttaattaacaattccatccatcgtttagaaggaaagaggcgaatcgctactcgaacggcaccaaaagaaacgcaaaattgacaacgcccagtcgtcatctacgagtgtaagacaaaataagtcggaattttcagtttcttttgtccttttagctaattgtcactgagggcggagaacgaaaacctttcgacagagacagagaaattgaggcattttaagggaaaatgcgagagggtaatttccgttttcagagccgttgtttccgtgggaagggtggcgccgggggaagcggagaaatgaaggaacggatgggcggcgaattgtcgagtcgttttgggcacgcgaatgaccgtaaatttctttgagtgttggacctccaaaacgctccacctcactttcttccgctccccacctcaatgtcactccattcctattagtattttattttttaaatgtttctatttgttacaaatggctgatttccccctcgttctctcgtattaaaaaaaaaattaaaaagtgaactcttttcgtgttctttctttttttagaagttttttcctgattttttaaacctggtgtttattgtncacttaaaatcaagtaaatgcacaaacgaaaaaattataanaatttggattatttcatcnaagtccccattttttggccgcactcatttaaattttatttattcgcaaagaaaataaccgcccgaag

SEQ ID NO: 12700 - DNA, 2520 bp, Heterodera glycines
gccccaagagccccccgggtccaaaaatttttaaggaaaaataatattttggctgaaaattttaggttttccttgctgggctggtaccccccaccccacagacctggcctcgcccaaattttccaagaaatgtcgctaaatttttcaaaaaatccacaaatttttaatgaaaatctgctaaaaatagctcaaaatcacaaaatttggtcattttttggacaaaatctgttaacaaaccgcatttaaaaccgcaaaaattttcccggcggcgcctatcggcaccaccggaccccctgtaccccaaaatttttttgcaaaaacccgccacataaaaaacgggtgtgaaaagcaaaaaaaaaaaaaaaaggtcgtcgcccggggggaggtgcccccccccaagccaaaatcctgggaccgtccctgcggagctcctttttcaatgtattttttatggaaaaattccgctttcagtgcgccgtatgcaaaaccatgggcaataatagcaaaggcacattttgatattaccactatttcgactgtattgtaagaagcaccttactgataatgaggctaaattagcatggaaaatgggtacatttttaatttgaagcaataaaaagtgatcgggcttatttatcagtcagtctgccctttgacactctaaggcaaatgagtgagtgggggggagtgatttcgtcttttgtctgttcgttcgtcttatgtgtcgtccatgcgggcgcttccccctcacattggctttatccacggtgaattggcacgtttcgagtgccaaatgccgaacttcgcccgcccaattcctccgccggccgcaaaagattttctgtcaatttgtttgaacggctgataattgcccttcataacaaacctccgccagcgaaagcgccacccgaccgatactcgcgcgaggcggctgaagccgttcggcggaagtgcgacgattcgcggcgttcttcgcctgacgacgcattggcgccgaccgcgccgctcaaacgcgactcggtgcgcagcataggcgaggccggtggaagaacattagcggccgatccgctgcgacggaactgaacggacgaaagggttgggcggggggggggggcgtcgcttttccatttggcccacctcctcgcggaattcctcccgtctcgcttcgtgtcgcattccgttcgcgtccgtctacaattgccaaagtcaaatcccttcccccggcacattggctgacctcgcgtttctcgaattccgttcgatatccgtccgatcgcgggtttggcgaaaggtaaccaccgccgccgttcgccgctccgttcagacggctctcagccctgtaataatcgttggccgaccctcggcctgagtcggcgtagtagcgatcgcgcggcgagtatgagctcgagcgcgacccgtagcccccgccctgacgacgcgagccgctctcaattggaatggaacgttcgccttccacggcctgccaacgcttttgggcctcgacgctcagacggccctttgggaatggctaattgggcggtggggcggcaaactcacagaactgtcgatgtgactgctgatcgagtgggactccacatcggccggcaattggtatttgcggacgaaatactgaaaagagtgctctttttttctctctcatcatccctttcccgtctctctctctcaaccctctcttctctctctctttgtgccgtcactttcccttccaataaataccattttggtgtaattgtctctgtctcgaacatcttcgtgccgtccctcaatcagcaaagtgtcgtccatcgttttcacctgaagttcctccgggcggaattggtaagtgtccatttcgactgcgaaacggttactgtcgttggtgatgttagtctgagagagaagaaaatggaggagtgagtcaatgaatcggcactttgtttactttgacgtcgatgccatctttaaagatgggctcggcccaacgcgggtacaaatcgcgccaaaaggggtcgtcacgccaattacggtcgaaacggtccaaatgtgaagaaaactgacaaagggacgagcgaatagggagagggaggggagcaatggacaagggatgggggggaagagatttgcaaggggaggagcaatccccccaggcgctgctaataccctcgttgcctccctcttctccccaattgcgcgtccccttccgtgcctcttcctcaaatggttttctcctcgtcctccacccttcggcattcactgcttcggtccctctcaggtgcggaaatgccctgtagaattcgtccgagaagaacttcccccgctcttcctccgcttcccatccgcttctcctccattcccttttttctcgctgttctttttccgtcttcgtccaaatttccgcttgtccgttttcccatctttcagcggggaactcttctaccaaagggtctttccacctcggactcggccgatttggtgcggaaaaagaggcggagggaattctcgaagaaactgatggctcgg

SEQ ID NO: 12701 - DNA, 4775 bp, Heterodera glycines
  unsure (1)..(4775): unsure at all n locations
tttattattatatatgcattaccanttgcaaaaaacatacctctgttcaatgctttataacttcttttatacttaagttaaaaatttaggaaaattatattctgaaagagaacaattaaagctattgaatgataccacgaaatattaatttggttgaatttgagccaagctattaatttaattattttacccattttttgttttcaaacccattggcagttttaacaaacgcgcatgggtggcagttttaacaaacgcgcatgggtggcagtttttaacaaacgcgctagcaccaaaaaaattcatcgcaaaatatttgctttatgaataatttttatactataataaataaaattaaatgtaatatgaattttttataacttttttgtttcaaataatgttttttacaattaattgactgtttcaaaagcgttatgaatgattacagaaatattttcatacatttgcataatttctcttattcatttatttacttgtgtttttacgttgctattttgagtgaatgtttttaaataaataaaaaagtttaacatttattttattatatattaacgccatccttttaaaaattggggtcttttcattcattttattatttaggtatcaataaattgtatgatttatttaaacttatatttattttattttcacgatgagatgcgtagatgatttgtcatctgtcgtggtaagcgttttcttattactaaatgcatttttaatttctctcttccctaataattatttgcaaatataaatttacttttatttaatgtttttgttacaattttatttagtcattagcgaaaattaaatttaaaattcgttcaattttgttttctatatattcaacaattgctaaaaattaaagaatattattaaaagaattgaattttttgaaacataaaatatttttttgatttcaaatcgatttgcaaaataattttttctcgttttttttcatttattttaagagtatttaattttttaaattattacaataatattttgctctattatttaaattataaatgaactttttgttatgttatattttgtttactgagatcttttattaggtttattatcttatttttataaaagtaattcattttttgttgaatttgttggtgttgttgaactgctagcaaactctgcgatgccctggctgatatttgccgcctttgcgttatttttgtgctttttccgttgatatgtgtcgaataattgcgttttttcctgctgctccgagtgagatgtccacattgcatgaaatacaatgaaattcgtcagcatttttggcacgtttaataacgaagatttatttaaattatttgctggtttattcctccattttcttttccctccctattcttgccacttttcacttaattatggtggaaaagtgtatgcttaatggaggaaaattgtttgttcgagaaaccttcggtgtccggccattttcccctggctgtgcttccatcctctgtctcgaagacagtttaatttcatttttaaatgttttttccttgtaatattcatttttgaccgtaaaatcgttgctttctctcccagtctgtttgacctgtgccgccggtcggaatggcttcggatgtgagcagagttgccccaaggcattttggggcgtcggctgttcagaaaagtgcctttgtgatgcgaatggtggcttttgtaaccccaacgatggcacatgcggtaggtaaaactgccgattcgattgcctaaaattccgtgtctgacagagtgtgcgctcggattcaccggcaaaaattgtgaccaaagtgaataaatttttaatacacaaattgcataaacaatgtattttttactaataatgtcaattttaaatttcccacttaataatgcgtcgttttgttttctttttcagaatgtcctttgggcacttggggtttcaattgttcccaaaattgtcgcctttgtttgaacggtagtttgaatttccaaattttgctattctttcattttcggtacctttttttcagtgacggccaatgcaaatgtccgcctggctttgaaggcgatttgtgccagcgtcgctgttcggaatggacgtggggcgtttcgtgcatgaacaattgcacgtgcagcagcggccgaaagatttgcgacgcgtcgacgggactttgtgaatgcgcgtcgggtaaaaaagcaaaattttatcatttgggggggggggggggagggagccgagccagttttttacgaaccgatttataaacgtagtttgggttcaatttaggactgaaaggcgacaaatgcgacgagtattgcgatgacggattttgggggcctgactgtgtgaagaaatgctcttgtcgagaagggacttctgcttgccaatcagtcacagggcaatggtaaggacagaaggcagtgaatgctttacaatttgagcaatttcagtgtttgcaacaccggatatttggggaaacgctgcgagagaagtattttcaattttcaatgctttcgagtacaaagcgaaacgcgccttttgttcagcatgtcctgctgggacctttggcaaggagtgcaaacaaacatgttcaaagtgttccgagggtcaaatctgtgacccggcggtcggctgctgctctctcaactcgggactttgcggcattgcctgtacattttgatttattattccatttggcaaatgactgttcaaataacactttttcagatgctgaacagcaaggcgtccaacgctcctccgtctccgcttatcttttgccgggccttttgcttttactggttacttccgtcactttgatcgcttttgcgctttattatcgccacaaataccaaagggcgcgcgaccctccgcttccgactgttaggtaaaaatcagtccaaaaaataaagtggaaatgtgaaaatccgacagttacaatggcggagattacgcatcggtgaacgatgccaacacaaataaagacggaaatggccacacagaaccgaaaaaccaattcgaaaatcgactctttgatgagcccgactttgaagataatttggcaattaatcctcacaaagaaaaggcactgttcagaaatgtgccgacgcgaacagaaagtgatttccaagccaaaaagggattaaatcggatttgattgatcctcacaatcagatgaatttaatataattaattttatatttataaaattctgttcattgtaaatatattgtatgtttgttgtttgatagataaattttactttatattttaagtaataaaattataaatagaataatttcaaatataatttgtgcattatcattttttagaaatgtactaaaattataaaattttatttttatttttcttgatatctacgaaatattcagttccatcctgcatagactaataatatattaatttcttagctaattagttactgcttgattatatattttatttcgtatataattgagtaaatattgttttcattagcctaagaaaaaaagttaaatttgatttaaatttcattgagaatcatttctggtttatttaatttaatgtagaaacataaaaacttatttaaagaagtgaatattttttaaatatttatttataattattttttcattttaaattgtttgccttttaaaatcgtattttgcgaaaacttgcattgagacatttagttagaaattttcttttttttataatatttgattacatattgaaatcaagtatgaattagcaaagttttttttggttattacaaatttaaattttatttatttttgactgtaattcggcatatagtattattttttataattttatatttttatttttgttaatataatagttgcatgatttttttcttacccccgaggggtcggggagcataaataaaaatttcttttatatttattttatgttatcacaattttgtatgctatttcgcagtttttcatgcccaaaatcgcggctttaaatattataaatttatttttattttataagtgaataattatataaatgattaattagctttttctttctttaattagtaatcaataaaaatttaaagaaaataatgtttgtatactttatttattaaatttattttattataatttttatttgtaactataaataacaatttaaaataactaaaataatatttattgtttttgaaataaattttaaatttctctttgaattttaatacttttcaatagttttaaaaaatatttgtattttcaaaaatgtgttcgttaataaattaaataatttttgctatttacatctttgtaccattaccaattattttttattttacatttcacttcatttcctctttttttacattcatataaataaattaatttttaataaattaataaataattaatatagcgttaaaatcatacgaaaataatttcagtagaattttttatgtgaatatttgtgtattttcaccgttaaatttaaatttttgttttaattatttgaattaggtcttggctatattttcatttagcaacaagcgtaaaggaaatatattacatgtaataatacacaataatttagtttttttcaattgttctcgttattgaaaatgagtatgatgcctccatggtaagattaaataatgtaaaatttctttttagtttttttcattatttatttctatttatgtattttttaaatattatatattttctatagtttgttcatttaatttttacaatttttataaatccat

SEQ ID NO: 12702 - DNA, 4583 bp, Heterodera glycines
cgcgacgctctattcaaattagtaatgctaacagtcccacctgaattcgtcccatcactgtcttgttccaacatatcaactctttcggttaaggtctcgaattggactttcagagtctcaaagttggcatttgtattggccacgacatctttcacccaattgactttttggttcaaggaacgattcaggcagcgaaaagctctgttcactccatcttctaatttccccatatcattttgagctttttctaaatcagagatttttatcgtggtctttccttgccaaagtttcctatcaatagccgaaatcgaggactcatcatcctttccactcaaaaacatctttgtttcctgcccgaaggcttgggatgtaccaaaggggaactcatttgacgagccccctgatgtagacattcgaagtcgttcagttgtaataagattttgttttattttgctaaaaaaaattatttggtaatcccattatgcattaattgagagaaaaaaaataatgaatgacagcgggtaatcgaatgaatgcgagtgccttccaggaatgactttatctgctccatctccgcttaaactccgcctaacgagagcaattaacaattctcaagcgccgcaaaaatgtgtaaagtgaatgatctcgcccaatgaaaaaaaaaacggcggcacgtgattacgtgaatatttttatggcgtaaaaaaaaaggaattgataaagtgaactttggaactctaaaactgtagctcatacggtaaacaaaatgatagggcctaattctcatgttttagttggtccctctttttagttagctaaaatagcgcccctttgattggttatcagcccgggcctttttactctcctcaaaaaaaaaattgttctatatttttttgtctcacttcttctctctctctctcttttttttttgcttcacattcgttcaaatatttttataaattagtccttattcgtttgttaccaggacttttttttggttatttttggcttccttcactctcttttcttattctctctctcttacaaataattgttagatttgtcaattttcggtgcagtcagcccctttagcatttagactagcccgggcaaatttcattcttctttttttttgcgtttttaaaatccctttagcttttcgctagcccggacaaatgttctcacctcttttctcttcgtctttaatgtccctttagttttcgactagcccggacagattttctcacctcttctctttttaatgtccctttagtcttcgactagcccggacagaaatttaaaatgtcagacttctttacttgcgtgtacacgtctttgtttcaggccctcaggccagggagatctcccacaaacttctgccggcttacccaattctcagcttcgtcgtcaatgatgggtcgtcgtttcccaaaatgggaaccatccggtgctaccagtgagggatgcgcactgtgcccccagaccaactatgcaccgtttatcccggatggagtttgggagggaatggggaaaagccaaggcgcctttgaccaagccccgaacccccaaacgactcattgactgttaaagatgtatttattcattcgatgttggatttaaacgaagcgagaaatcggaataataattgaagtctgttccatcacaactgacttgactgatcactggggaaagagaaatgtgaagagaatgggcggagaaacattacaatgtgaaaaggaaaaacgtgtgaaaaggataaatgtgattgaattgataatggccaatgggaaataattaaatgagggaaatgcgtcgaataatccttacactttttcaaaatatcgcattttcttgatgattagtcaattttttttttgattaatatggaatttggactaaataataaaaaatgtaaggccaaatcaattggacggaataaatcattggacaatgagatgagaaaatgtgataaatgcagcaaaagcaaaataaatgaatgcataaataaatgaataaattaacaaatgacagacaaaaaaaacttttaaatgacaaaatgaattaatgaaagcgaccgaattagagcggacggacaaacaaacaaatcgacggtgtcttaaaaaaatgcatttccatcaccaaaaatttaaatttaatttattatttttgccaacccaacggttgcccattctttgttaaaatgatccgtcctgctaagagagaagtagagagagagagagagagaggagataaaggagaagagaaatgatattggaaagaaaataaagaggaaagaagagagagaaaagaagagagagagagagagaggaaaggcgagagagaaaagaagagagcgagagaggaaaggagaggatagaataaaaaaggataaactacgagagagagaggagagaagagaggaaacgataaaataagagagaagagaagagaggaaacgatagagagagagattgaggagaggagagattagaggagagattagaggatagagagcgaggagggagagagaaaagatgaggagaggagagatgagaggaaacgacagagagagagagagagtgaggagagaatagaggaaaggataaagagtgagagaggagaggagagaataaaaaaacggttaaactgagagagcaagagagagaaagagaggtgagatacagagaaacgagaggaaagaagagagagtgaggagaggcgagagtgaggaattaaaagaaatgtaaagtgagagagcaatagagagagagagagagagagagagattgaggagaggagagattagaggagagagagagagagagagtggggagagaatagaggaaaggataaagagtgagagaggagaggagagaataaaaaaacggttaaactgagagagcaagagagagaaagagaggtgagatacagagaaacgagaggaaagaagagagagtgaggagaggcgagagtgaggaattaaaagaaatgtaaagtgagagagcaatagagagagagagagagagagattgaggagaggagagattagaggagagagagagagagagagagtggggagagaatagaggaaaggataaagagtgagagaggagaggagagaagaaagtaaaggagagcgagagatagaggaaaggagagaatagaagaaaggataaagagtaagagagttaatgtgaagaggacaggataaagagagagagagagaaagaggaggagagcggatggccaaccgctcgttcatatctatcggttataatagatttaaatgggccgccaaaacacagccgtcgaaacacagatgaccgaaacacagccggcagaaacacagccgctatatatttataccgaataaaaatagttccctaatacagtacacattgacatacagtaagcctgttacctctttatgaggtggagttaaagcgattagaaggcttaaaactttaaataaatcaaagtctgttgtcgaagattttgagtaaattttttttaattgtttaatttttctgaatttatacaattttaaaatatgaaatttataggcataaaactaaaaacaacaaattgatcattgatcagctttgtaaatatgtcttcctcatcagagagttgtcaaatcaaatttgaaatttggcccaaagtctgcctcacttttctcatcaaaattgcaccaactaacgaatggatgcaaagaatcatcagcaaaacgtggagcaacaaaaagtcattaaatgaatctatgtggaaataaaagggattttcgaaaattgaaacataaaaatcccttaaataaaataggcaattaataaattacattttaaaattcatttaattgtttatttaccaacccaaacgaagatcattttttgtgaaatgatctgcgagtggcgaattgacgccaattcctacggtatcaccaacaccgttagaatgttcggcatttattccctttctttgtttattaatcaaaatttcgccatcattttcatatgcataagtgccaatattttcaattatccaatccaattttatatgctgtttgaaggcgaatccgaagaagacccaactgaaaaattaataataaaggattaagtattaataattataataataatttaattttctgataatttggtctcaaaaataaagtttcttacccttttttattttttaccgaaatttcatagtaaaaaatgttggacgaattattatccagcaaaatcggatgttttgcaaagacggaagaccaatcttttgaggaaaaaaaatgattaataacaaattgttcgaaaataccataatcctttcccttgtgatggacagtccaacttttgtcgtcaatgatttcgagattcttatgacaaacattggcatcccaataattttgtcggaaaaaaaatcctttaatcattttgcacttttcagaattgttccgaagttgctgaaattaatttttaaaattaaaaatggaaaatttaattaaattaaaaatattcataactcatgtaattaatttcttctacaaaaataatttaaaagaaataatttattcttcgcttaaa

SEQ ID NO: 12703 - DNA, 1235 bp, Heterodera glycines
tgccgataggcgccgtcggtggtaaaatagaaaatttaagtgcaatttgttaacattgttaacagattttatccctaaattaacaaattttgcaattttaatcggtctaaaaagtcaaaaaacgatgaaaatgcaaattataggtgcacatgcatttttcgcataattctgaacgttttctcaattgatgccgataatttttaaatggttttagtttgggaaatagaagaaatatttactccatttttaagaaaaataggggttttggtggaaaatttttgaaagtttgtgggatttaattaattttgcacaaaataactttatttcgagcgagtttttaaataaatttaatggggttatccttgaaaagctactttttatttgcttttcacacaatattggtagttgactttgttcaaaaaagtttcaggataggggagggggccggcggtgccgataggcgccgccggggaaatttagaaaattttgctctgtttcttaacaaactttgcccaaaaaaatttcaaaaaattgtaattttgaaagttttttaagacattttgggcatttacactcaagaaaataaaaatgtatgtttttaaaaatcgaattaattcaaatattcgcttcaaaaaatgataattcaaaaagtctttcaaattttacaagaggaaaaaataacagtgaaataaatcattaagcacaaaaaaatctaaaagttaggggaagcctgaaaataagaaaaatcttagaaacaagaacattttcagtttctaagacctggcccctccaaataaggacaaatcttagaaataaggacacttgcgaactctgtatataagagattcacaaaaataccttgatgaatctttcgcaaaagtgccgaagatttgtaaatgtgccaataaacctttataagcaaaaaatgtaagtctaaagtttttattcactaatcgacagataaattttggtcaaaattttcctgaaatgttaatttaaaacttttcactttgattgttatcgcaaattaattgccataattataagaaacgaacaaaaaaaaagtgaattttgtaattggaaagggataaattcgtttctattatagtaacaaaatgtttcaaaataaactggaatgaaggtgggcaagaaatacaacagagccaacgcctaattaggcaaagcgcgggaaatgggcaaaagtgaggggccgagcagagacagtagtcgattac

SEQ ID NO: 12704 - DNA, 2281 bp, Heterodera glycines
tctcgctctcaattctcgagctgaaattgctcggcttttgaagaaaattaaattgacatgaaatcttaaaaaatataaaagcactctctaaaaaaattttgctggccacaattttcatttggaactttattatacgattatttaattgatagataaaacgtgtccccagacaaacaatttttcttttatgtttttgatcttaacattttctgttgcgtattttattatttaatataaatattattttattacaatttagaaatgtattctttttatacaaaaaaaattattaattaatcatactgaaattttataatttaaaataaatttaaattttataatttaattagaaacatatgataaaaaggtattttaaggttttaagataaccccaaaaatactcttcattattttcatttttgttaattttttttttatttgaggcgccaaagattactctaaaatttctttgtaattttccattgatttattatgctagagaattttaatattatagctttctattaatttatgctattgcgaaatttataaatttttagtcttttcttggtcttataatttttacggcattgtttatacataaaaaaccataacaacttactaatatcattatattggttcacggatttttaatctgattgtggaattgggaattttacaaaaaaaaagaaaaaacaaatttcaaatctgatgccaattaaaggctgaccgagattctcgaaatctctggattaattctcgctctcgattctcgagccgaaaatggctcggatttactttctcgttagcatgttcggaaaattttaactctcaagcagccttattaaatttagtaaattttctaaaattaaaatttgttttgtaagtttatttcttatttaagcgattcaaatgatgcctatgtttttctttttcgtcttcatttttaattgtttctttaacaacaatggcacttttggtggggtttgcgtttcaaaatacgacccaatgataagtgagcaaatgccatcgaaaaaatatcagtcgaccaattccatgccaagaatggataacaattctcacatcaacattaatggtatttgtatattttaaaattaaatccaattattgcaaaggcttaaaatagcaaatttggaattcacgagattctcgaaatagaaatgagtgagctttggccatgatgtgtttgaccattaaacccggaatattgaaaatttagtttttaattattcaaaattcaatataattcaaatggcaaattttaaaaataattttcaaattaaaattatttaattttcttatttgaaataaaaattcagtttcattttcagatgcagttaattacgctaaaaaaaccaacacaccgggatatcaatcaccatattatacaccgacgcgaagccctattaaggttttctctcttaaaatatttgaataaataaataaataaataatttttgttaaaaaaatatttttagaatggttttccattcaatcacagagaagatttgggacaggtaaaagctaaaattacataataaaaaataatagaagatttttaattaagcagctgacaaatgattcgcttttttgaagttttaaaataaaaataaatgttttagttttttgattttatgaataattacaaaaatattttctaattgataagtgattttacatcgaacacccaaacaccaaaaatttctgaaaatgctcgtgaaaaacttttaaatattgtatttaattattcaaaatacaaatttaattttagcgtgactcattcacaccaaatgacaaagaaaaagtaaaagaggtaatttaaaaaaaatcataaaatatttctgcttcgttgggtcgtttaaacttgaatatttatttgctattatatgtacaataatcggtctacgtcagttgggcgccagcatgtttttggactataacttttttctttatcaaccaaatccaacattattggtatcattcgaaagcccttcagatgctctattagtctgcaaatttccaaaaaatttcgtcaattttgaacaaatttatggccataaaagttggaaaatctggttttttgagttgttctggccataatttttttgaaacttaacgaaatttttcaaaattttgcaggctaatagaagacacttagggctttcgaatgttaccaacaatgttgaatttggttgacaaagaaaaaagttatagctgaaaaggtgctggcgcccaaacgtgtcggcgcccaaactgacgg

SEQ ID NO: 12705 - DNA, 1459 bp, Heterodera glycines
  unsure (1)..(1459): unsure at all n locations
acaaaaaatgttgctgtttgccggtaaanaatggggaaatggataaatttgtgaaaaatataattgaattaatatttttttaaatctctcccatataattttgaattgtcaactcccaaatagtgaacattttttaattattttaaatgtaaatgaagtttcatttggattataaaatgtataaaattaaaaggattaaaaaaaatactcccatattttacattaaccaaactcccaaatntagaaaattaaaaaaaaaaattttcatttcccatntaaaaaagcctaaaaaagcattaggtttacagttggtacaaatttttaaaaagataaaatttcgatttttttttccacggcgacgacgactgtcgacagaaggcctgggctgggctaagctcggctttgcactcgaaatcaaagctcaaaagataaacttaatttttgaaagtcgaagttcgaaagctcaaaatatgaaattttaaagtttgatgctctgggttatcaaaacatttttccataaaattaagcgcttcgtaaaatagggagcaatttctcgaggattattcatgatgttttttttttgaaattataaaaaaatttaccaattcattggcaatgtgtaatttatgggagttcgcaacaaataaattttacaaaatttgaattatttagcaggcaaaaaaagctcttaacgccaacaatgctaatgagatgagcttaagccattcgggcaagtttaacagtgaacagccagaagagtcgagacaagaatcagaagaggaagaagaagaaacatcttcatctttggacgccaaaaaggtgagcaaaatttgccaaaaaataagcccaaattaagccatttgaaaaataatattcgaatttttcgaaataaaattattaaaaagggaaagttcgaaattgaaaaaatcaaggttttgaatttcaatcatgctgatcaaaatggacagtataaagagaagaacactgtgctggacagaacgaaagaagtgacaaatttacactacaaattacaaattcaatttattcgatataatgaaaaggtgtcatggcaactcgtaaactgttatacaacgataactcttacaattgcttaggtaggcctaggctttaagcttaggcttaagctttaggctaggcataggcttgcttgggcttagacttaggctttattttgtaaaatacgagttgccttttgtacgagtttattgttataaattaatattttttttatcattttaggattgcttaaccctcgactccccagctgtttttgagaagatatttgttgatgaaagaatgacggatgttagaaagaaatgattaaatttgtgatgaagatagaattggagttttttaagtgtcgatatggaaacaaatttactacgatccctctatagaaggttttttatggatttaagtatttttttaaaaattttat

SEQ ID NO: 12706 - DNA, 3706 bp, Heterodera glycines
  unsure (1)..(3706): unsure at all n locations
tttccatattacccngtggtgttttaaattttaataacatatatgattttcaggcacaaacctacatcggtgaccaacattctcagaccgttggtcgacgagtacatcagcctgttcaacgaaacgtttgatgcggaaaagaacgcaaaatttctcgacaatctgaacgtaaggcagcaaaaaaatatatttttttaaattttaaattcgcagcaaaaatctaaaaaaaactttttcgatgtctaactaatttttttttgtctagaactgctttaacatgcaccgttttgccgaccttgtccagctgattgtcaagtccagcactcgcgcacttaacaaatttgccaccaacgacgctgacgaaacgcggcggcatcgacgcgaccattggacgcggttgttgcagcgaacgcgccggcttgccaagtgcttccggcacagtggcgacgacgcggcctggcgccgtcggctgctgtttgtgcatgtcaaaggcgtgctgacggaggcggccgaacgtggcgattggttgctggtggacgaaatcaatttggcacccgtcgaatgcatggacgcactcatcgaggtttaatcagattttggtgataagtacggtgcgtgcagctcgcgcctccttcgatttgttttggaatttatctaaatttcagattcttacgattagaggtttctctagttaaaataaaactaaaaaattcgattttttaaatttacaacaagttttttaattggttttctttgcaaattgtaatagtaaaaaaaaaaatctattccctcaaaaaacagaattaaaatttctcattaaaaaaattaagagtaaaaaaaaaattcttatccccaaaaacagactttaaattttcatttttaaaatttttttcggcgtggcgatgaaaagctgctccttggtatttcaagagggataattatgccccatcattgtcaagctgttcgacccatcctctgacttcattgtccatgccgactttcgtctgttcgcctgtatgaacagtgccaacgatgtgggcaagcgtctgttgccgttgggcattcgttcggcattcactgaattttttgttgccgaaacgagcgccgctgaccaactgcggttgatcatccgtggccaaatttctacaatgggcgaacaattggtggaatccgttctccaattttacaccgatgttcgggcacaattccctggcaaattcaagtgggttgaattttatgtataattttttcgcaaatttttaaatatatattttttgtcatggatgacgccaaccctccaaataatttagggcatccaataagaattccgctatcttaactttattggtattacaccactttactaccacgccaaacttaccgggttcaaaattcgagtccgattgtccaccgtaccaagctgtagccagaaaaaaaaattcggatggttgaatccaaagattactaatttttgccattttaggatcaatttaaaaaaacgaaaattctttgacgacttgacttattgcctgactaaaatttttttgtaagttgtatttttttttagtttacgcacattgagccgcgcactggcggttgcgaatgatcagctacagcaacgtcactacggcactgctcgacattgtctttgccgtgcatgttcagttgcatttgtctctcaattggacattgaacaacgcaaccgaatgcaattggtggtgaccaaatggcttggcgctgtgccgtccactgcgcgcaatggcaaactgagcgaggacgatgcgcgaaaatttgtgtaagcaatttgttgagttcgattcaagaaaaaccttgacatggatttcctgggcataaatccaggcctgggttcaggtcctggtcgaactctagcattttggtacaaaaccagttccatttcatttttttaaattgtcatgcatatatattcccttttttacataattttttttgaaaaattgccaattctattatttttttagtttaatcgaaggccacaaaattcctcgtggccccctgcctgtgctcacaaatgatgacaatgaacagcaacaaaaacaacaatacattttcacgcagtctgtccgtgccaacatggctcttttggccagcgtggtggccaccgggcattttcccgtgctgatggagggcgaaacatcggctggcaaaacatccatggtgatgcagttggccaaaatgagtggcaaccagtgctttcgaatcaacaaccatgagcacactgatgtccaggttttgattttttgatcttatctctcacctcaaagaaagtaactcgacaattaaaaaataactggaccaacaccctaacaaagagtactaaaaaatcgccggaaatttagaaaaaaaatttacaataaatttcaaatatcaaaaaaaaaccttcgggaaggaaatgatatcggggggggggggagagaagaagcttctcctattatagttaagcataaaataaggcattttatgtcagtatctgctatactcttaaacaaatacatattttaggaatacattggcagttatgcgccagatgcgtctggtcgtctcgaatttgtggaaggcgttctgttgcgtgcggtccgcaacggtgattggattatcctggacgagttgaacttggcgccaagcgcagtgcttgaagcactcaaccgggtaatgctttcggggtgcacactttaaaaccttgaaaattattaaaaaaaaattgggcgattttttggaaatcctttgaaaacttagaaatcatcataaagttgagaaaatcgctgaattttcttctggttgcataaaaacaattattaagttgcttgacgacaaccgcgagctgtttgtgtccgagttgaacattactgtgcgagcccatccccggtttcgtctgttcgccacccaaaacccggtcggcacgtacgcgggccgtaagcgtctgtcgcgcgccttcctctcccgcttcatgtgcctgcaatgggacgcgttgccacacgccgagttgcccaacattgtgcagcgacggtgcggcgtgtcgccccgtatggccgaactgatggccgccgtgcttgccgagctgaaagtgcggcgtgcaattggtggcatttttgcttcgtcggacggtttaatgactctgaggtatgtattagggacaacagaaatagaatttttttttttttggtaatatagttatagtttttgtattttccacatttagaaaaaatttcctatataaaaattatctattttttttactcataaccaagatttttacgtattaattaaattgggttttagtcatttttgcgattagtgactcttaaaaacctcgagaatatgtttagatgatcattgtaagcaaaaaaaatttgctaaaaggggcgatgtagaaataagatgttagctaagttttaaataaatatttttctcttacggcgattgggccaaagctaatttaaattccctcaaaatttgctaaaatttaatagtttaaaaaaataattgacttacaatcagagaagcaactcggggactgagaattgcactcgtaataggcaacttaccattgcagggatctgttccgttggggccatcgcatgtcgtcggcactggaggatggccatgcaacggcctgattggcgtcaagcgctcgctgaccaaggctattttgtgctgggcactcgct

SEQ ID NO: 12707 - DNA, 2172 bp, Heterodera glycines
gtttcaaccatctgtaagggtaatttgtttattttatttcattttttataaacgaattaataatttaatgtatggactttaattttcgtcaaaatttaattttcttacataatcttaggtttttttttatcaaattccgctttcattttacaattttttaaaatatattttttcagattttcattttccacgcgtgatttggtcactttgtccgaactgcttgcaaagttttacttcaccgttggcattccattgccaatggctttgttccatgcaattgaggcaaatgtgtttgatgcggtgggtgtgctgccatcgcggctgtcatttgaccgacgtgccgtgattgatgcttgcattaaacaggtatacatgaagtccaacggtgtatggattttacactaaattcctttttgtcggcgaatttctttcggttttaaattgcaaaaaattaaattgaattccaaacactcacaaaaaaatattttgcttttttctgtgcaattaaaaattccagtttcattcattgatctccgagttggcattggacacagatgatggtcaagtaccgttcaacattgacattggcagtgagcagcaacttgaaatggacgcacacgcacttcgcattggccctttcagcattgaaagtaaaaatagtgggtagttagttatttggttttgtttttaactgctactattgtattgtaccaagaaactgatatttaccaagattttacgggagagggggggggggggggaaggtgccaatttttgaacatgtaataatcgattaaaagatattaatttaaaaaaaatcagattttgttgatgtccatcgactccccgtcggcttttctctgaacgcgcccgccactcgtcgtaatgcgttgcgtgtggcgcgtgcgcttgcctcaaccaaaccggtcatgttggaaggcagccccggggcgggcaagtcaagtctgattgttgcgctggctgccgccactgggcacaagttggttcggctgaatttgtcggaacaaacggtacgattttttttaattcaaattcttttttctaccttatgctcaaagtcaaaatttctaaaaaaaaatttttttggtatttctatcgtttaaatttttaaaatatcattgaaagatcttttttaattactgttatgatttattgtatttacctattttcattgatcaggatttgcatgatttgtttggcggtgatatgccggtgacgggtccggatggttcagcatcgttcacttggcgtgatggtccagtgcttaaggcgatcaaggaaggctgtgggatactgcttgatgaggttggggaggggaaatgtttcacttcactcttccctctgaaatttttttggaaaagaaatttttcaaaatatttcgttaggaaaaagttttataagaaatttcaagaaattaattttgaaaaaattttacgtgattttttggaaaaagttcgtaattcatcacaaaaaaaaatggaaaaacgctagaaaaatctttcaaaaacttttttttagaaatttttattttttccctcttgtttaagatgaatttggcatcccaatcggtgcttgaggggctcaactcgtgctttgatgtccgcaaacaaatttacattgctgaacttgaccgcacattcacgctggactgttcccgctgcaaattttttgcttgtcaaaatccacaccaacagggcggtgaccggcgagcgttgccaaaatcgtttctgaaccgattcatttcggtagcatttttttttttttggctttttggtcaaacaatcttcggttaattcatatttgtccaccctttttatttaaaaatcgatgtaaaaaagaaaaatttcccaaggaaaatccaccaccattgtttgaacggcagatgggcatgccaatgaaaaaattcagttcaaaattctgtcattttgtttattgatgggtggagagcagctcgtccttctccccccaaaaaatagaattttttttgtcattttataggttaaaaaattaatttttctagcctttttttcaaaaacaaaaacgttcttctttgtgtctgattctgtatatgttcgttttcacagatttttgttgaagagatgccccctatgaagacttcatctacattttatgtgaattctgcaaagccag

SEQ ID NO: 12708 - DNA, 2183 bp, Heterodera glycines
  unsure (1)..(2183): unsure at all n locations
cctatcagaaagtggacaaaattctctaccgaattgcctttcgcatgactggtctacgacctatactcgcagggcaccatagagtgtcaaaattgactaccataaaaatgatggcgctatatgaaaagttggtgtttttgaaaattttttcaaaagggtggacccttttgttttgcaaaatttttttgtgatagtcataaaaatttattctctggggtttttggggtccccggtcacgaatctttcaattattttgatcaattacgatttcctaatctaaatttgaacaaaaaatcataatttgaaaaattcaaaatttcgatttttattcgagttcgggttagggattagaaattagtcaaaatacatgtcagattcgtgattagcgacctttaaaaccccggataacaaattatcatggttttttatcacaaaaaattttgcaaaacaaaagggtccctcctccatttcagcaactgatccgaactatggaacgcttaagaatttggacgccgacatcctcacgaagaacgcgccagcaaaaccggcagcggcaccaaaggcgggaccggcgccacatggaggaggcggacaggcactgacaccaagtgaaaaaaatggcgaacattttcaaattttaattcctttttcatccccttttcagcgaccgatccgaactacgggacgcttcagaacttggacgcggaaatttttgtgaagaaatagtgccatcgacagcgaacaccccggcaaggcgtatagttttagaaaaaatcttatttttggggtccaaatcttagttttagcctcgtttgtccttattttgaaaaaaaaacttggccaccctgctgtattgcttattgtaatctgttgttgccgtatattcgctgttgtacatatgcatgtatattgtatattgtgttgtacacactgtaatgttctcatcatactataaatgttttggtctgtaaaaatgttcaaaatttcgactttttgcaatttatgttatgacttttatgataattgtctaatcaccagacaatagcatagaattagcttctaaacatgttaagcttcagaatgataccaagatttaacatgtttttttcggaaaatgcccaaattgatcaaccgagttttcaatatgcaagcactgtttttgataatcaaatgcagattatgacaaaattcatttaaaaaaaagcccactcaattttctatttccctgccggcgacgccctataaaaggaggcattttccaccgaccgacccacacatttccctcatttgtcacaagtacatttattgtgcctaattttattcgtgacgtcggcatttgtacatattacgacagttcgtcgtcgactgctgcatattattatttgttgtcttcaccacacactcgtcaagctgctggttgagcgcaatgtccaagagacggcttcgacaggtgtcactcatttggggatgacgttgtttttcaatttgaaaaagtcattcttggcggcatctcatgaatctaatcaaaatccgatcaaatccaataaaaatgcaaattttttcggagtttatgcaactgccaaaaagcgaaatttttcggaaattgtaattccgaggcccaaaaattccctggaaatctgttcttccagggcaggactgtctgtcatccaatgctgatttcttttttccttttccaggaactcaaggacatggagaagaacccactgcctgagggatgcactgcacggccacttgatcaacggaccatgaccccctggacggttaccatccgaggccgggccggcacaccgtacgaaaacggcaacttccaactgagcatggcatttccgagggactacccgttcaaagcgccgcaagtcacgttcaccacgcgcatcttccacccgaacatcgacacacggggcaaagtgtgtctggacattctgcaaacgtactgggcaccgacgctgaccatcgaaaaaggtggcgtggatttggtggtggatttgatcatgttttanatggattgatcactttaatgctcttaacttttttcaggngcattaagatccgctatttttgtgtttgattagcaaatttcaaagatttcattgcgcttcatcagagttagcgaaaaagcgaatttttggaattnatggtnctaatcgggcatgaatttgatg

SEQ ID NO: 12709 - DNA, 3502 bp, Heterodera glycines
agaaatcgttaatttgtttctctgtctttacagttgtcgtctccatcatcgttctgctgaatgacccgaacccggacaactcgcctctcaatgcggaagctgccaatttgtaccggactgaccgcgcggagttcaacagacgcgcccgtgagatgacgctcgcctatgcacgacgatgagatgatcagcacgtctttctgattccactaccaattatgtattactcattcattgtatatattattgtactgtatgctgtaccatatttatttgtgtgcactactgtgtgtctatttttgtgttgtatttgtgtgcattttcaaagccggtaaagaattttgtgctttttctattggcgtatccaaccttcaggaattttttttcgaaaactttccttgaaaatgggctctcccgcttgaaattcaccctataaatgagctgatcactgatgaatgtcagtcaactcagattttgtgaaactttcgctaacattaagcattcattacacatgcacaaaattcggtggggattctttcaaaaagatttagcaaattctgcatgagtccatcgttaaaattatgtaattacttaatttcccgtccaattatattcattagtcgcagaaatttgaattgaatgaatgacatgttctcattcattcactgacatataacaatcgattggggtcatctcacagtgtaaatgtttttgaactaacaaggaggatgtgatgatgatgatgatgatgatgagtgagtgacaattgcaaatgtcacggctcagaaatggctgtgaagcgtggaccaccgacgcctcccccttcccccccccttcccccacgcctttcactcaattcaaatcattatccgttcactccctctcattacctcacaaatcattggattcaaaaaacattccattttctctcactcaactcatcattccgtgttcgttgagtgaccgttcatttttgtctcatttttgactgggattttccgggaccattttttatttctgttttgtacttcatattcctggttttagaattcattttctaacctgttaacatcagcaccgtataggtaatggatgaacaccagcagcagcaggtaaaccacccgttatttaattaaattccttgaatttttggtcgggttttcaagaccaacagtaaaatttggttgtatgcaaatatgagtcccgaataggcctaatcaacaagccaaatgccgaaaataaatgttcggtgttgaagtctttaaattgaaaaattcacaattttctccttttggcataatgcacgtgttccgtttcccaccattctcgaactcattcccatgcataaattgtcccctgccaatatcctttggccaaatccataaaaagtgccaaaaaattattccctaaaatggccccgacgaccaaaaaaaaatgtaaacgcctgccactagagcttttgtatgagacggttctttacgtatatcccaagccggatttgtcgaatcttttcaattcttcttcgatactcagaaaatttatgagtttccgagtccaaagatgggaggaaatacggaaattagtatgttaattcaaatttggaaatgtttaattgtccggcaatttccctactatttccattaagaaacgagcaattcttgaagcactttatgagtgttttcgagaacgtaggccatggagaaccttcgaatcgtacacagcaaacgaccaaaatgcccaaagtttccttgtttcgctcacagaatttttggtgagcacaatttaagaaatgtcatgtttaaatgtttatgtgaatattcagagtccgtatgcggaaattgaccaggacaaggctgaagtgtcgcctgaagaagtgagttgttgttgctcagctgtagcaattggataatgttttcttttccatttatattttttaagcttcgggctgcttttgtccgttgcggtggagtcaacgcacatgcatggcgtgttttggttttgttggcggagggcgacaacgagacgaccaaattcattggcaaactgttggatttcctcacggcagaagtactcgagatttgcattctttttaatcggattaacgaccacaaatttcagggaacttctgctcctccgactaattgtccaccggctgctgcgccgcccaattatcagttggccaacccccctttgcaacatcaagccgggacttctcaggtttcttatgatgaagcagtagtttgctctcgtgctcgctctttttttagcgaaatcattttttgtttaacttttaggcctcgcaatttccattctccgccgccatccattctcagtcgggcctcacgtgtcgtcaggttatctttgtgactaaaactttggtcgttgcaaaatttaagtagtcttttattcaggaggttgttagaggtatcgctggcctgaaaactcccccggatcgcatttacgacactatttcgtcatcctcgtccgccgatgattcccattcgccgcataagaaggtttaaatgagaattttttcaggaaatgcatgcttatatttagttgagcactcccccgggtcacatttaccatactgtcatgtcgacctcgtccaccgatggttcgaagcgctcttctgtcatttacgacgttcctccgactcctccaccaccggtgccgcaacatacggttttgttcagggttaatttaggttcaaaatgtgcaatttactcgcttttctcgatttcttcagggggggggagaactttttggattcattttttgaaaaggtcgcacctttttaccctactaccccaaacagcaaaatgtgtgatgagagaagttttttttgtggttttgacaatagacaatcaaattttatccggcctcgaaatgctcggacgcgaaaaaaggtcgtaattttggagacgaactgatttttgaaataaaataaaattgttcgtttttagcgcaaagagacgccgaagaaggacagcgatggaaagaattgaaggcgttcatccatttaacaactcacaaataacatcattttttttgttcactttggacgtttaatttttttgttttgttttaatttcggcatttgattcgagtattttgcccttttcatttgcattttatgtttttagttgctgaagataaaaaggctgttttattgtactgatttatgcataccattaaggtttcccaaatgctaaattgctctaaaatctgttacaggaataagcaatcccaatcagcagaaagtaccatttttaataaaatgccaactccaagttctatagagcgctttatcaatagacggaccaattcgaaaaattaaaatatacaaaactgtaaaaaagctctgattaatccgttcatttctctctcccctcatttttcattcatttttgttgccaaaaaagcatttgacaatgccacaacggttcgccacggcgatcacttgtcggattgcctccagcgagaaaaagtcgcgcaaccgata

SEQ ID NO: 12710 - DNA, 3621 bp, Heterodera glycines
ccaacaaattattgctcaattaattagcattgtcatccctccctggtgcccctttccccatttccgggactggctgtctcagctcaaaattcacgcctacacagaggtcagtttcatagaaaaaaaaggacttgatgttgttgggctctgatttatatttcccaaaaaatcgctttgatcaaacgtgatcgatcggggcatttcggctccgtccatttcggcactgcgcggcattttaatgtttgttggtgctcaattgaatgcccttttacgtaattttcttgcttatttgagtgtctcaataatcaaaaaggaaatttaattgaaaaatttatggcgaatagcgccaaaatggcgccagaaaagccgaattttttgcggaattgtttttggcccttataagttataaccgaaatttgaaattttgtaggattaaaattgtacatacctacctagattggtcaaaactttcgaacaaaatattaatttgtcatcaaaaaacaaaacaaaattaagcttgtggcgctgaattgggcagcgccgaattgggctcctcctccccactttctgaattttttggtgccgaaatttggtccgacctccctggtaaataaaatgtttaacttcaacacagacgcccgacatcattttgtgtggcaacaaatcggacctggaaaatcggcgccaagtgaggtaaagtaaagttggtaccgtaaaaataccgtcgtattccctaaaaagagcgaaggatttcatttcaagaaaatacggtacaaaatgattttttttttaaatcccatttaagcaccgcacgtgccaaacagctcgccgatcagttggggtaagtaagattttttggtctcttctgatcggccagtggtgatcgaacaatttttgaccatttggccaattgttcagactgccctactttgagacgtccgcttgcacctcctcaagtgggttcttctgctgattagtgaaaatgttcaagaaaattttctcgctttttgtcacgagaaaaattgtaaaatgaaatcgaaaagcactgaaaataactcaatgaatttttaatttatgttttttagcaatttccgaaaataaaaaataatatatatattttaatattccgccaatttcaaagataaaaccaaataacttttatttttttctctctttctttttatatagtaaattgactaatttttaattgatttttcagcaattgcaaaaaaataaaaaaccatatttactgtatttgagcccgcccccctgaaatagagcccccccccccttttgaagggggttgaaaaatagagccctcgggggttctatttcattaaatttctttctgtatatatttttttcaaaatttcagtaaattaaaaaataaatttaatttagacgtcgaaaaatcagttgactgcctactcgacttggtgatgcaacggtgagaaaaattttaaatttacaattgccataataaaatttaacggtggcattcaattttttaaggatacaaatgtccgtcgatggggacaatttgcctacggaatacatgggtgctgggagccgaattacgctggatgaagaggtcacaaatcgggcaaccggcgcttcgtattactgcgcaaattgctgatcagaggcgccaatcggatcgattgatcacaatttggtcactaattagccgagaaaagagagggaagagagagagagtgggggagagagcgagagaggagaggagggagagagagaaagagagagtgggggagagagcccgtgagtgagaggagggagagagaaaaaaagagagcgagagagaaagaggcaaaagccatataaaaaatgattaatgattcattttcctattattatatttaaaaatgcttgccgcaaacacataaaagagaaaaattgttctaatgaaattttaaatgaataaacaattaaacgttttaaatgggttaattagagcaaataaaaagtttaattaattaaccggtataaatgaaaacaacagcagaaaatgaacagaaaagggaagaacgccgatgaagtcatatcgtcaaaaatgcatttgggtacaattataaagcaatttaaatttaaaaaccaaaacaaaagctaaacaatgaataatgaatgatcaacatgccgtaaccagtttgggcagggactcgaaaagctttttttgttccaaatttttccattttttttaaattaagacgtcgcagaaaaacaaattaaatttgaaaaattctaagccctttttaagatgatggataaaaagtttcaaaacttttaggagaggggaatgaattcccactggttacgacaggcaaaaatttgtcctaataaaaaaaaataaaggcaagggagaaaagggaagatgaagatgggggatatcatggaaaaaaaaacaaggtaattaaagctgatcaggaaccgaaaatctcccgaatcctgattttttagtgtcagaaaaattcatttgcaggcatgcggatttgaaccgccagcaacaccaaacaaatttgggtggtgtggtggtccgcgcgctctgggaacctgtagcaaagggttcgagtccgcgtggctgcaaaattattatttcgattccaaaaaagatacaaaatttcaattgtttcatttcaattggtttgttggtccccaaatgatcatatacctattcgtcattgaaggaataggtttgcctaaaaataaatttttagaaaattttgtcgattttcggtccgtaacaatacatacaataattaattatcccggatttaatcatcacaaccaatggaactttgggtacaaaaaagccctaactgtttaaaagtgatcaaaaaaaaaacaatcacggggattataattgatgatcaaaaaatcacaaaatgaaaaaaaatggacggaaaaaacaaaaatttatatgaaaaaaccctgtgcatagaaaggaaggaattaagctgaacaaaaacagaaaatgggggagagagagagagagagttaaatcacaaaatttgcattatcattttatcaaatgggcaatgcgctggtcggccgatgtttgtgccggagggaatagtgacggaatgccaacagttcgaccgtgccaagcagcaacgggatgacgaacagcacacgggccatgcacacgcggagttggtcctatataatgtgtgtgggaattggaatgggaaatgaatgaatgtgaaatggggtatttgaaattaattattttgtaaattggatttaaattaaaactaaaaaaaactgaccgaaatgtgacctttgctccggtacagctcgtagccattcctggaatacaattcattgtgaaagtattaattaaaacaaattgggtaaaaacttattatgagtgaattttgtttccattataaaaagagagagagagaggaagtgaggggatgaaagaaaggaaatagactttgaaagaaatagagaagggagaaagaaagcgcgtttggaaagacaaagagagagagagggatggagagaaagagagagagagatggttgaaaatagagaaagagagaggcgagagagagagagaacgaaagaaagaaaaggagacagacatggcaaaggccttcc

SEQ ID NO: 12711 - DNA, 1536 bp, Heterodera glycines
gggaaatttttttttatgaattttgttagaaattagccatattttcagaaatttccctcttttggataaaaatacgccccaaaatcagaacattcctagaaataaaaacataaagaatccctgtattatcagataaaaataaataaaaatgaaagtcaaccggaattgaaccatataaataattatgttagtgttgaagcactaccactaggccacaaatatattggaaattatgagcaaaatttattttattacataaaaatttgtcagagtgttagaaaaaaaattcaaaattgtataaatttttgcatttaagacccttacggggccccgggaccgggactcccgttttaaacgggactcccggtcccggtggtttgcccaaaaaacccgggaccgggggtcccggtaaaatcccggcggggccccggtcccgtccgggctctaataatcacacactttctggcatagcgttgcttgtcatcttctataaattcggagaacaaaatgttgaacagcggggcaatggcgtggacagtgacactgaattcattggatttccagaaaatgtttttaattaaaaaaatgagaaaaattttttttgagcagattttttgaagggtcgtcatcccttctgtgctaattgtaagtcatttctctccctcccaaacttgaaaatttgaaagaaatccaatttttcaaaataaaataattaaatgaaatttgtgagtgcgctaccttggcgttaaaaaattttttttttttaaatttaggtttttatctagtgcaaaagtagtttacctatatatttttttaatttttaaaaaatctgtattttttattattttttttaattgtaaaaagggagagtggaatggaattaaaacctattttgaacaaaaaatcactcaaaataacgcaaaagaaattttgaaaaatttaaaattcatatttgaaaatttttttcgcggttgggggaggagggaaagttgtgcagcatcgcccccccccccctcccttctggtgtctgctgctgttcggtgtgtacctgtcgaggaccatgaacagaatgatcaccaacggactggcggagagcgcgtacagaaaggcggaacaaacggaggccaacagaccgtacatcaccacacggtaggtgcccttgcgcaacaggaatttgtcgttggtgatcacaatgaactgtgacagacagagaatgaattaggcacggggatggacaaaaaaagggcattttttgaaattctgtcaattaaaaaaaaaaaaaaattccgtcaattttttttttaattaaccgaacattcttcagagtaaaaaaaagtgcgcgcattcaaaagttatgccaaaaataagtcgtaatcgaaggcgaataaatttctctgacgataaaactccgaattttgaaaatttaaaaataaaacgaattttgggtttaaaaaaccgctcaaacttggcccattttctaaggcaaaaaaaatctgaaaatgccgaatttttctcctcccaacggcacataaatta

SEQ ID NO: 12712 - DNA, 2404 bp, Heterodera glycines
ttatggaagacagcgaggaggaggagtaggagatgtgttgaggtttttatggagagcacttttactaaaattaaaatctgctggtacattattgggtagagaggcattagacactggaacacgtgtattggatacaatagagaaagctgaaacaccaaataaacaagcaataattaatgaagtaaagaagggaatggataatgtaaccgaaaagggaggggttggtcgtcaattcggaacgggaagaaaaaagagtattaaaaggaaaagaattattggaaaaactgtacctaagacagtaataaaaaggcgaaaaagatcagacgtatttggaaaattattttaaaatggtcttcaagaaaattgacaaggaatcggtaaattctataacttcagctttgtcaatatttactcttccaccaactaatgtgtcagtgagtagttcttcagtgcgggaatatttaccgctcaatcctttaacggacattccttttcattttaaaattctccctaccgccagtttctttgatttgaacaaatgttacatcttaaccgaaatgtcaattaaaaagctggattttgacacaaataaatatgttaatttgaaagtgaatgagcaagcggcaacaattaatatgattggtgcgacttggataaagaatttaaaaatcactgtgcagggacgtgagatttatgactctaactcactttatgcttataaagcatacttggatgccgaactttcttattccaaaaacgtaaaggagtcagacctacaggcgagcgggtattatgtggacagtgagaatcaggacggcacggatattactcagcagggttttgaactgagaagaaaattgttttcacaaagtcaaactgcacaatttattacaaaattggatgcagatatttttaatcaggacagatatatggtgaatggagttgagattgatatacaacttacccctaatgacaatgagtttatggtaatggcagcggccgacgataaatatagaatagaaattaccgcttgtaaattatatgttaaaactcttgaagttgttgatggttttgcattagacatacagaaaaaacttgaaaacaaagaagcaaaatatgcccatagattaactatgatcaaatccatatttataagcgagaatcgaactgaatacaatggaacgctatttacgggtcaattacctaaacgagtcattctcggaatggtggagaacgctgcatacgtaggcaaccaaaagaaaagcccatttaattttaaaccatttgatattcgatccgtcacattgatagcaaacgggaaacaatggcccgcagcgccatttgagcttaatttcagtaaaaacttatatacccgggcattccacgaaatgaatgaggcattaggtatggccagttcaacagacagtaacggaatttctcttgagaagtatagaaagggttggacaatttttgcgtttaatatgactaatagcatggaggacaacgagggtattgatcttattacagaagggacgactaccgtgtgcattcaatttagatcacctgtcccatcgggtgggatcaccctaatagccatgagtgaaatggactctattttgatattggataaaaatcgaacagtaatgaccgatacaaccatttaatgtatttaaagtgatttattatttatattttataattttttaaaatgtttattttgtttgttttatttttgataaatttttcttcgagttataatagccctattctctaccctgaacgatccagggacaccgaaatgactgacatttattataaaatagcctcctttgaccattcctacttgaataaaatgaatcaatctgaattattctcaatgattgatgaaattgttgaaaagtttcaactttgtaatgttgaagaaacgaggtcattatcgagatgggtatactgtatgcttttggttttgttgtggatagctattgttatgacaggaattttcctctattttaattcattaattagaaatttatgtaagcttatgcatatatgtagagacgaaaatggacacaacgacgataaatcggattctagcgggaaacacaaagaccagagaacactacttgggatgcttcccttgcgacaagctcccaagcaaaatcaaccagtttccttcagcgttggtagcgaacaatgatccttcgaataaggaaggatcgcattggatcgcaattttcatcaccgataattctactgcctactactttgacagttttgggcgtactccgaacagatgtattagccactttttgcggaattatgaaaaagtgatttcgaataagccaactatccaatcaatattcagtgaaaattgtggatattactgcatttattttgtttattg

SEQ ID NO: 12713 - DNA, 2679 bp, Heterodera glycines
  unsure (1)..(2679): unsure at all n locations
cttatgcatatatgtagagacggaaatggacacaatgacgataagtcagattctagncgggaaacacaaagaccagagaacactacttgggatgcttcccttgcgacaaactcccaaacataatcaacaagtacccttcaacattggtggcgaataatgacccatcgaataaggaaggaacgcattggatagcaatgttcatcgttgacgataggaccgtctactattttgatagttttggtaggaaaccgaacagatgtatcagccagtttttacggaattatgaaaaagtgatttcgaataagccagctattcagtcagtgtttagtgagaattgcggctactattgcatttattttgttcattgtatgtgctcattaggaggaagaaattatgagagtaattttgaaaaaatgacaaaaaagttgataggagaagataatccagatttgtttgtcgtgaattttgttaagaaactgataaaaagtatttaaaggaatttttcattaactcatttataaaaatggaccgtttagacacaataattgcttctcttctgaattgtcccgcacgtaacttgtgcgaccgcttaaatcacccggatgagatacaaaaagtagaaaaatacctcaaagggaaaactctacagacaacatacaaaaatcaactagatgaatacaaagattttgagtacggtggaattacaagagaaagtgcacgtaagcaaatggcttacaatggtttcaagaatgtgaccgttgaccagcatttttatgtacggcaccgcatttgtcttcgctattcaagcaatccttgcgtgatcgaaaaacacaagaatggcaatgaacgtttctacccacttgaacttgtgaaagtgaaggacaatgatataatttatttagggcaaaattttcctaaacctttaattcgtgatgataatatgtttattgatgatcaacaatatttgaattggtaacttaatgtttaaaattacataataatgaataaaatttgttaaatacagaatctatttctgtctttgatttacttccggttatattcaattttccactcgagaaaacaatgatggagactttggggcttttattccgatagacaagaccggggaatagttcaggagtgaaggaacaatatttggcgcctagaaagtcggacagaggtccgagttgaatgtgaaatcccgcatcagctgtcgcaatcaaattcttcaccgcaaattcgtggattcgtgcctcgtagtacccacattgccttattcgttcggtgacttgctccgcagcttgcctacattctttctcattagctgctcctgtacatacgaattttccagttgagaaaattagggcggtagcatttggattatacactttcataattacagcatgaattttacgtggattatattttgtagatggcgctattaaataaattttttcaatatcaaggggtattttgaggtctacaacagcaacgcaatttttgattattggaaaaaacattttaaatgaataatgggagaaaatttttaggtatttatactaaaataaattgaatttagttatattttaactttaactttattataattcatttttaattttaaattctttatttaatcattgactcacagctgaaagtcaaccggcaattgagcagctgtctcaagcacagaatatctgatgttgggttttgcataggcacaactgtcacaattaatcattgactcacagcttgacctctatttccagtggtatattaccgacacttccgtgggcattatacagtcaaaatgcgtccaaggggttattaatgaccattccattggttttgactcggtcagaaatgcacaaaaagaattcccaagggataattaatgaccactagcttcgattggacagacatgttcacaaaagaatggttaatggcgttcagttgacttttagtacaacagacttcacatttcctaaggggatatttatgacacattcggaggcatttgttagaaatgcactcaaaggaatgattaatggaccttcgaagtgttaggtcttggcaaagaggcgatcaaaagatataaaaataaacatagttggaatgagccctggaccacatacttttcaaatttagagttacctgtcacttttgaagcatggcggaatccatcggtaaaattaataattcacaatgcaagtcgacgccgctctatccaatggtatatagcttatatacattttcccactcacagctcggaatgttcccttgttaacaaaaccgataaaattctcaaaactttctccgaataacttttaatttgctattttttcaattggacggaaaaataaatgagtaataaattataaaaagtaaaaacctgaaccatgcgacataaatcaacagaagcgaaatgcttgcgaagattgaaacgcctcggattgcttcgaatctgaaaaataatgcaaataagagtaaatctttgaaagctgtagtggaattagcaaggttcagactttttagttttttaaaaggcacttcatcgttttttggagccccaatatttgcgtctcggaaacgaagggataagagagagaggcgacttcgtaaaggcggagagaatttaaataatttaacaaaattctttaaaatttaatcaatttcgta

SEQ ID NO: 12714 - DNA, 3328 bp, Heterodera glycines
  unsure (1)..(3328): unsure at all n locations
cagagcaaagatggcaacggcatggaaggccaagaagcagccgacncaatcggaacggaagctaaaattcaaataagaaaatatcaatttcaaaaaatgattaaaattgccgattgtccacgaggggcggctttttgctcgaatttggctgctcaattgggccaccatctgccgagggttccttatgaagctccatcgcctcaaggtcctggtaatcggatgccgactcgaagatataaatgaaccgattgatgagagtgctggcactgaacaaacggaccaaaattgaaaaattaaggaaaaattcaaaaaaaatctgtgggaaaagaagcgataaggtaaatgtaagcctttttggcggcattggaccttagaaattccaaatctttatttcgaagatttgctttatttcagcatatttctcttgtttaaaaagaattccttattttgatcaaaaagtttattctgaccaattaagattttttaaatataatatatttaaaaattttcacttttttagattacgattacctttaattttttaattgatatataaattaaattgataaaattaccccatgaaatatttccactaatataaaatggttttaaaagcgtaagataatcttttacttaattagaaagtcccaaggcggttggttgtaaatgcgcaatttggtgagagcaagcacacaaaaggtgcacattatggaaatcacattaagcacgacaccaagctcgagaatttgcactgaaaattacaattaaaaagtattttaataatttaatttaatatttaataattactaattgtcggcgtatttgctgttgagcctaaaacggcagatggaaagcggtttggtaaaaatttctaatttttacccatttgaggcgaaactctattggtgaagagaagaagggtgaagaattggagcaacagaagaaagagtttggtgatcagctgaatgcgaatgtttgtgaagatgggcacaaaaaggaacagaatgccacaggaccaagcctaaaaaggcatttcgaattttaaaattcatttttttataaaaaaaaaatgaccggaattctcagctcagttttcagtgaggaagaagaacgctgcagatttaagcagaaattcaactaaaaatgttttgtttagctaaattatttatttttaattaattaattttacttgtgtgacattcgatgggtccatgtaaacgagtgggacagtgccggacaaagaccagccgtagtcgcggaaatatttgggatcagtgaacaccggttggccgtcgcttatgagacgcacaattgactaaattaaaaattaagaaatatttaaagaaaataggaaaaatttaattttttgtttaccctttgattcatcggttccaaatagaaacaacatctgaaaaaggagaaattattaatgataaataatcataatttaattattaacattgacctgtaaatatcgtcaggaaagtgcttaaagtccgtgtcgtcacaaaaggtcgtaaatttgaagccgagaattgccgtcacattgcccgagtttcgtacgtcaacccgacgcacctccatgttctcgtaatcgttgcgcagagctgtttcatatccctaaaaaacacaatttgaatgtattaatttaatttaacacaattaatttaaattcgacagtaaaatattttgtaaattctttaaattatttatattttaaaggtttttaaaactgacttgacccgtcagaaatggaacccataaatggttggcggacgcgattttaatttgctgcactttgaactgttgcgagtcccatgtcaaccgttcgtcgtgccagcggagctccaaatagccggcaatgttcaaatcgcgcataaactcattctggaaaggcatttttaatttgacatttttcaaatttgaaattttattttaccaaatgaaaatgttgaattgttattttgctgaccgacaaacgcagctgagacggaggaaaattaaataagcaaagatcaaattttaattattgtcattatttttattcataaattagaaaaatgccatattataattaaatcgggcaatcgttatttattttagtttattatttaaatatttgtccctattgttctttttttacgtcattgtatgtgggcggcattgaggcgattggatgaattgaggctccgaaatggaagccctgagagccggcttgttgttgggcacggtttgccaagaaataaaagacacaatgctcaaacacggcgaattcgtggtggttgagactttcaacatctgtttggaaaaattttgattttaattcaaaaacatttaaattttaataaaataatttcagtaaaaacctgtaacattttcgaagaattttttgcactcaatggcattgattccgctgttcagcccaaaaagtgagcttggcccaaccaagtggaaaaaaggctgcgcagagcaaaaatgagcaaagaaaaacagcgaaggcacaattagaaaagccaattgcattttgctcttaaaaatgccaacaattaaaaattgacatttaatccgagagattttctgatgtaaatttgtctatattttttattggattttttgtcaatataaattaactcaaaatgggataatgagtaattattacgtaaattggaccaaaactctctttttatgtattgcgttcagtggtgacgtcaccccgggccgatcacattcactaagaaagaagcgacccaattttgggacacataaataaacgggctttctgctgatcagcggcaaggataagcaacccctttgtgctgcttatatatacaaatgagcggacaaatttagttttatatgggaaaggataaagccaaagggataaagcccacaacaaaagcacggccgagcaagttttgtgggggcaaaccagtcaatttgatttgtcaattcattaattaatcggctggccgtcgtccgggtaaaaagttccaaatgctagaaaaggtgatttgtcgcaattgattaaaattcaatgagtgcgcataatggacaaacacatacatacaattaatgctaatgtacaaaaagcaatttccgatttattgttttttattaataaaatagtaaatataatatttaaatgaaatgaaaagaaaattaaatttttttttttttgaatttgactattatgatcagcatgaaaaaaaacagcagcaattccagttatttggtatgcatttaattaggacaaccagttcaaatgagctgctaatgcctccccaaccgaccgcgtgatctgttgatctgtccaacgttctnatttaag

SEQ ID NO: 12715 - DNA, 1263 bp, Heterodera glycines
  unsure (1)..(1263): unsure at all n locations
attagctgcccaaatgctagtaaaagtgctgaggttaattgtgacaagagaatgagcagatctattcacagttgcagggaacaacaacagcctattgggcattggtgcagaaattnaattggcaataataataataatagtaaaaaaaaaaaaattttttttttatattgtaatatttcagtttttaatttttcttcatcagaaatttttttatagcgtttttaactattttcataaaatgaaaaacactgaaaacatatacatttattgatatcatatatgaatacgagtgatattagccacaaaatgaacactgaatgaatgggtgccatcattttccatggtgatgatgcgaaggattgcctccgaactgccttttgaagtttcgtcccatccctttgaactgattgatcatgccgccaaaactgctacccatattggcaaagttgcgcgaattggccgccattccgttcatcaaattggcgccgccattggcacctccaaagccgttcagcaaactgccaaattgaccaaattgcgctccaacagcggaagtgtaaatgattattaaaatggcaataaaaacgggagaaaaagaagccatgatttctgaaaatttttaatttaatttaatctcttgaatataattttcacaggtctcaaaatttttgaataaaattccgtatgaaaatgcattaaataaaaacgagactaatcgactgaatcaaatgggagaaaaacaagcgcactttttccttttattgtttaattagtttaagaactaaggttttcaagatagagaattgattttattatataattgatcattttaaggctcaatctgtcaaaacataagaagaagttttgtttgacaaacaaaacttacgttctaatttaattaaaaaatataagtttatcagttcagttaaagaaatgcaccaacactgctgtatttataaatttaagaaaattcatttattcaaaaaaaaataaaaataaccaaaagaaaggcatttttaggggttttagaagaggaaaaattttttaaattttttttgagtaaaatttttagagaaagtttgagggatattttatttgaagaaattgttggaggtctggtagaactatttgttgaaaagatgagggtattgttttttgagcgattgaatttggtgaacaattttgtcggtgggtggaaatgagtttagtgcttcataacagacgaggattgtttggtcaaaaacctccggcggttggaaatgt

SEQ ID NO: 12716 - DNA, 1572 bp, Heterodera glycines
catttaatagccaattagcacaaaaatagcattttgtgaaatgcgagtgattctctctctgaatttgtttcgcttttcattatttttcgaaaagtcgtagaaattgcttatcatttcagcgaaaatgaatacacctcgagggaattgctgggcccaatttaaagaaatgaaacaaattttaaattggctcaaagtttggcctggcggacgtatttctaaaccgtttaggcactaatttccttttattaatcaaatttttctcaaactgctgcctttaccctcacaattagcacttccccttcttgcccccccttctccaaattttgcctttccctcctccaaatttcattattttttgccgcgcacatttattggccaattgttctttatttttgttggctaggaaacgtaacgcccgacaaagtctgggcaattggaaaattgacaattggagagaaaagtctgtgacaaacagtttccgctttggaggagcattatcggccttggttctgcaacacaaaatgaaaagaatagaaaaaatattttatggcaaaaatgaacaaatttaaaaaaataataacagcaaattgcgaatcacagccaaccaaaacatttgatttaagaagctttgctgaagcgatctatcaggtggtaaggtgcttcttcaaaaattacgttctagaaaccggaaatttcaaatttgcgtgtcccgctgcgggattgaaattcaaaatttttttacgggacgaaaacccgagggattaatcccacaatttcaataaaaatgtgggattgcggactgggaaaccgcaaaatctcacgcgggaccgtcccccccccccctcagggctcttttcgttttgtccaaaaggtggtcaattttttcggggccaatttaatacggggagtcagatccacgtgatcagtccgggagggattggcaaaatgtgccattgggcctttctctccgtgggttcagtcggcaaacagcaaattgtccattgtccgatcggtcgcgtttggtgtctctccgtccgtcgtcgccttcctttccatgccctttgtcgtctccgtgcccctcccgcctttggtgccgaataatccctcaaagtcgaagacgccgccctccccctttttggcgagcagcggacgcaaatcggtgacaatcgttgacagcggaaactcgtcgtgcgtttgtgacagcgagcggagttcggccagaaattcgacgagtttggcacgtttctctgtaatttgttggagcaattgttgcattttcacaaaagcaattcttaattgctttcactaattataccccgagaaagtaacaattgcgcataaacgacagtcaaaaggcgaaactcttcccacgaggccaattcgcgcgtctgtcaggcaaaaattgatgaaaaacgaaatgtgccaacaattggtcaactgaccattctcaacaacatttccatttcactttcttctttggcctctgccatttccgccctttgccggggaaacgaattggacgacgacgctttttcaactcttaaaaataaagtccccgttttttaaaaatgc

SEQ ID NO: 12717 - DNA, 4278 bp, Heterodera glycines
gaaagagagggacggataaagcggcagagggacggaaaagcggatgagcactgaccacgactgaagggacggggagaaggcgaaggcgtcgccgttgctcagcacaatgacaggcaatcccttggcactgacaaaagtgtgcacaattcgggggatatctgaagcaaacgaaggagtgaagcggacaaattatggaaacgcacccgaggaaacgccgaaaagggagcgaattgaagtgcgaaaaagagactgggacagttgcaaatccctgaaaagcaacggataaagggaaagcgccactttagggggaccaaagctgtgccgtggcatctgtgccaattgcgaggcaaaagtggtcgcggagttcgagcagtgacagcaccgcgggggtgagcagggagcaggagacacggccggactgggagaggaggacgacgagcgaactgtcctcgaggcacaaaacggtccaaacgctgcacaaaaagggggggggggtaatttaatgggaaattacggaggaaattaattgaaaataatgaaaatgaatgacaattaagggcagaagatattttcatccgttagaagatttttaaaaaataaaatcattttttaaatttaagacaagttaatatattttctggattttctcgtaatcaaaaatttaattcaaattttttcactgaccgattcgagcggatcagcagcacgggactgggcacaatgtgctgccatttggtgtcccggccgaactttgccacgactcgcgcccctttcagcgtccgtttgttactcaacgaattttgcacaacaattcggtcaatttgtgctgatggtccctggggaaattgaacattgaaataattttatgaaatttacaaacggattttggccaaaaatggtgcattttgaccatttttaaggttaaaattgaaaattaaaaaaattaaggtccatgggttctcccgttaaatgccaaccaatttgagtcgaaactccaactctttttgcgcttgtggggacggcaattccaaccctttggtggcattctgttgcaaatggcacatttggggcacgggtcgcagttcggcaccactctccaaattgagctcgggcaacggctggtgctcttcgccattcttaaaaagtaatttgcattaataatttttgattcgtttttgcattaatttgcaatttgtcgccatttttcatgcaaaatgcctttgtcccactcatttggccctttttccatggcggagcccaatggcactcgtggggagagtacgtacctcgcgtaccaccccttgggaccgtccttcgttatgggtaggcccccgactgtccaatgccttctccgattattttgtcgatgacacccgccccttttccccttcccccccccccccgcgccctttcccaccgctgcggtggtcgcacttccgttgagtgagcagttgccctcctccaagctgagctgcgagtggttgttgttgttattcatcagtagtgccgtttcgccctcattttcgcccgtcgttgtgccattggtcgcccatttcgaagaatgtccgttttgatcctcgccaatttcgcgttcggttcgtcgttcgtccgaccgatgacgacaaatgggcgacagaacgcgatggattggcgagaattgagcattcgttggtggcgggacggaggagggaatggtggggtcaactgaagaaagtgccaatggcggagggggcgcactggcggaagagttggcatttctaaagggaataaaaatggactaattgtaagacgactaatttaacacctttatttttgaatcgaaagaaaatcagaacaaagagaacgaaaggcattcggaaaatgcttcttttttaatcgaatttgtcaccttaatgtgtctgatgatgtcagtgacgccgactgattgaaagaaccgagaaaaattgtttgtattttgcgtttcttcggcttgacaactccaaaaagttcagacatttaacacaattttttggtgtgatgtacaaaaaaagaataaatacctacaaacaaaaaacagaaaagtaagtcaaaagttctaaaattcatataataatgcaattgttgtaaatacaatttgattagaacccattacatcaaatggtatttattgtacagaatgttataggatcagaattttaatttataaatcaaaaaataattaaaaataaacaatttgtgaagtgtcctcttttttgtcattactcgtgttttctgtgttgaactttgtgccaacattgcgcaaatccgtcgtaaaatgcaaatgagccgaccatcacaaaaagggaggcaaatgcatgggacaacccgaaatcattgtcgaagatgagtacggaaaaaagaatgttcaagaatttgcggagtgccaaagtcatcgaaacttgcagagaagtcgtctcggcggccagccgataaacggaacggacacaaaacaatctaaaattaaaaaataataaataaaatttaaaaaatggattgaacaaactgcaagaaaagtgtggcagagagtgagagaaaggggagaacgtagggaaaagttgacgaagtgtcggaataaacggaaaggtccgaccgaatttcaccggcgacaaacgcaaagagtggcagagagagaaagtgctaaatgcaaagccaaattggttagttaaatggccgaaatctgtccattttcgaggtaatccggcaaatgataaacaaatggaaaagcggagaaaaattaccacaaaaaacatcatttcctcgggatgctttccgtagcgcaaaacactttctcctgcacaattcccaaataggccgaagcaaaggaagaacagctgaggaagaaaacacctaaaaagcaaaaagggggagattaagtaacgaatttaaaaaccatacgaaatttattttgagtaaacaaacgaatgaatgaaaaatgaatgtgtttgccctttttggtaatactgtgccgcccccccccttttcaaaaaaattttttcgcgtatagagaatggaatttttagtcaggaccgagattaataaaaatgaatccgaaccggttcagattgacagatttggatgtctttttcgaaacaacccgggtcatgcatattcaaggccgggaaaaccctgtcaggaccctgctcccgtccggtctcgtttagcacccaagcaggacaaaccaagcgcaaagcggacaatgtgtccctgctgttgctgatgtccgtccaaaaattggtcgtcgctcttttgtccattccctgcgccgccttcgcccgtggcacttttgcggctgaacagcgtaaaaagcgcaatgccaacgctaaccaacaaaacggagaaaagtcgggcgggggaaaaggtgcgattttgcaacagccaactgagcagaacatttgcgagaagagtgctctgaacaaataaagaaaagctatcattgggagaagcatttaaaagaggacgaataaatgggtaattggcgaaaagaaagggcaaaccgatcgaaaaacgatgatcagagggaagggcaggccgaagccgagcacgcggttgttcagcaaactgaccacgaagaaaatgccaacaatttgaagataggcactgaaaaacactaacaatacatctctgatttgtcaaatattagggaccccacactcttttggattgttcaaatttagataaacccgtcgatttccattccacatttaattatttccttcctatgggtttctcaccgcaagggaatccttctcctccgaaggaattcgggatgttcagccaaagtcacgagggccatgaacacaaaagaagcgaatgaaaacaacgaaaaggaagagccaatcctaaaaaagaaattaaaaatcgaaatgtcgagaatatgaatattgttcgaaatctcagcgattaattgtcgaccccctgacacacacttgtttgctgtgcatttcgacaccgattgtgctgcaggaacagctcgtcaacgtccaaaggatggacgacattggaattgggcgttaatgcgttaatccggcgaagccacagaattaattgaattcaatttaatttcaatttttttccatatttctttttctctccttttggcgtactattttcatgtctctaacacatgaaaaatgatggaattcaaatgctaatagttttggttataagggcacaaaggcaatttgggcatttagaatcattaaaaaatgattagttttcgcattttggaagaaaacagcagtttaggacttgagttataat

SEQ ID NO: 12718 - DNA, 3739 bp, Heterodera glycines
  unsure (1)..(3739): unsure at all n locations
tcgttaataaaataattttatttagcctattttgtgctatttgggttatctgtacctattttcgaatattttgcacccatttaattaaaattttcctcacctgaaatctccgccctagaaattactatcaatttggtttttatttaaaacttattgaaaatttattaaaaaagctttaaatttaaatttaaaaatttttttcaataatatattaattattattaaattttaaaattatcgcatctactatattatatgatttttgtaagtaagaaattcatttaagtaaatatagagttataatatacatatttttaaaaatattattaagaaaattcaaaataaatttattttgtttttattgaaaaattgaaacaaaatattttaattttgccaccctttggcgttgtgtaagccattcactcgctctcgttcatgtccgaccctttgaccagcagctgtcaacaacaattttatgctttttcggcactttttgcacaacaagagtgcggttggcgggtgtccattttgacagatgctttaccattttgcggaattttctccccagggaaagatgcaaaaatgcggcaagtgcaaaatttgtgggagaattttatagaatcaatttaaattttggagaaaaatttaaggaaatttaataatttatttgagaaaaagtaaaaatatgtattgttttaaaaaagaaaaaataataattaaaaaaaaaatttctttaaatattaaaattttttaattgagttaaaaagaaaatatatttaaatatttgaaaataaattaatgaaataattgatttaaaataaaaatgcaaaatgagatttaaataaaattntgattgttgaaaacaaaaccaggaaaagaataatatgttaaacaaattataattcaaaaaataatataatatcaaataatgaaaatatttttttttaattataaaagtgtattaaaaaaatcttaaaaatttttcaaaacaatttaaaagaaactgaaaattaaatgtaaataaattttaaaataagtacaaacgaaaccaaaaaaaaagaataattgtttcaaaaagtgaaaatttaggagctgcaacataaaaaaaccagttcaacaacactaacatattctccaaacaaaacgccacacacacaaacacacaaaagcatggacaatggacaaaaatagggtctgaaaaataattttaggggggcggggaggagggtgcgaattacaaagaaaattgtcttcgttggtggcggtggtggtcaatgggggatgaccatgagccaacccatccgcgcgcgaaagacggacgaccacaaaatccgctggggcgggcgggcggttgatgcgcaaatatataacaattattccccgtttttttgtgtgggattttgggggataggatttgtggagaattttcctttttttgtgggggcggaggataaagatgggatttgtgcggtaaaaatatgtgggtttggggaaaggcgaaatgggattttgtggggaggaacaaaataacagcaaaaacaacaacatccaaatttggtgcacaaatttgtgggctgaagaaatagcgcacctaacatataaataaatctaccggttttgagcaaaaatggatttttgaaaaaaagctttttatttgatcgaaaatattcgaaaaatttttaatatttacccaaattattatttaaatttagaatattaaaaaaaaaaattctgttattacaatacaaaataattgtaaatgttatgtcggattatttataataaagactataaatttgagtaacattttaaagcacggaaaaaaataaaagcaaaattttctattttgtgtttattttcaaaaaatgctatctcctatgaaataattatgataactcaaatggcttttaaaattttatttattttttcccccaaaaattatgtacatataaaaaatatacagggagtttgattttttaaaataaaaaacgaagatttaaagttctttaaatgaattaagaaacattaattattaaatcaaaaattattaaaaaaagaagttaacttttataacatttaaaaaattaaaaaaggaaaattaaaatgaaaattttttttatattttgggttattttcaaattaaaaataacattttaaaatttaaatttacaaaatctcatgggaattggaatttttttttgttcctggaaaggctgtcaataacatttatttggtttacccgccgaataagtgtggcggcggtcatcggccaactcagcaagaaatattttctcaacaagctgtgtgtcgtgctcaattgtgatggtgtgagaaaattattggtctctggggaaaatgtgaaaatcttgaagagtccgaaggttattttcatcctaaaataccaataaaaaatttttgtggcaatacaaataaaaagccaaaattagaagatgaaaaatttaaaaaaaatttaaatttaatttaaactgcacaaaattcgagaaattgtccctcaattaaacgattttaataaaaaattttaaaacaaattttgaaataatgaagaaaatgaatttcatatataaaaaaaattccaaattttcagtgtttccaatcaaatcctggcgaaatttttttatcacaatttaatagaaaaaataaattgaagaaatttaaaattttaaaaatatttccatttgaaattttcagtaattaattaaatttattttcccaaagactatttatcattttgttcagcatataaaattttaattaaataaattcgtccaattaatttaaatataaaaaacaatttttatataaaagaggcatttatttgttcaagaaaaaatatgtgtaaataataaatttttatttgttcacaaaacaataaaagaaattttcattaaatttattatagaaaaaaagcaaagaaattgaacaattttcaaagaaaatatttgccgacttgcccaacgactttccaatgtgaaaatcaaatgtttttgaccttcatttggcggagcaggaaccgctgcaagattggattttttcagtgaaattgggcttaaaaaattggcgcataaaacgaatggtgagaaagatttccggaaattttttgctgagttttaaaacatttttttttatgccaaaaaaatatggaatataagtgttgaactatgaataaaataattaaacattaaattatcagtgtcatcaaaagtgatcaaaacacgaaagaatgcgctgagaaaaaattgggaatttttgcaagttaattagtaaattttagttgaatttttaaattattattgacgataaaaacatttggcaatgatgggacaaaaaaagagagaaaaaaatggtaaaaatggaatgaataaaataaaaagtcagcagttgatcaaacagtgaagaaaatgcaaatgtctaaataatcgaataggcgtttcgtaaattgcccttttagggttttttcgagaaaaactcgtataactttggttaagcatgaccaaattaaataatcttaaatatcatatgatacctcttctaaaaaattggcgaagaaaaatgaatggtgagaaagacttccgaaattttttgctgagttttaaaacattttttatgccaaaaaaaacaatgagtgaattattattgaataaataaaataaaatatgtaatcatattttcgtattcaaatacatattttctaataataaatgatttattaatcaaacgc

SEQ ID NO: 12719 - DNA, 1041 bp, Heterodera glycines
agattttggatgtcaatcactttttttcacatcaatgatggatcagcattacattaaccacaagtgatatgcatcgaaaacagaattgtgcattgatcccaacccattcattaattcatcatttcattttggagagacaatttatttaattaataaaaaataaaataaattataaaaacgatttaaaataaaaaaaaatttcatttgtttttaaaaaagctaagaaacatcctttaaatgaagctcatccttctgatcattgtcttaattgagtgtttttcgagcggtaattattcattaatgaaggattattaatttttaatcttttttaaatgttcttatatttttttttcattttcaaatgttttcaatttttttaatatttagcccattttctcatttgccgtgcgggagcgttcggcaccgttgatcaaccctttgttcgaaaaaagcccacaaatttttcgggtatttgtgatccaccgtttaaattttgtgggaaagaagtctgcttccgagatggcaaaggtattaattataataaagaacacacgaaaagagcatacaaattccattaaaaaagaacattgaattaaagtttttggatttttagtagcaaaaaatatcaaaaagtaattaattaatagtcggattttttgatcttagaaaattctcatttgaaaggcaagaaatttgcatttaccataaaaatcatcatttttaaattcatcattacataacatcatttgttttccagccgaagattatttgaccaattatacatgcgccattgaaacggcatttgcagcattgtgccctttttggcaatgcagtagtgcaaagcaaaaggcaacggaaacgaagaagactgtaaagaggagataaacaacaataaggacacttttatcaaaaaatacggcaattaccggtgcgaacagtgccaattaggcaaagaaaatgaagacaatggcaacgcgaatttcccggtatacaagccaaaaggtagagataataaaattttaatatgttttttagtcattt

SEQ ID NO: 12720 - DNA, 2813 bp, Heterodera glycines
ccccttcgtccgtttgtttgccttctgtagtcccttcttctgctgcttgtgttgcggaattgaaaatggccttagtgctcggaaatgcttcgattttgtatgcattggtggtgttgcggagggcggacgtacggctcggaaaggcggcgtggcggacggaggatgcgccgcttggccaccgcttggcgatggcacttctttttctgccgatgactgatgcattgacttttgtccatttatcggcgcctttgtcgcttcttccgacggcggacgtactgcttgagcatgttgaggcgcattttccagttctgttgttgctgtttcttgtgccactcgctttgggggtgtttgcagtgcttttaccaatgctattgtttcagtttgtgctttttgttcatgttgttgttgttgttgctcttctctgactttcggttgtgatgtttcttcttcaaccgatggttgtgttgctggtactgtttgctgtccctgttgtccgtcgctttgttccgctacttcctctgcatttggctcttcaatttgctgtttttgctgtcctttttcctctacattttgctcctcctccgtttttggcacaattaaatgtgccgttttcgtcgtctccgttcttttctcttctttttgcaattcttcatcaatgttctgttgttcttcttcttcttcttctctttgttcttcttcccttctttggtcaatttgcgtctgttcgtccgtagcaaaatgcaaagtgtgcactgtttgaatgagtgccgtcgttggcactgcgaccgttggaatttgtgctttatttggcaccacaattgttggcattcccgtcgtcggcacttctatcatttgtctttgtgccattgttctcatttccagcgttgacaccattatttttggcatttccgtcgttggcacttccatcttcggcaccgcaattattggcatttccatcgttggcacttccatcatttgcctttgtgccattgttgtcatttccatcgttggcatttgttttggtgttgccgtttcgtcacttctttttaaattgttctcttcgccttcgtcgctatcgtcgtaatcgacgggtgtttcaatggatacatttcttaaatttggaaagttaaatattaaaatatttgccttctcacttttcttgtgccgtaatatcttcgaagaaatgggggaaaagcagcgtttgtttcggcggctgattgatcggaacgattggcattggcaatgccgttgaaaaatttggcactttaacaaagaaaaaatgacagaaaatataaaaaatgccaactttttccgatacattttgtcgtcaaaattaattaaaaaacaattctttcgaaagcactctgatcacttaccttcagccttttcagcagcaatcatttgccgcttttttctcagttttggccccaaattcggcacaaacaatcgatggtgaaaaggcaacggaaatgggaataagaaatacgttattttaataatttccaatttaattgcatattattaatcagtttaatgctactttcaattggccattaaatgtgccgagaatggacggtgagaaaatgtcggaatcgaaaaacaaagtagtcggataagtggagagggaaaaagcgagctgatcagaagaagcagaggtagcagtactcagttgggcggactgatcagggccgggcacatttggcacccctttttcggcaatttaaatttcaatttgaaaactgttggcggcgtacctctgagttttgcactttctttgaagcgacaaatgcccgacatggcaatgtcctgctcccacccctccgcgcattcgcaacggcccaaatcacaaaattggccctccgtaaaggcacagtccaaatcggtatcacaggctaacaaaagcaacaatggcatttcaattttacatatttgcactggcattcattaacaacatcattacccttcgaaatccacagacattggcaactttggcacccgtcttcgtcgatgaaaatgccgcaatttctgaggcacaccggcggatttggacaatctttggaggcattagaaatgaaaaatgaatttcccaaacaaatccattccaatcaaataataaatgacttcgtttcgtcgtcctttgcgttgtgtcggtgctctctctttgttctgttgttgccgtcgtttcgcttattctcttttggcttttcgctgttgtcaatttcagtggtggcctattaaatcccttttcccatttgtttttcaatttgcttaattatttaattaccaatatttggtctcttttcctccgtctcttttttcctcttcgtctccctttttccgtccacttttcttcccttctctttccctcttttcttcttccctttcactcttttcttctccattttcttcctcttcttccccctctctttcttcttcttcccctgctaatcctttgcttgtccgttccattttcgctgttggtgttgtcgttgtactgcttgaactcgtcgcaattggactaaagcctaaaaagggcaaaattaaattatttggccattattttgactttttagtgattattttgttgtttgacccggtggctggggactgatccctggaggttccctctcttcggtttgtgccgtcgcagtcgttggcaccttcgcttttgccgtcgttgtgtccgccgtttgtctgctgacttttctcattttggccgttgtccccttttcctcctcctctttctcttccccctgctgtttctgcaacagttccatcgatgtgctcattgtcagtgtcatcggaacgcggcg

SEQ ID NO: 12721 - DNA, 3054 bp, Heterodera glycines
attattttttccgtttgacgcacatccgaccaaactgacaaattattgtagaagatactagccgcaagaaataaaaaaattaaaaagtcaagaaatttgtccgaattcgggttcgggattcgaaacatggatgttttgcacaaatccgaccaatttcagtcctaaacaggtactcacgcgaaaacgtaccccacgcgaaaacggccacgcgaaaacgtccccacgagaaaacggccacgcgaaaatggccacgcgaaaacggccacgcgaaaatggccacgcgaaaatggccacgcgaaaacggccacgcgaaaacgaccccgaccgacataaaaagagtcaaaatgtcgccaagctaaaaattagtgaaaatgtagaaaactatatatttttttaatttgaaaatactaacaaagttcattaacagtttatcagaatcgtataaagaacaacaaaacaaaaaaaaccgacagagaaaacaatgtaatatttctaattattcgaaggaatgacaaaaaaatatataacttcgaatgaacaattttaaggaacatgcacggcttgctgacacggcattcattcggcttgtcgcaattgactaaaacaaagcagttttgcatgaaatattgcttaactttagtgtgtgaaatttggtggttaacgcttgtaaagaaaataaaatgtgaaacgatcattaagagtgtatgggtgtattgctaaattgacaataggtataatagtgtattaaaactaataattgtataatttttcgacctttttcagtaattttttcggtgctgttagttttcgacactggtgatctcgacagtgttggtttcgacagtgattgatttcgacagtaaagcttattttttaaaaacttgctcataatggtatgagtctagttaaattttgaaaagtaaaatgataagcacaggttcacacattgcagagtggtttgcaattttcgaattcttctacaagagcctgcagatttgcatcttggcactcaaacccggcattagttagcagatgttcgcacacgatttcgagaatcttatatataagaaatttttttgtcttttggactatagtcagcacgagatgtttgtacagaaaaagtgaagcgataaatcttttgacaaaaataatcatacaagtcctaatttattttgcttcaattataaattttgtatatgcaattgtatgttataatattaattcataggttcaataaattatgtaaaaagtaattaaaaagtactgtcgaaaccaatcactgtcgaaaacacctggtacgattttttcaacattttgactcattttagcctgggcgacatttcgacgcagcgacattttgacgggcagcggcaccgcccgaccccccccccccccctccccccactcaccggccttgtatatgtgcagtcatttcaaaaataaacccttcaaaatggaaaactgggcatccttttgttgcaaattaataggcccgaccatttttttcaaaatttatataaaagacaaagaaaattaacaatgactaccattcacgacgatattaaaatgtgttttcttgtgaatgttctacaacttaatgtcgtcccctctttttttttaaattcttcatgttttttgaagaaaaataagccaattcaactggaaagtgccaaaaactatcgttaataatttgccacaaaaaaatgtcagacaattgcaaagaagttgaggaaaagatggcaaaagcaatgtaaaataattaaaattaaaatgccaattttcaatttctaattttaatttgttttcccttttttcagtttcatctccgccgactgttggctttgtgtgttcgatttgcttacgccttcacaacttggcctcggaatttcaatgattagccaccgatttgacttttacgtggacgaacatttcaaatcgcgcaaatggtcattggactccatggcaatttggcgcacaattggagagaatggcacaaacgaaatggaaattttcaattccgatggaaaaccattgccaattccgcaagttcaaatgccacgcaaagtcatcggattcgaacgcatcgacatttggttaaattggcaattgtgtaaaaatttttgacaacttttacccattgatttttagtttcatcaaccgaaatgccatcgcttttctccaccgttttcgtcaacttttcgccgcctgccaaattaatttgaccatccatccgacaagtgatcgaatttcggagttcattttgcgcaatatttggccaatcttcggagaaaacatttgtggcatttttttgctttcggatgtttttcgccgtttgcgcaaattggtcccatcatttctctacgattttccgtcacttcgcgttgtcaatttatgtgacgccgatctcttcattgaatttccggccgatgacaatgccatggcgtcggatggacaagcggtggccaaatggcttttcactcctcgaccggacaatgtgccaaaggtgttcacatgtctgtttcacgaggattatggaaattggtcatcgaagattgaagccttcaaagcggtgcttactaattgatttaatctttggttgtcatttattacttaaccaattttctcgcattttaggcttttgcctcggcttcatctctcttcaatttcattgttgtcatttttgttagttcgtcttttgcttcctccgttgtcccctttaatctgaccaacgaattgactcgagaacaattgacgctaaaaagggcaaaaaatagctatctgctgatccgttgtccaattgcgcgagatgcgaacaaatgggcaaaatgggagaaggaagcgattgactggcgaattcataatcaatggaacaaaattagcattcacattaataatgaggacaaaatcgacgggtcagcgtgtttactcagaaattcaaatttatttgtgtttctaattttagtattctcgacgcacctcctggccaaagtgatcagcagcagaagtgaatgaatgaatgatttgttgagaagtgatcgatcaattttgaattga

SEQ ID NO: 12722 - DNA, 3081 bp, Heterodera glycines
tttagccctcattgacctatcaaaaaaccacactaccctggatatgagtgaataagtgtgataagttatagcttattagcacctctgtgacggagtgttgtcattcgtaatttggtttctgtaatccattgccgatgtatcaaatgtcttatgtgcttttgtcccacaatccttctcacgttcgctaattaaatttttaaagtctgacaatgcgtcactgattgggtctatcaggtcaaactcaaaacggtgcaaaagtgccgtgccaagatggacaaaagcgcagtcagttttgctcagtgttcgtacattcttaaagggccattgaagcaaaatttaaaatgagtttgtttttttacatctttttaaaattttattttaaaaactttggaccaacacaatgtcaacaaatcaggcaaaatttttcaattttcttgatgcttttgcctccatccccgacatttcatccccgaagacggggagaaagccaaatctttaaaatctattaaaattttaatggatttcatttttggacaaattgattctggcttttttgtatgccagattaatcatttaaaaattcctgcttctcaccatgcttttgctgctgtctcttaatttgctgttaaaatattgctccatgaaagtgtaaaattcggccgaatgttctccattttgataagatgaatttccattgtttgacaatcgtgttaaaattctttccaacactttgtaaacatcgtaatatgacaatgtgaattcagagagtttgagcatgaagttgaaattttcttaaatattatggaagtgaaaaatgtaatgttttttcataatctcgaaaaataaaaaatggttaatttttcaaaaaatcttttagatatttaaaatatttctttctatttaacccaaattatatattatttgtaattttgttgttttgcttttattcctttatttaattcaaaatttaaattccattttttatcccaccaataaattgcggttctctcgcgctgtccgaatcaatttcactcaaaaaatgttttttctcttccgaatcaatttcactcaaaaaatgttttttctcttccgaatcaatttcactcaaaaaatgttttttctcttccgaatcaatttcactccaaaaatgttttttctcttccgaatcaatgcgaatgatttgaaagggaaatattctagaaaataataaaagttattataaaatgtaagaatattttacccattttcgttggtgccgtctctttgtgccgacaaagttttaaatgccgacaaaagttgttccaattgccacccgccgacatcacgaaaattcgtgaaataattctcataactagggaaggaaaatatttgaaaaaagtgcaaacaaattgtgtggcccaagactttaaaagggtaaaattaaaaataaataattatttgatatttcaattcaaactcacatcacagagagcacaatacgaatggccaatgaaaaagtcagttgtaaaatttggttgaccactttcttggaaatttggtctttgtcggcacaaaacactgtttcgttgtacgctttggcaatgtgatggcccaatttttggtcatagtgcaaaaggccgaggaattcgttcacggcgtcatctgctctgatcacattcaaatttggcattgcttcgccctctccgattatgttgtccaacacctaaaaagggaccaaccgggggaacatttttggcgtaatctttggctccatgacaatccgccagtctaattcaatgaccgacccacccgaaaagttgcgatttccgccgcatatttcacaaatgtcaaattgaaaatgatccgtttttgttccacagaatagtcctgtcctgtgtgatcataatcagtgtaaatgtcgttgatgaattggacgaatttgtgcacattttggactgaatcggccgagtcccattgataagacggaatgccaatggatttatcagccaaaaattggaagaaaatttggataaaaaataatggtaaaagtggacattgcagtttcatttctaaaaaaatgggatttattaaaaaaatattatttttataaatataattcattatgaataataataatatttaattgaatagaatggcaaaaaaatacgcatttatgacgacaaaagtaaaaatacaacttttatttatttaattccaatgattttaatcgtgcaatcattcgccttttattctgattttttctattataaccaatttttcactctaagcattaataattataattcatacattatcacccatggattttgtcaatcaatttttcactctaagcattaataattataattcatacattatcacccatggattttgtcaatcaatttttcactctaagcattaataattataattcatacattatcacccatggattttgtcaatcaatttttcactctaagcattaataattataattcatacattatcacccatggatttaccaatcaatttttcactctaagcattaataattataattcatacattatcacccatggattttgtcaatcaatttttcactctaagcattaataattataattcatacattatcacccatggatttaccaatcaatttttcactctaagcattaataattataattcttactttagcacccatggattttgtcaatcaatttttcactctaagcattaataattataattcatacattatcacccatggattttaccaatcaatttttcactctaagcattaataattataattcatacattatcacccatggattttgtcaatcaatttttcactctaagcattaataattataattcatacattatcacccatggattttgtcaatcaatttttcactctaagcattaataattataattcatacattatcacccatggatttaccaatcaatttttcactctaagcattaataattataattcatacattatcacccatggattttgtcaatcaatttttcactctaagcattaataattataattcatacattatcacccatggatttaccaatcaa

SEQ ID NO: 12723 - DNA, 1641 bp, Heterodera glycines
  unsure (1)..(1641): unsure at all n locations
ataattcatacattatcacccatggattttaccaatcaatttttcactctaagcattaataattataattcatacattatcacccatggattttgtcaatcaatttttcactctaagcattaataattataattcatacattatcacccatggattttgtcaatcaatttttcactctaagcattaataattataattcatacattatcacccatggatttaccaatcaatttttcactctaagcattaataattataattcatacattatcacccatggattttgtcaatcaatttttcactctaagcattaataattataattcatacattatcacccatggatttaccaatcaatttttcactctaagcattaataattataattcttactttagcacccatggattttgccaatcaatttttcactctaagcattaataattataattcatacattatcacccatggatttaccaatcaatttttcactctaagcattaataattataattcttactttagcacccatggattttgccaatcaatttttcactctaagcattaataattataattcatacattatcacccatggattttgccaatcaatttttcactctaagcattaataattataattcttactttagcacccatggattttgccaatcaatttttcactctaagcattaataattataattcatacattatcacccatggattttgccaatcaatttttcactctaagcattcataaattataattcttactttagcacccatggattttgccaatcaaaacacatatgatgtgcagcagggatggcacggaatgccgaattccgaaattttcggtaaaaagtcggaaaatttttggaattttttttcaaaaaaaatttgctcaaagcgctatgatgggaagagaaatttgtaagacggcactttcactttacgatattttaatccgataattgaccaattagatatttttagtgtgttcttggtacggtcattctccccactgaacattttctacggtttccacagctcattttgtatataaagaaaaagtcaaataaattttaagcgaaatttgaataatttaaagaacaaatagaaatatggaatagtgcttattcgtggaaagaatgaacaatcgacggaagaaaagaacaacacattttcgtaacagttgagagcttaattcaattaaaaatattacgggaaaacatttatttatttatttgtacattgaaaatcatttttaataaaatatttaaaaaactaaataaatgcatatgatgaaagtcatttcaaaatttgctgaaaatttcggcagtcaaataatcggcctctaattaactttaatatattttgtgatgattttcatctttcagtggaaaatttgtcttcagcacaattttttttttttttgctttgtacttaccaatccttagttgcaaatttaatttgttgacgaaatttgaaatgaaaaagnagataaaattncaaatataaatcnaaatatggaccgttactaaataatttaattgccatgcctcattttgtttcctccttttaaatttatttactatgtgagatttattttcccctatttttctgtctatcaaatgc

SEQ ID NO: 12724 - DNA, 5289 bp, Heterodera glycines
agtcagttaatgcagtgcttttaatccagcaacgttcactctaacacaaaaacattctgaatttgatatttgtgtcggtttgtgagggggaaattcagtgaatgggcgattaatgaattgaaaaatttttcgtaggcgggcggttcgctgtgttcgatgtgactaattttgactgatttcttttcgcatttttcagttccttttcctttcaccttaatcatattcaactccatgttctgcgttgccattggatttgattgttgatttgaatcgaactgggttctatttgcgctgatcgcctcgattttatgatcattgacgtcttgttggtgatcggaattttggttttgaaaatggacaaaacgttgacttggccgggaatttgggttgctctcataaaaaatatcgttttgaaagccattttgtgggtcggatacccattgatttttcgggccataagtttgataagggaccaaattttggttttgaaaatgatcaaaattcttattggggcaataatttcggttttcctgttggaaggtttggtttttgaaaccactttgtcggtttggcctgaaattattttgcgctcccatcccaaaatttggaaaatttctttcaaaacgttgtccgtaatttgggttttgaaatgggactgtacggttttgctgtgggccggtttgctgaaactgaacaggaattccaactgattcgtttcgttctcggttttttccgtcctcaataagactcaaacggttggccatcatcaaaagctcatcaaaggtttggtttgctttggtctggcattccaaaaatctggccaaattcacatcatttatgtttgaaatgaagtgcttttttgacacctcatccaactggttttcgtccagaccaatgtatgagcaattaaccaaccgttgaattcgctcaccaaactttataatgtcttcatttggttttcttttaccattctgtgtcaattcggaaaatgcgtttgcctctttgtagtctgtctctctcaaaatggacattatttcggtttttagaatgccaaatgtcgcctcatttccaaatttgttcagcgcaatatgatacgctttcaaagctttccctttcaactttgtctgtagcaactctttttgcttttctggtctccactctccggcacacatttgaacatttaggaagaaatccttaattttgtcccgaccttccgttccgtataggttcggaatttctcggagcgtatttgcgtattggtttgacagagtaactttatgtaattccattacaatatcaggaatttgattttgttggaaattttgctgagggacaaactcgaaattttgaacgttcggaaagtgattgggttgtggtgccaaattttcaaaatttggattcggtcgctgttgataatttggttgattgatattccgaaccggatgaaaattttgaaaattgggtccatttccaaaatctcttgtattctgaattgggtgattcaccccaatttctcgaccataatttggatttggaaagttttggttttgctcaccaagcatttcttcatatccgaaattatgagcatgccgaaccggttgtgctcttaattcccgattttgttcaaaatttagtgcggaaaactgatggttgttcgtcatttgtgagttgacgaaaattcgagggttttggcggcgatgaaattgcatattttgtccatgaatctcattaccaaatcggttcgcatccggattccgattttggttttgctcgaaattttgttgtcccccattgtatgaaatgtgtggtgaaccattttgaggggttgaatgagcccggggatttccgaaactttgggcaacattttggttgggaggtcggaacactgcgagctgcatttgttcttcgacattttgttgcactcccacttgctgagggatactgttttcgaaatttcgcggaaatggatttgggttttgcacattgtccaaaatgttttgaggggccaaattcaaaccattgttttgttcagtgccatttcgtcggctgtggcgagaatgcgacgattcctcttgttccatataatttatcggccggcgcactcggaaattatatctttgctgaaaaccggttgactccatacatttctaaactttgaaatgaaaaggagaaagaaaaaattcaaaacaaaaatcctccaaaattagtgttgaccaaatttccaatgtcgcttgcacacaatcggtttgcaattcggcgtcgaaaggttggattttacgtcgcttttgcaggagcgccacgttggagaaagggcgtatattcggggagggactttgggatttgctggggttcgggttgagattttggggtcaaggaaagatttacttaattttcaacaccactttactgacaaggaattagagaataaggcaaattgcaattaggaactcaaataacagtaccaattaagcctttgggcgtttgttgttgttgaatgaaagtccacggggaaaagcaccaaattttgtagttttattacaataattcaaaagcacaaaatataaaaaacttgagagaacacgaagaacgaaaacgaagacaacaatcaaaaggaaaattaaatgaaggatgcaaaaatattttaaattaacgcgaaaaacaatcgttgcaaaaaacaataaaataaggataaatcattatttatcctacgagtgtcgcattttcttgaaatgaacaactttctctcggtgtctaatttttcgacggtatcgcattttccagtgtcgtatttaccggtgtcggattttcagggagccgtctgagctatcaagccatcccattcaccctacccttttttgggtcttttgcctccgctttaagcgttttggccgtccgctgtgctcagtcctatacggtatttaaaaaataactgtagctttaagtgttgtatgtagcacaaacggtcataaattgtttaagaatctcgttttgaattggtcaaaaagttcgaaaactaagataaaacaaccaacatactgttattggattattattataagtttgttcccaaatttttataaaattcaattgagatttatccatgaatattgcttttttgaaaagtttagaagaaaaattttaaaataaatttatttaataattatttctatagttaacattattattttttaatttttcaaattgcatatcttttttttttgtccactaaaaaaaaattattttaacttttttcgattgtttggtccaaaaatgtggccccaccatcaaaacgaaacatttcattatcaccattatgaaaatagtaatacttaattaaatgaattcctttttcattagttttttgggcaatttttgtaccgcaaaaaatgctttgtaagcaaaaattgaataaaatcagcaacaaaattattggccccgacaaatggactttgaattttggtgataagaaaatgacataaaaatgcaaagagcagcagaagcaaaatgagtgaaagagccacagttcaatcgaaatatttaattatttaattaatcaattttgatttaccgtatttattgggaccccccccccccacttcttaaataaagccaccgtgggctctatttcggtaaatacgattattaatgacgatttcaataaagcaattagtgcttgatcgatcatccattgtcagtgatccagtttatatttcatttttcagttttttaaataaaacaaaaacaaaaaagtttttccccttttttgggttaaatgactcctttattttattttttacttctcaatgatttcccgacatcaattccaaccatgcaatggatttaggtgtcggtattatacccctcacatgagggtaattcaaaccaaaaagagcgtaattaactgtaattattaaatctttgaaaatattaggctcaaaaaactcataagacttattgggaaaaccgtctgccccctttaatggaaataaattactggtgttattgtattttgaaaattacagtacttgaaatataaaacaatactttatgagaaaataaggcaaattcctcgtgaattgaaatcctaaaatctaagaaaggttagatttgtcgacgacaattaggcgtcctttatttacaaaattttgatctcttaaattgtttgtacaaactgttcgagtagtacccattaattttaattatttctctaatcacaaaaaataaaaaacgaattaaaaccgttcaattattttgacagacaattttcccccgatgttggagaccaaagataataatcctcatcataacattttcatttgttgataatgatgatggcgataattaatcgctccagcaaattatcattatgatgaggctaatgatgatgggtgatgaccgacaaaaagcacccaaccaaaacccatgggcccttaggcgccgacgccaaaaatcgtacaaattatgtttttctttcccctttctttcatttaatcattgctgataagtcgagagtgataacctatctctctctctctctctctctctctgctcttgattgtgtatgataaggggttcgaatgtgtacccattcccatcgtcttttgtgtgctgcacttgggcaggaattttggcgttttgtttgtgtacaaatttttatgcgcccgaaaaaaaaccatcgaaatttgagagaatggaggggacaaagaccagctcctcgtcggcccattgatattggcaaacattggagaacaaattttcagttccaaatggccctgagcctcagtcatggcggaacaatggtgccaagcacgtgaattttgtatgaatgagaataatttttgttcatatgcaatgaaagtatcggtgtcaagacaactcgtacaaaaacttagactaggcctaagcttagggttaggcttaggcctaagctttaggctacggctatgcttaggcttgcttgggcctaagcctaggcttaagcttcggttttattttatcaaaatttttattttgcgagttgccattgactcatttcttggttatggatcaacaggtgaccaacgtagatatctgaggtcggatgaatcccgagtcaaggtctaaatgaaatgcaataaatccaggagattttaaaaaaagaccagaaggtatcccgaatccgttgacatgccgatcccgatcaatctgatcccagatatagcaaaattgaaaaacagcaaggttgtggcatttaaataggcggcaaaaccaaatctttcggcgccgaactgtggaaccaatcagttaaaa

SEQ ID NO: 12725 - DNA, 3753 bp, Heterodera glycines
  unsure (1)..(3753): unsure at all n locations
aaagcaantcggtagcaaattctgtgctctttccagtgagcttgtccattttctctagaaaaaattttccagccccctagggatttcgaaaatttcccgattttcagtgtattttgggtgtcccggtcactaggaaggagtgatctgatcaagttggtgtaagagactttttgatcagcaccgaaagttgtgcaagcatgaattatttcaagtttttaaatgaactataagatagtttttcaggtttttttgtggcactgtatttctctcacaaaaatgcaatttgtttgggaaatattaaaataataatcgaaattataattatggtcaacaaatctaattaatagattaaacatttaaataattaattgatcattagaacaactcttccgtactgaaatgacccgccctctccgatcaccccacactcatactttttttgcttcgtcatagcaccgatcagcaccatctaagtgtccaaaaacctagaaaaacaaaaaaaatcataaaattcgccttcggacttaaccaattgaaaacgccgataagttgtggcaaaaagttaaccataactttactgaaaagcaacaaaaattttttaatgctcgatatcattcgatattcaaaaaagttatgactatgttagttgaatcgttctgcttgttcggaacaaagctcttttggaagaaaaagtttaaaaattgaacccatattcaacaaaactgaccaaattaatatattttttagtttgcagaaaataattttaaaaatttagcagtccatttaagaatcaattaattaaaaatagaagaagtgatcggtatttatcagttcttatgccaccctatttttcgtagtaatttggggctgtacccgctacaatttccgagttgttggcgaatttttacatttggcccaattgcaggggtgcgatcgaaaatttttcaaaatcagaacattgggctcaaaaaatcagattttggggtcaaaaatcaggacattttgctttattgcttaaaacagatatttttacaatttattcgatcaaaaaatatattaaatattatatttttcacctcacatgatcatttttaaagagagtccggtggcgccgagaggcgccgccgggaaaaattttgtaattttaatgcgatttataaaatttctaagagcatcgaatgatatcaagataacttacttttgttggttctaagaaagtcttgaccagaatttttgatgatcaatcttattttatgtcgaatgaaaattgtttaggttttttattttcttgataacaatcaatagcaatagtgtttcggattagtttgcaaaatttcaaaaatttttgttaaggtttcaaaaaagttatgactatagtatgtcagtcgaatcgttctacaaaattgaatgtttagcgaaaacggaacaataaaataatttttgtttatcaattttgagaaaatttttcaatacttagtggagtgtattttttgaaattttttcaagtgattttttagggagtgtattttcccgattttattgcattttaaatctttcgaaaaaaatgctaaaaaaggaaccaaaacggcaaaatgccaaaaagaattaaacgcttaaattatttttgtgtttaaaaaataaattaaatagttgattaattacaaaatcaaaaatcaacaacaaaatttctgtaccaacacagtttttcatatgggataattttgaaatgtttaagaaatgcaccaaacatcgtgaaggcattaaaattaagatttttaaaaatcatttaatttttatcaaatttgaacaaattaacaaatttatggccaaaacagctatttaatgatactaacaatgttggatttggatgacaaagaaaaaaagttatagccaaaaacttgccgggcccaaacgttggggcccaattgagctgctccgtattaattaaatggaaaattcgaataaaattatggtcgccatttagagaacaggaaaacacaaattcaataaaacagaaaattttttaaattaaaattaggaaaaattaaataaaatattttgattccttttaaatgtgctattcatccgaaagttcttcactgaactggtcaaatttattccaaaagcgatggaagtggtaaattttgaaaattttaatgaattttatttaacaaattagttattttcgtgtttaaattgaacatcaattttaaaagcatttgatttcctgcagtttatccgccagcattttgttagttcgacaagaaaatcattaatgcaaaaaaagtttgcttaagtgaatgatctctaatattttttttcacaaataataatttttaattttcagatttgctcaattggattaaccaaagcgatgccattggacggatggacaaaaacgatggcaattttcgacaaatgagtgtgaaaatggacaactgaatttttcttgtaatcggtgtggcattaattttaccactcaacggataattttgacaaagaatggccaagttggactattccgagtttctacaaatattaaataataaaaagtaaaacaaatttaaaaaaaacaaatttataaaagtacatttaaaagaacaaaataatacaagaatgatcgataaaagtgatcacttgtgaatatttcaccatttagagagcatccaaatcaaatttgaaattggacccaaaattcgcttcaattttttcgacaattaaaacaaaacaaaaaaaccaattaacatgaaaatggtaatttaaaaattatatttaataaattatatagttatttgacaacccaaacgaagtccatttttggtgaaaatgatctgccgagtggccgaactgtcgccaattcctacagtatcaccttcaccgtaggaatattcacgatttgttccttttcttttccattaatccagattttgccatcactatcaaatgcataagtgcccttttcatttcgaattgttccatccaatttgttctgctgtttgactgcaaatccgaagctcattctcttataatggacattgagacttttgttgccaattattttgagattctcatgacaaacattggcatcccaataattttgtcggaaatttgaagatgccttaaaataattcatttgtaaataaattgattaaatatacaattaatgaaaataatatttaaaaatatatttctaccccttaatttacctttctttgctttggttcttgctctaatgcactaattttttccccaattttcttctgatcattttgtatttttgaaaattgatccgcagtgcttaaaaatcaaattaatttttaaatataaaaggaaacatttaaaattgataaatttaattttcgttttaatttctcatcgccttttgactatacttctcgctgcttctccatttcactgattttttccaaaattttcttctgatcattttgtaattgcgagagattttcctcgccagcttaaaaacataaatgaattatttattaaaatggacggaaaataatatttaatccgttataagaattttaatgccgaacaaatggtggacagtgtttttcagattgaatctgttggtaccctaatcaatttcaaatatttaggacaattttactcagggctcccagattaaaattttcaaaagcctcatttttgatcaaaaagcttcataaaaatttattcaaaacacgtcttcaaatgtttaaacgttatatttttgattgtgcacccagggacggt

SEQ ID NO: 12726 - DNA, 3137 bp, Heterodera glycines
  unsure (1)..(3137): unsure at all n locations
atttatttgtttaattattgaaattaattattattaataaataataattaattgtaataatggttgcccatggcatgtatcacattacctgactgcaataaagcaactgaaaattaaaattttaaaattatatcactttgagaaaatttcagtctatntaatgagactaagtttttaaaaaattgattaaataaaataacataaaagggaatatttttaaaaaaatgattagaaaaatatttaaaaagctggattaaaatattaatgaacaaaattactctgttcgtagtaatgcggcaattcattagctgaaaaagatgtaaatataattgttccaacactatctaatgcgggtatattatatgttttttgaatttgaataatctttagtattaaggattaagttctagctaatttcgtgaaaaaaagcaaaaatgggtcatttcacaaatacaaaactgaattaaaatttaaaaaaatagagaagaaccccatggtccatttttgcgtttttaatcaaaattcctaaatctttgtagtttcgcgaaatgacccagcactctcaaaaatagattactacaggaaaaatttgaaattatgttccaatcaaaataaaatttatttttattttaaaatgtttattttaaaatattttgaattaaaaaaaattactattggattctaacaaccaattcacgaacgatgatatgccctgactaaaagctgatgcaaccccatataattggtctaaaaaacaatttattttaatacacacctaattctcaaattatgaaaattgacagtgaatttaattgtcccataatgattaaatttaatttttatgataattaagaaaatttaaccaggtagcgttgattcatcaggaaattgtatggattgtccatcatttcttgatgctccacccttcaaattaaatagcacttatatttaaaaaatatttcaaataaatttaattaatttaaaaaaaaataaattttgaaatttgtaaaattcaatttaaaaaaattgtatggaaagttcatcatttcttgatgatccagcacttaagaataaaatagcacttatatttgaaaaactattcgatgtaccaaataattttaattaattaaaaaataaaatattaaatttgtttaaaattaaaaaagattgcatgaatgttcatcatttcttgatgctccaagcgcttatatttgaaaaactattcgttgtttcaaataatttaattaatttcaaaaaataaaaattaaaatttgaaagtttaaaattttacttgtgatgattggcccacatcgttgacagcactaacaggtgcacgacaaatgggacaattttttctcgtatttagcctgggggttatggcaataattttccgaattaattattattaatgatacctaccaaacattgatgcagtcgcggtggaacaaatgctgtatgtggtttagtgatttttaagctatataagaaaattgtattggggcctcgggtatacgaaaatttcatgaatttgtacagcaaaatttcaacgattaatgttcgatttatctctggactgagtaactttcgaaagccttaagtgccctctattagcttgcaatattttgaaaaattcgttaaggttcaaaaaagttatggccagaagaattcaaaaaaccaaattttccaacctttttggccataaattgttcaaaactgaggaattttttttggaattttgcaggctaatagatcatctgaagggctctcgaatgataccaaggttgttagatttggttaatcaagaaaaaaagttatagtccaaaaacatgctggggcccaaaagtgccggggtccaactgagatggaccgtcacaaattggatcgcaattttaattatgtgaaattttataaaaaagggttcttacaatttttgtcacgaaatttttatttgaaaattaaaaaagtcagattcatttatttcataatgttgcatatttttgccgttttattacgattttggcccaaaaactaaaatgaattattattattttttaattatttttgtctaaaactcgaactcgtatactatatattatattattaagcagcattttttgctcacattgcatggaattgccgttttcacagagcccttttcatttccatcagaaagacttgacaaacaaattgcacaatcgtcatcattttgttcagttgagatgctttccaatgactcgcttgaattttggcttccagttcgatgttcatctttaattttattttagaaaataacagcaaaaaatcaattaaatttttaaaaattggaaaatttaccaattctggcttccagaatcggattttttgaacaggaaaataacgcttttgaattgttttaaagaaatttgtgatttctttttttataaagaaatccttaagcaaccggtccctatatgtcgggatccctaaatgcgatatccccgtgtccctatatttcgggatccctaaatgcgatatccccgtgtccctatatgtcgggatccctaaatgtgatattcccgtgcccctatatgtcgggatccctaaatgcgatatccccgtgtccctatatgtcgggatccctaaatgtgatatcaccgtgcccctatatgtcgggatccctaaatgtgatatctccgtgcccctatatgtcgggatccctaaatgtgatatctccgtgtccctatatgtcgggatccctaaatgcgatatccccgtgtccctatatttcgggatccctaaatgcgatatccccgtgtccctatatgtcgggatccctaaatgtgatatccccgtgcccctatatgtcgggatccctaaatgcgatatccccgtgtccctatatgtcgggatccctaaatgtgatatcaccgtgcccctatatgtcgggatccctaaatgtgatatctccgtgtccctatatgtcgggatccctaaatatgatatccccgtgcccctatatgtcgggatccctaaatgtgatatctccgtgtccctatatgtcgggatccctaaatgtgatatccccgtgcccctatatgtcgggatccctaaatgtgatatctccgtgtccctatatgtcgggatccctaaatatgata

SEQ ID NO: 12727 - DNA, 1530 bp, Heterodera glycines
cgaattcattatccctcttccatattcctcctcttgtatcgcgcgtgcactttctaaacaaaattactacattttatacatacattttatatacagattaatatatatatttcgggttgttccaaagccatatctgagtattgcgaacatcttgggtcgaggtgtgtgaatttaaatgagcaatttggactgaattaattccaagtttttgtgtgtgtttttttttaatttgtaagttcctagaaacaccgaaaatttttcaatctttttttcgatctttgaaaattatattttttttaattttctccaaccatccctagacaaatttggacatgatgtttggtatctcttgatcacgtgtcattttcccccaaaaggtcagagaaactaaataatgccaaatcggtcagagaaattaaaatgtgtttaaaatgattcggttttaaaaaaccattcttgaacctaatgaatttaattccgcagcctggtcttcctgttcttgtgttcggcgtgcaaatccttcgtctcgtaatcgcatttgctgcttcattttaatgtgtaattgtagcgctaataaccgatccagttcggcggcatcttagaggattattttttatatatttatattgaataaaagtgtcacaattaatgaaattactggaatgtgcactgtgcgactgatgacctaaagggttttaaattaattagtatgatgaatgataatattttattttctattttaatattaatagtataattaaatgaataaagtattttttgtatatttttgtaacgatatatcatttacttgagttcaattcatttatatttgaagtgctcgcaggccattgttgattaggatttcgttgcaccacttgacctaaagggtttaaaatcaattagtatgatgaatggtatttttatttttatattttaatattaatagtataattaaatgaataaagtattttttgtatatttttgtaatgatatatcacttacttgagttcaattcatttatatttgaagtgctcgcaggccattgttgattatggtttcgtcgcaccactttacaggttccaaattaattagtatgatgaatgataatttttatttttatattttaatattaatagtataattaaattaataagtattttttctatatttttgaagcatatatcattttacttgaattccttgtattcgtatttgccgtgttcgattgggcaaccctcttcgcctgttgtcgagccgaattttgtctaacctggcctaaaaatttaaatttgatttagtttgattttctttaatttttatcaaattatatcatttatttatcggtaaatttattattattctaataaaattagaccagcagatggattttgagaaggtcgctggggtaggtcagaattagttcgtgtgattgagtcttaaaattgtattattatgaactcctaatctttatgatcattggtaaaatcgagaatttagctttaaaaaaactgtttagttgaatttttttaa

SEQ ID NO: 12728 - DNA, 2639 bp, Heterodera glycines
cctcatccattatatcgtgagaggccgagaattcgaattcaactcacagacgaaaaagggagaatataaatttgatgggcaaaaaaagagtgaatactcctaaaatccgacctaataaaaagcctaacactcggaggggacaaatcgcggcggaaataacgacaataaccaccacaactgctattccacctattattagccctagcacaactgttattccaccgaccgctcgcaccatcaccactgctattccaccgacaactcgcaccatcaccactgctatgccacctattactcgcccaagcacaacggttattccaccgacaactcgcaccatcaccactgctatgccacctattactcgcccaagcacaacggttattccaccgacaactcgcaccatcaccactgctatgccacctattactcgcccaagcacaacggttattccaccgacaactcgcaccatcaccactgctattccacctattactcgcccaagcacaacggttattccaccgacaactcgcaccatcaccactgctattccacctattactcgcccaagcacaacggttattccaccgacaactcgcaccatcaccactgctattccacctattactcgcccaagcacaactgttattccaccgacaactcgcaccagcaccactgctattccacctattactcgcccaagcacaactgttattccaccgacaactcgtaccaccaccactgctattccaccaattattagccctagcacaactactattccaccggttactcggcctagcacaaccgttattccaccaattactcgcgtaaagaccgaagaaatccccaatatcacgattgaaaccattgagaagctcatcaagagacttgagaaaatgacaggaatacgggagaaccgtgtgaaaccaactccatttttgatgccggaggacgttgaagaagaaagtccgaccacagtagtgagcaaaagggacgctccggaagaagattcagagaaatggtggcaacagcgaaatctggatcatgaaaactcacggctgaattatcttggatggcgcagtcatttaactaatttacaaaattcgcgggacaaatggttcagcgactgcaatgaaagaaaaaacgcccttgcggtggcaaaggctttggcacgacaaatgcctgaagatgcagcgcggtctttgtacagaagagatgatatcacagctttttgggcaaagtcgacagcattgaatccaatgtggacaattactttatgcaagcaaatcaaagcagaaaatattttgtgggaccaaaaagttggcaacaaatgttaccgggaattgcccataatagcgtccaaggaagttttgtttgtgaaagtcggcacaagagacttaaagaaggaaggaaaagaaatacagtgcaacaatgatggaagtaatccttgggcttcgaattttaatgtaaccacagagggactacaaccatcgatggaacatcgtttcgctcctgaacaattcacaaatcggcaaaatccatttctattcttcacaaaagggtccattttcgagtcggaacaattacgactcgaacagagcttaaaagacatgtccaatcggatgacacgacccgaattagatttcactgacgttggactaatgaacataaatataactgaggaacacggggattcagtggccggaattttttcaattggtgaaattctggtagaaaatgcgcaagtcgaaggagaaaaactgagaaagaaagccgaagaaacaattgaaagaggaaaagcatggattgaggatcccattggaatcataaagtacattaaatggaccggcattacgatcgtcactatttaattcttgttggagtcgcggttctctttgtcaaaattaaaatctatacaacagcactcatggcaccgttgcgaattattcgttccatattcaattcaatcatcgggtgttttaccacggggaaggaattaaccgatcgaataagacaccccgtggtgatggaagtcgagctggaggagagggtcacaccatcagcacccactgaggaatgcatgctggaacagaaggcatatgtgttaaattatatgcctaaaatataccaagttcatcaaactgaacgaaaaaggaagagatgctatgtgaatttaaccataaacgggaaggacgtaagggcattatttgacactggcgcggatgtaacttatgttgggaattcgacggcaaataagtgccttctcaatgttcgccgaggggacttcccacaagcgagggcagccaataaaacagccataagattttttgggtcggccttggcacaaattaaaatcggaggtttcgagggaaagtttccgctgctcgtaagcgaggacgagtgttgtccatgtgccgccataattggaaccgacttaatggattacattacagaacaaggagaagaagaaattgggttaaatttcaaaagagactcagtccgaattggacactttcatcttcctatggtcgccgctgttaatatcgagaagaaaccaattgagataaggcttactaacatgcagaccctcccgccttttactgataccttcgttttgggtcaaataaaccgaagcttga

SEQ ID NO: 12729 - DNA, 1322 bp, Heterodera glycines
  unsure (1)..(1322): unsure at all n locations
ttaaaaactagagatcggaattttgagaaaatacggatcaggatcgggattacggactaggcacacatacggattacggacttacggactaaaaatccggaaaatccgtagtccgtaaaaatccgtatccaggaaaaatacggatccgtatacggttacggatttttttaaatttgtttcgtacaaattttgaatatttaaagctaaaagatttataataaatttattgtaaattctaggcaataaaattcaaaaaatactcaaatttgataacagactttcaccaaaaaaaagcaaacttgcgatttttaaccatttcatgaatttcgttgacaaatattcataaaaaatatctataattttgaaaaatttacaaaaccaagttcgtaaaaaatttaagaaatagaaaaacgaaattcatttcttgaaaaaatttacaaattggaaaaaaaaattaanatagaatttcgtaaaggttcaactaatgcaattcaataacgtaaggattttgagttttttgcacaaaaattttgcttttttccattttttcgatttttgccaaaaattttacgaaatagacccgccaattccaaagtattggcgaattgactgcacaaaatttaaaaatataatccatttcactttaaaaaagccaaaaaaaaaatccctaatccgtatcaagaattgtacggatcaggatcgggattacggactaggcacccatacggattacggatttacggattaaaaatccgtaaaatccgtagtccgtaaaaaatccgtattggccgaaaaaaatacggattacggactacggatccgtaaaaatccgtatacggatcccgtccgtatccgatctctattaaaaacagtaattcacataaatgcgagtttttgaaattataataaaatataaaaataaattcaacaaaaatacaaaaagattttgtgaccgacatttgggaaattcaaacaataaatacgagcttttttcatgttttaacggaaaagtgacttttaaaaggaaacaaaaaacgacaaaattaaatggataaataggagaaaggaatgtttgctgatatttacggataatttccgcggaaaaaaaccaatttaagatttatctacactgattaatgatcaattactagttaatggtctttcatttccagattctcagtatgaacagacagcacggggaattggactatgttggccaacatttggccaattttcaaaacaaaatctctctgacaatgtccaatgtgccaatgcatgaagctgtgctcgcggcacgcgttctgagcagcgtacaaacggta

SEQ ID NO: 12730 - DNA, 2724 bp, Heterodera glycines
caccgccggcagaaaatttcgaaattttgactatttcacatcactaaatttttcaaaaaattgagttttacccgaagaggagggaactgaaattagtgtatcataattagggctgcaattttatgtaaatacatattttttcttggattctccatgctctgaatagtaggaaaaacactttcttttttgtttttgcgaacaaaaatagggacttttatttacatattttgggatttttctacatattacatatgtacatatttttatacatattttggactttttcgcattttttcgtacataccgtattttctctaattaaggccccggggggattatttttcaacctctttagaaagggggacataattggagacagggcctttaatggagacggggggattatttttcaacagatttttaatgactagggccgcgacttttagtgatgaaaaatctcgaaatagttaataaaataatgtagagtagagcgggactgggaattttgagcaaaaccgggaccgggacctgagcttttcaaaatccgggaccgggaacagggacctcggatgaccgggaattcccggcccggtcccggtcccgctctactctaaaataatgacataaagccaaaattttttaatattttgctgacaaagtctgatttttaatgacgcatagtgacttcagaatcgaaaatttcaatacagaaatgcttttttgagctcctttcttcaaaataaaagcaaaaaaagttttcttgttatgaatttttaaatgtatgcatatttttagcgccctttcagaaaatttttatggggtgtaaaccagggttgccgcgggtcgagaaaaaatatcgggtcgggtttcgggtcgagaaaaatgtcgggtttcgggtaacccgcggcaactctggtgtaaactgtacaagtacctaaaaaaataaaccgcagccaagcggactcgaaccccagacccccgtctcataagacccctagggattaataattaaatttcaaaaaattgaaaacacatagcaccggggtgggttagattcggacttgagtaaagtaagtgatttttctgtattattttttcatgtttattaaacatttaaatgaatttcaatttagaattcattaaaattaatttttattaaaaataagatttaaaaaataataataattccatttatcccccggggggataaatagagacggggcgattatttttcaacatcctcagaaagggggacataattggagacagggcctttaatggagacagggccttaattagagaaaatacggtattttaattgaaattttaattaaaaaaaatattccaactttttctttcattttaagcatcctaaaaacccaaaaattaatcaattggtctttttttacaaattctgttaacaaatcgcattaaaaaatacaaaatttttcccggcggcgcctatcgcaccgccggccctccttgttccccaaaagtcttgagaaaaacgtgccgcgaaaaaagcggtgttgaaagcaaaaaaggtcattgatttacattaatttacatggccggagaccccttcgcaaaattggaaaattggccgctgatcccttgttttgcaataatctgaattttgaggtctacatctgaattttagtgttctttatcctgaatttgaaaaaaaacttggtcaccctcaatatacatatacttctgaacaattctaatgctaaaaaacaggcactcgcgcgaaaactgaataaaaattttgtatttgaaaaattttgtccaaaaatttttacgttggaaaattaccggtttttaccggtaccggtaccggtaccggtggaaaaagttggtaccggtaccggtaccggtttttgcattaccggtcagtaccggtaccggttttttaacaattaccgattaccgagcaactctaatataaagttaaattaaattaaatggacgcttcgcgaaaaagttgttgtgaggtcgggcgataatttgcattttgtcaccactcccccctcccaccgaaaatcccttcattccactaattgccttaattaaggacaatttcaatgaattgtacgcctttttgggaacccacaaattcgcacgacaaacgcatccaaaactgcagaaaatttggtgggacgttcatttttttgaggtcgaaaaaacgcaggggaacaggtgaaaatgaggaaaattagcgataaaaacatgaaaattcgaaatttaagctgggttttaagcccacttagcgcattggaaaagtacaaagtgcgcgaaaagtatccgttgccgccgacaatttgggacggacaacggaaaaatggcttctttagcgaaaatacggtgaaaatgaaccgatgaaaagcattggtatatttgggacacaatatcccatccccccatttcgcagatgacactgcttaatgagcaattcgcggaaagtcaatacttgcccccgcccgatatatgggcacttgcggaagccacaggcctttcggagacgcaaggtaattaataattaatgagttgatcaattaacacagtaattactgaatttattagtataagtaataaattaaaatagtactgggtaacagggatgttgcaaagagaaaaatgaaaagcgaaaccaaaataaaaagcgaaaaggcgaaagcgaaatgcccaaaaaagcgaaaaggcgaaattttttttcaaaaa

SEQ ID NO: 12731 - DNA, 3701 bp, Heterodera glycines
  unsure (1)..(3701): unsure at all n locations
agttggtagcatcnggcagaacaaatttaacaggcaaatcgctatttgagagtttcaagaaataacgcaaaattgaagaatttgccggttaccattggattttttaaattaattttgtaaattttcagaaagatccagaatggaaatggggcgaaatccccaaatccaacgggaaagggtcgaacaaagcggacggaagtgcatcgaggaaaaaggtggtggagaaaaacgcaataatttatcaatcgttaatatatcaaaaatggtcgttatcagagtcgatgggactattggtttggccgttggtcccgccaaaacaaagagaaggaaacggagggacggaccggcggtggcgaaaatggtctttcgttggaggacatcggcaacaacccggtcaaattcggcctttacatcggcccaagcaaaaccgaggccatttggtacggaaaatgaaatttttctttaatgggttggaagatttctctttctggaagtttgaatcatttaggctttttaattagagttccctttctaattgtagcatttcctcaaaaagttcggacagcggaaatggaccttctcttggcaccagccccacaatgtcattctcgccggtgcttacaattagcgaagagaatttggcctccgaattcgcaaaaggcaacgtaacaattgcggacagacgcccttcgaatgcaatgtgaatttttgagatgttaaaaaagttaaccaggaaattacaggatttccaaaaaatgctatcttttctttatggattgtttgacgcatttattatacacaaatatttagggacttcgaactgtttgaggagaaggcaaaagagaagcggtcgttgcgtctctcccgtgaccaattggacctgttgaacttgaactacgggtcgaacgacgcgcggttcagcatcacaacaaaatatcaggcaaaaattaagggggtgattagggattcaactgataaattcaaaaatgggattcaattcaatgcgcacagaaaggggtcatttttaattatgcattttgttttagggaactgcttggtgttcttgtcacatttatttgctcaaatggtatgacaaattggtcatctcggatatcgacggcacaatcacaaagagcgacgtgcttggccatgtcattccagcaattggtggcacttgggcccattccggggttgcagagctgtatactggcatcaaaaagaacgggtagaacattaaaaaaacaattgtttttagctagaataccgtcattcgccttttaagatatcaaatggtttatttgtcttcgcgtgccattggacagtcccactacacgaaaacgtacctgcagaacttcgcccaggggtccaggactttgcccgacggacccgtccttctctcgccttcttccgttctgatggcattcagaaagtactgtctcattatttacttacatttcacattgaattgtatatccagggaggtcattgaacggaaacccgaggagttcaaaatcgcatgtctcaccgacctgaaatcgctgttccccgtaggacagccattctttgccggatttggcaatcgcgaaacggtcggcagtttgacaaagggactaaactcactcactcccccctcccctttcaggacgttaaatcgtatcttgcggtccaaattcccccggaaaggatcatgattattgacccgcaagggtcgctcagaagggcggacaacaaagcgggtggttacgtgtccgattacccaaccttggccatggacagtgtcgactacgtgttcccgcctcgggtggacatggacggcatcgacattaggacgaaagaggacggcattttgaggtgggcaaatttccttcgtccggcttatctttttgagccttcaattacaccccctgatgaattcttttctcgtgcagtgaattcgtcgcatggcgaactgacgctgaacaattcgatgcgctggtggacgcggaattggaacagtacgaagaaaggagcaaacgagcgaaagcaattgtcgcggggacgacggatggacgaggggcggacggaaagaagaaaatgtataggaacggaagacgggcaaagtgatcagagcaaaattatggatgattaattgacgaccataataggcggaatgcgggagaccaaccactcttttgtttggtttatgtaattaactagcctttgtgtcaactgttcaaatggatttgtctcatatcattaaaatttaattgatgaagtcggtgcagcaattccaatatttgttcggtccctttcacttttgtgtttcatggaccattatttattatttttgaaattcatttattcaaaatatttgggttgtttttgttttgaccagtctcaaatggattgttgcgacttcacttcgtcacaaagtctccatcaaatgttgttttctcagtcaaagtccgaatggcttctcccgtgctgtcagaagcacaaatgtacaatttttctcatggaataataagttggaccaattaatttctctgattagcctttttgaccgaccattgcatttgcctcgtcgtcgatgagtccctccgttgttcagctgatgcgcctcgtgtcctccgttgctcaacgcttctcacccggatcagttcggttttgctgtacgttttcaatcccttttcaaacccacatttcgttgcccccttttcagcgagtttcgtgccttcccttccgactccgttctgtccctttgcctttcccattgcctccgctttttcgactttccctccgccgagtccattggctatcagtgcgtcgcccttttggtcaatttggtcgaattgcattccccaaattgcggtgtgtcccttaatttcgactttttcttctcctaattcgactgctttttcagtccattgccaaaatgtcgacaaaaactgcgcatggcttctctctgtcggccattcgttgtgcggtgcgcacaacgaaatgttcagcaaaatgcgcatcaaagcattggtattgccatttgctacactcattattggcacttaatttcctctctgttaaatttttaaattaaaatctttccgaaaatgccctcgccattctttttggggtcgttaaattcctgtccatactttgatctattttcggtacttttccattttgatgccacacccttcaaaaaagcaataaagctgttcaggatgcttataactagacttattttagggccataaatgcctaaagtgtgggttgggttcgaaattcgaatgggagaacaaatatctctccgtctttctgttttgaatttaatatgcatttcttacggctttgttgctctttttttttaatggggtgtggcatccatcaaaacggaaacgtaccggcgtttgtttggatgtttgacatttcccacattgatttgtgtccccttttctcagcactctctgctccattgcgcctccattgagggctctcttccgttccgcgaccgtttgttcaccgatttgttcgtttcgcgtctctttctccaaattggtcacgccccgctgaagcatttcggtcccaaattcacaaccattcatttcatttccctcaattatcttttcagatttccaaactgatcggttgacgattgtgccatttccgttcgcctgatcggacaggaaaggctanacttgcacatgaaatggatcgagcgacag

SEQ ID NO: 12732 - DNA, 2272 bp, Heterodera glycines
  unsure (1)..(2272): unsure at all n locations
ctaagtttggagctcgttgaagcatttgaggaagatgatgacaaaagcgccgaaaacgatggaaatgtgagtttagtgttaatattttgccacgggacagtacgcctcccaaaaagacaaaaaattcattaaaaaaattaaaggaattttagagatttgaaaggatttctgaaaaaatatttttcaaattttgtctctcttttttccaataaaaccctaaaaagagtaattccactgaatttactaattaatatatttaatttgccaaagtccttctttcagttgatggacttttcttctcgtattttcgcccttttgcttctttcgctgattcattcgtccgaattttgcggtatttttgggagtttctccccttcccccgcattttttgttaccattttcatattttcgactttcttctgtccaattgaaatgcaatgctctggtcgcttcgttggatgaccaatttgagctgtgtcaggcatggaaaatttatagaaccaaaattggaatttgaatgaattcaggacacagcgctcaaacttcttgaccaagttttctccgacccatttcaggacggaattgcatttgtttgtctttttatttttttctcattttcatataattttttagggctttgccgcttttttggaaagcacaaaaagggatttgctgttcgtcaatccgcacactccgcggcaccaattggctgtggaatatcggtcggttttgtcctatctcactcattctttgtgttttttctgattgctctttcttggcactttttgcatttctttacctttaattaggcaattagctagctaatcgctttgctcatttttcagtttacgttttgttctgccccgtctctccgccaatgttcgcctctctctcttcgccgaccttatcaaattgggggccaatgtctgtgaccaaatgttccacaattgcgacgatggaaatggcaccgaaaataatgttcctttttttaattcgcaattcttttttaaatgtttattcattttgtcttcagcccgaccttttccttctgctccaaattcggcctcaacttcacgccgttctttccgcacttttcgtcgcacttccgcacattttgtgtgacgaaaaggcaacaaaaaacaccgaaagtattgcatttttgaaaatatttaaaatgaatttatatttattctcaggtgtgccttcctcagtggacgctctcctctctctgtgccatcgctgtgtccgtgtggtgtcgccggtggtccattccctttcccccgagggctttttgccgtcttccgccgcccaattcaatgccaattttgaaggacgaccaaccgaagacagtaatcattttgaaattaatatttatttaaattctattttaagccttcagaaatgttcagctgttgtccaagacttgttggcgttcccacaaattcatttctcacattttttcccgaatcatcgaatgggtgggaaattaaaacatcattttctctctaaattcactgtccatttatttccccgtcagatgccctctcccaattcgctgtctaatgaccaactgaccaaaattggcgactatttttggcttcagctcaccgaatgccgccactgcggcgcttttgaagtcggataattaatcatttaaatgggcaatttgattgaccggtcacaaatcccgtctcttttaggccgctgccaatgcctttcgctctgtctgcgtgcgtttttggaaattttctttggactccgatcgttttccgtgttcacccgcccaatggctccaacaaattgtggacgctttgaccgggaaatgtttgcgcattcgctaattgggggtgtttaatttcgctaatgtcagtttgtgcccgccatttgtgtccctcccggcgaagtgcgggccttccccatttggtcaatgctttgctttgttcggagccgtccctgtgcccgaacagtcgccgatttgtgcactttgaccgcactttgagcacacttttggactgccgtgggttggccgaccgccgcttggagtcggcgccacggcactctatcggattgttttgtttttttttcaggttccattgtgtcaacgtgctccgtttgctgttctcccaagcccagcttgaagagcgcattttccctttcgtggaggaggcctttcggctgagcatcggcggatgctccgacgaattttggccggtgatgatttttttgttgtaaattggcatttttccaanatttgtttcccagttatccttca

SEQ ID NO: 12733 - DNA, 1045 bp, Heterodera glycines
  unsure (1)..(1045): unsure at all n locations
tattttaagtttacaaattaaacaacttcgctttaagaaagtccgttatcgaagccggctttgaatatttaagaaacattttcatggcgggcttttgttcctcaccagcaactgcttcatttgtttgggttggcttttttcatttaattaattccacttcctataaaaacacagcaaatcaaatgaccttcaattttaatttatattcaattaaaaataaataaataaaacaaaggaaagaaatttcgaaggttttgttgtttatttattttcttccaatgcttttaaatggtttcaaattttcaccgaaaattgtgccggaagatttttcctcctacagtaaccgaatgcccaaatatggtcatttggtttataaacttatcttttttggttggaccaactcaacttggaccaactcaacaagtaaagccaacttttaaaggcgtgccatttttctggccattttcagtgctttttcacttgcacggattattataatttaaaaatataaaagtatacatatgcgttcaacagaattaatgaattaattgtggcattgacaattttacgggggaggtaattattaaaataaaaatgaatatatatataataattccatggcttttcatgcattattttttgtttgtttttacatatatttttatttataatgtttgctagaatatactcacatatgcatatattacatataacatgttaatatacaaaaacttaaagcgtggctaccaccaagcaaatgaattaatagattaatgaactaattaaatgggtaatttgttttatttttttggtttgcgctgcatttccttgtgataatcgcccacctcacttaaaataaacggaaatataatacctaaatattttatataaatattttgtatgtttttatgtcactcaaataaattcatgtgaaattcatccttaggaatatttttgaattggcgccgctggaaaattttcaaaattttagcgagatttatgaacaaatgacttttaatattttttaaagtataataanatattt

SEQ ID NO: 12734 - DNA, 2438 bp, Heterodera glycines
  unsure (1)..(2438): unsure at all n locations
tgtgccaagaggacaaattggatttatttgtgacaagaaatggcattcaaattcgaagcttttgagggggcgtggcggcggcggactttttgccgaagccgccgctttttcctccattttctattaattccatcctcaaaaatattattatatatttttgagtccatttgttggccattatcttattgtcaaattttaagcgatttaaaagcgaaaagacgaagaaacgattaacattaatgagactcattttaaattaaatattcaattattttttgttaattttaatattcttcttaattgtttttgccttcacggaatagcaattctataaaaactgtgaaaacatttacctgctgttgtcccattgttttcacttttccgtccgacaaaaagtccttttttccaaaggcattcttttggccaatattttttgtcacttatcgactgctttttttctcaaaaatattttctttactgtaaaaatttattgtaactacaattttttatttttcgcataaaaatactcaaaaataaaattaaaaattgcaatttttttgttaaaaatttattaccaaattcctcttaaatttcaatgattttcccggcgggcatttcgccactgccggacccttacccattcagattttttttaaatacgataaaaattaaataattaatggacttgtgaactcaaattaatatttccacgaaaaaggaaaaaattcgcacaaatttattttaattttaatgtcaaatgctcactttcactgccaaatttgtaatggctgatcgagaatagctgtgggagctgaaaatgctgtgcgagcaatttacgtaaggggccaaatgaaggaaagggtggcaccaaaacaacaatcatccctccattggggttgtggtctagtggctaacaaataagacaacggatccacgtaaagggccccgagcggcggttcaaatccggccttccacaccaatttttcgtctaaataatacatacaaaaaaaaaattgggctaaaaaaaattgccggttttctgctgaaatttttagaaaattttgccgttttttgaactcgtgtgccggttttttgcattgcatcccttggcctttcccgcagcattccccctcttttccctcattttgtccctcttaatgatccatcataacttatgcatctgtcaatgccaatatgttttagtttttacattaaatctttttaccttattttgttttggcattttgcctcttttttcgtccttggttcgtcgcatatttttcgggagtctttccgcgtctccaacccaaaaattggattttgtgggcgacagacgtcggcgcccccgggggaagggaaggaatgctcaaatgcttatgcatattaagcgaactgctgggaatcagaagagggacaattgaaagagtggtgagcgaagaagaagctgatggaccaactcacagtcaaaattcaaaaaagtgatttttagttggaaagccaacttcttttaaactaattgactttcaaatgaatgaatattttgagatttttttaaatttaattttgaatgaaaagcaactgaataataaataataccaggggatctaatttgtacttttttatccatttggtttgaacttctatgatcaattttcaatgcctatttttgcctattttgccttttttagaaactattttcaggatttttggaaatatccttaataaaatgcaataaaaatgagaaatacaccccaaagaaataactgaaaaattttcagaaaatgctctaagaattgaaaaattttcttgataaaaagtcgttaatttaaaaaccttaaaatattttaattatttcatttaaattaatttgttgtttaagttttttatgtgttttgctacctaaaaggtttaataaaatgttttatttgcctatttttaagcctttttaatgccattttgcgattttttgtgcctaaaaatggaatccaaataaataaattaccaaatggacaaaagtcttttctgaaaaagcaattaaaagcaaaaattacgaaaataattattaaattttattcaatttaatataaatgtcaatttgttggaataacacaaaaagcgaaaaaataaatggtaaatggtttaagtaaaagttgatcaatttttttataaaagtttattattaaaaggagaaaaaaccgattgagttgaaaaactgaaataacaaaaacaaaaaaacaaatgttttttttctaaatttattgaatanaaaattgaaaattgaaatttgatttttttattacctagatatttgcttatcattattttttatgacgaacagcaatgccatcctttagaaaagctgtgtaaatttgcagcaaaattaatttcagttttgtttcaaattcacttccaattttaaacaaaagaaatgaataaat

SEQ ID NO: 12735 - DNA, 1939 bp, Heterodera glycines
ttatgatttagaaagattttgcttgtgcttcctttatttccctctttgcataaattaattaatttattgtcttccgcctaccgtagtaagtgatgttgtacagtcatgttactctgctgatgcttcgcgtggtcgacgtaattaccaaaacgtcggtgcaacagtccgccaaaatgttggtgggcgaaatgccaggagacattcaaattggcgcacttttcccaatgcatcgccaaattgccggctccgaggggtgcggtgccatttgggaacagtacggtaggtgtattagcggtatttgtaaattcaaaattcgaatttccatcgcagtgctgttaatattgggcggctcttttaggaattcaacgagccgaaattgccatgctaacggtgcagcagctgaacaaagtgttgccgtttcggcttgggattagcatccgcgactcgtgctggacagaacgaatcgccatggagcaggtcaccgctgttttcgctgccaagagcagaatcatttttaaaatgccaaaattaaaatggaaaaacattttttaaaatataaaatgtttccctgcagaccatcgcctttctgcgcgagggggtcacccaatgttcgtgctgccaaatggccggctgtcagaagaagtcgagccccgtagtggccatcgtcgggccggcgaagtcgtccacaacaattgcggtgcagaatctgctccaggtgttccgcattccgcagattggctactcggcaacgaccacggatttgagtgacaaggagcagttcggatactatctgaggtgcaaaatgctcgaattttcatgacaaatcccaaaaagatgggttttggaaagcattagttgaaaggatgggattatatctattggggagacataaatattgaacaaattaattcataaaagtgaatttttggttacgaaaaaagcaaatacctgtgcaggtacgtacagaggtcaagcgaggaattcagcatgtcaaatgcagccttttttttcaaaatgacgaccgaactttaaaaaaagtcattattagtgatgtaattttttgaatataattatttgtttaataattacaaataattattcagagttgttccatctgatgcttggcaagcaatggcaattaatcagttgctaatgcacttcaattggacatacatcgccgttgtgtacagtgccggtgaaaaattattattgaaactgtctaattacctttaattacacttcaaaattttaaggaaattatggagagaagggttttgaagcgatggaacgtctgacgcgcaacggcggaagcgaagtttgtattgcgcacgcacagaaagtgaagagtttaggggagccgacggagtacagaaacgcacttttggcactgaatcggctaactccacgcccccaagtggtgggcacggcaaaattggagaaactgggagggaaaagcacaaaattaacaaaaattaagggataaagcacagtttaaatgccaaaaatgaaataattaatgtttacagattgtgtgtttttgcgaagggatggcactgaaaagaatgtttttggcacaaaaggcacttcgccaagaagcggcgaccgaagcagcggaagggacggaaaacggaaataacacaacgaaaagccgagtgaaaggacgccgaaaactgagacagcagcagcaacaacaacagtaccatcatcagaatgtgaatgcattccaatggatcggaagcgacggatgggccgaccgattggacgtggtacggtaggacacggttgggtaacagtcggacagttttgggttactgttggactggctttaagcagacattaagtatttgcccaattgaatgttcggataaattttttccctttaatgtggcaacgaatctagtcacttctcggatcaaacattcaatgccgccgacttaaa

SEQ ID NO: 12736 - DNA, 4740 bp, Heterodera glycines
  unsure (1)..(4740): unsure at all n locations
ttttcatttcatttttagaggggaaataaattaagacttaaggtcacctcccttccacggggaaacgttttatttgatttattattacaaacancgaaaatctatgaataatgttatagttgaccccccatttgttaatagtgaccataatgcattcaattcagcataaattancaggttaatagaaatgcttcaaaaaaattttataattcaaaaaagcaaattatttgaaaataaatgccatactctcaatggttgattggaatttattttnttctgattgccctgatatcgagcttatntacctaaaatttatgtttttcctaaataatntgataaggaattatgtacccatacaaacaacaaataaagttgaaaaactgcccgaacatgttttgaaattaatcatttatcgtaaacagctttggaaggaccttcataaagaccatataaaaatcaaatttttagaagtttcaaaaaaaatcgatgtagaaataaataaattttataaaaatcgtgaaaataagtttttgcggaccttagactctaaaaaacattttcaatttataaattctttccttaaaattaaaaatactatgatacctgcatttactgataaaaatggtctgatcctcttctcagataaggaaaagtcgaatgcattagcgcaacaatttttttccgtttttacagatcaaaatttagaacaatttcaatgcctagaaaatactgaaaaaaacatcgaatattttaacataaccccatatgaaatttatttctctctttccaaactttcaaatgctaacaacacttgtattgatggaattcccaacatttttttgaaaaattgtaaagaaaatttagtccgaccacttttccatatttttagtttctcattgatgactgcccaaattccagaaatatggaaaaagtcaattatttgccctgtcccaaaaattcaaaatccggtaaacccagtcgactttcgtccgatttctctgctttgttctgtttccaaaattttggaagaaaatatagcaggaaaaataaaaaattttgttgaaaaaaataatttgttaccaaattgccaacatggttttcgtaaagcacattctgttaccactcaacttcttgaagtggtggatgattttagttttgctttagaaaataaaaaatcaattgatgtaatttattttgatttagctaaagcattcgacacggttccacataaccggctaatatctaagctaaaaagcattggtataaataattccttattaaaatggattcaaaattacttagaaaaccgaaagtttttcgtcaaaatcgggtctgatttctctgacgaatatccctgtctcagtggtgtgccgcaaggctcaatattgggaccactgttatttcttatttacatttacgatttaccaaaattctgcgaaactgaaaatgttaaaattaaactatttgccgatgatcttaaggcctatcatgttctttcaaatatttccttttctccactccaaaattttattaacaaatttaatcgatactgtaaattaaacggccttaaaatcgcttcaaataaatgtttaactttacatttaggacacaaaaaccaaaaaataaattattttattgatgactttcaaattcctaaaaatcccggaaacgaaccagtcagagaccttggcatttattttactaatgatttgaaatgggcacaacatattgacattatctcgaaaaaagcattacgatctgctttcgctatactaaagtcaatcaaaactcgtgatacgaaaatacttgtaaatttgtttaatatttattgcagaccaattttagaattcggatctccaattttcaatccttatttaaaaaaggatatagaaaaattggagaatgttcaaaaaacttttttgagagtaatatttagacgtaacaattatactgttgatttacctaattatgctgaattgttaaacatttatgatcaaaagtcgcttgagagtcgtaggttaaaaatagacttaaaactttttcatgaaataattttaggtaaaataaatttacaaaataatgaatccttttctttttccaaaacccctgtaaaaaatgaattcattataagaacagcttattgctcaaccaatgttagatacaactcgttctttattcgaacctctcgtctctatagacttttacctaaagagacgagattactaaatccaaatgagtttgccaaacttcttgaaagatctgatcttaatttgttgatttctttgccaccccaactccaaaagtgaccaattgattgttttgatattattatttcattatttctttatttttcggcgtcacgcttttgcgtataaatgattgattgattgattgatagttaaatttgattaatttttttttaaattaatatttttaagttatttgaattaagcccgttcttttaattgttttactttcacaacatttgacgccacatatatcatcattttgacaaaaattgcctaaggacaaaacgccaaaaaaccccactaatttaaaaattttgccgagattttcccttgtaaaaatggaagagccgatctcgagttagaaaatatactttcaaaaaacaaaatagaattcgatagatggggtcaaaaaactagcctaggcaaaatttcaagaaaatctgacccgaggaaaatttttttgaccctagtgaaaatttcaataaatttctatcatttttaagctaaaaatggtcttgacgcgcaaaaaaagcgaaaatttaaagagtatgagcaattctggtgtagacgcaagacgaaaacggaaggaatggcgccgggatctgggtcgcagtgttggttcaacaccaaaaagtggcgaaattttgataaaaatttcatttcaattaaaaatcaaatttttacaggtccacgacaaaccacaaaagctccatcaacaaccggagagggaacatcgaccgagacaatgccatcgacttcgaatgccgagccccgtaagtgcaaaaatcacaatttttgagataattttcattttaaggccaacggccaagtccacggccactttcaacaacgccgatcaggcgtcatgtccgcacgcggccaacaactaccgaccaaacaaccggcaccgattttcgagcaacagtccagtcaacccaaacggttttagaaaccgccgatggtgccacccagacagaaacaggtaaaatcagtgatcagattttctaataaattttatcccccataatttcattttcagagcaagggccaattcaaaggctgtgcacggagctgaacaaggcgaaacgcagaattgggacgctggaacgacagctgcagaagaaaactgaagaggtgaacctgctcaaaaagcgaccagcagtggaaaacaagggcaaactcaagagggtcagttcattggacgatttgtcaagacgaagccgcacaaaacgtgctaaggaaatagcgcggaacctcagccatctcttccgacccggtcgattacttcctaattcttatttttataatatgtttgattagatttgatcagttgggaataaaagatttttgaatttggcgccttcgtttcaatactcattttttttataatgatacgcatttttattaaaaatgatgttatatgccgcaatttgttaacggattttgaaataaaatcgcttcaataaatttttttaaatcgcgcggtcgcggatcgcgtcccagctctgtcattaacgtttttaattttaataattagactttctttgtttaaaacaacctttatcaatatcattttaaaacctttatcaatatcatcacaataaaattaacgatttagcaaagagttgtgttcggaatttttcgaaataacagtaaaaaaatactaaaaccttttggagagtatttgtaaaaaaaaactatagatattttccatgaaaaattcctaatcacaactcatacaattttaaatttaattttaacatttcatctgaacagaatatgtgtcaccttaacagttcgtctcaacagactatgtcatctcctctcctcccttaaatcacgcttctacactacacatcgtcgtttgccttgtcaacttctattcaaaatggaaggtaatataatttatcaactcagaagcaatactatcgatagtaggatttttgaaaaaataataataaaaatttcgggataagcttgatttaggggttttcagggacaggaaaacagattctgacatatatttcggcccaatcgaactccgaaagcggatttgaacaaaatttcgaaaatttttaaattcaaatttaccctaaaattgcttcaaatgttcaaaagagaaacaaaatctacgtcatacaattagctatgaattttttgaaaaaataaatttcatttttttgtttgaatccggttctgggttcgatttgggccgaaatggatttcaggctttccgaccctggaaatcccataaacgagttaaattttttaataaaacaaagggttcacctttggtttttaacaggggccggcaatggtaaagttttgtggtttcctcggaaaataaatttaaaaatttaagaagaacgttttctaaatttgttacgaaaattaattataaaatccaaacattttgtttgggggggattgaaaagtttttccattattcgctggaaaattttttgaaagtttcatttcggagggggggggg

SEQ ID NO: 12737 - DNA, 3428 bp, Heterodera glycines
tgtcgcttcgcttcctcttttgacgcaacaacagcgtttgtattattattgcgagcggcgaaacagccatgcctgcacgaaatcaatgtaagttcatgttagcttttcaagtgagaatatttttaattgtttttttaagccgggcaaaacgactcgggcatggccaattcgaagtttgtatgcgccaacatcatactaaccatttctgaggtaaaccattcattatgattggtgagagggttgtcgccgctggcgactgaacgcgtagaaattggaggacagcccggaggaccgctcggaggaaagaaataaggaagtccagaagaggaccggaagaacattctcgaatgttccctcgtgactctcatctttgcatttccataatattatttcgtcctttgattgtgcgctattccgacaaataaactacttgtctaagaagttttttgttccgaaggtgttcctttttctctacggtctcgacattccaggaactcagagttccatgtttgcagttgtctaaactattgtcccgaagtccaccaggacagtccaactaagtctaaaggggctgtccattccacaagtcccattccaagagcggaaaccacgtcaagcgtagccagacagtgcactatttcctttctttttctcaccccttccctttcccacaaacaatgctgctgtacagctagcgcacggctgcttactgtctgcccttccacccgccgcagcctcacgtagacagataagtacactatttcttccttctctctagtggctatgcggaagaatccgggaagaatctgcctgctggctacgctttgaaaaatttcgacccaaaagggggacccaaacccgactagtaccggtgagagcgattctctaccactaattccttcagattaaaattgtctcacaaaaatactacaagttggctaatgttgattaaaaaaaattcaaactttggccccaaaacggaaaagtaccgaatttttaactaaaaacaacgtgaaaaatgaacttgcgctttttaagtgccgaggggcaaagggaaggatgggaaactcataggggggagaggggggggggcactccctaagagcgcaaatgaccaactcgaaatggcatttaaaaagatggaaatcacagagatatgaaggaaaacataaaaatcatctccatatttcgcgattttattttttgtttccatattttggtacccctatttattaattataatgcatccctatgagttcaaattggacgcgatactcggaaaatcggagttacccattgagaaaatagaaaatcacgcgtggaatccggaggaccggtcgttgaatttgtacgtgacgtgctgacgatgcaccgacatccggtggcccaaagcacagacggaatgcgggaaaaagtgagggagggacaaagggacaaaaacgccggggaagaaacagtcattttgatggataattagttaactaatagttaattaaatattaatgggaaatgaaacggaaaccaaaaaagggaaagtggggatcgaaccattaatagcggtcactttcaaattggtgcctttgtaccctctcggctctgccaatgctttcgtctcttaaggttggctacacgcgcggcttccacgtctggcagctgaattggccggtcaaccaacgcggcacccacgcggtcgtcggcgtggccaccaaagacgcgccgctgcacgccccgggctatgtgtcactgattggggcggacgcggagggcttcggctggaacattggtgggcaaattgcgcaatttgtgccacaaaaacgctgaaaatgccaattccgtcgccagtggagaacaaatgctaccacgacgcacagaacacaaagccatggtccttcccttatgagcagccattcgtcgcgccggagaagcttttctgcgtgttggacatggacgagggccaattggccttcgccaccgactccaaatatttgggcgtcgccttccgcggcctcaaaggcaaaaaactgtacccggccgtcagtgcggtgtggggacactgcgaaatcactctcagatatttgggcggattggaccgtaagtccacaaggattaaatttattggcaaaaaatacaatttaaatctttttagcagaaccacgacagttgatggatatctgtcggagatcgatacgactaagtgttggaaaagcaagaatcgaacgcatttctgagcttaacctaccaccaagccttagacattacctcttgtacaaataatttggcattttatacaacaaaaaaattcacccgtaaaatatctatcaatgggaaaagcaaatgcgaaaaaagccaatattgtgtataaacaaagatatcaacaacaacaatataaaattatggtgttttaatccgtcgcttgcgttgttcaaggcggtgcagtctgttccgcgctctctccgcacgtcggccttcctcggcgcgtttgtaggaaccgaaccaatccccgtagccgaagaagctggtgatgtattcggcgaactcgaagagcatcgaaatctgaaaagggaatagaaagaaagagagaggagagagagagccaatattacctggccaacaatgggaatgagtttgacgaaagaaagggccaaataaaagagccaaatgaaagtgattggaaacagcgagagaacggacaaagcggaaccgattgggaggagaacgacgaacagacagatcttctgacaatgagagtgagtgaacaatgattaaggggtggaataaatggcctattacgactaaaacggagtttatctgtgtgcgtttggcgaaatatgccggcactccaaaattgacactcaacgggagaaacacctaaaagaggagaaattggaggggaaatgagggaatgttcggatgaaactcaaataaagaatgaggaacatcgacggagtgatgaacaaagtggtaatagctcccatcatcacgaagaacttcaacggatagagggccttcaggatatcctcgtagccgggcttgcatctttttactaaaattgggcagtcggaattatttccaaatcgatgagtgactccgttcacccagaaaatgcatccagctgatgtcgtccttgccgcaaccccaacagaaccacgtgttgcattgcaaattgggacagcgtacatagttacagccaattttctgcgcgtagatttcctgcaatgggaagggattttacaaaaatggtattccctcgttcgattcgttttttttactccgcagcccgggcattgtctcgcgttcttttcttcaaagtcagcgccaaaagctttgataattaaatccgcttcttcctccaaattggtaattgtctcattctcaacactgacgacggaagtcaattcattcaaattcgatccatttcccatcgtaga

SEQ ID NO: 12738 - DNA, 1358 bp, Heterodera glycines
  unsure (1)..(1358): unsure at all n locations
agattattatcatgtgaagagaatttctgtccctttatgttcggatggattaacatttaccttttcttccacaccgccttttcgttgtgagttggggaaggccattctgatttatttgagtgtaaactgaactgaagaggtatttttagctagattttccttatttgtgatattaacttgaattcttcaaattggagtttagcggtataccgacatcgcgttttattttaaaaaccaaaacctttttaaatatctttcaagtcggaaacgttaaattgaaatatgtgtttgtttttcattctaagagttattaaacattttataaaggttaatttcatcttcaaattttcagttcttcaaataaaatcatacataagattagtttgataatttgttcaaattctttagataaatttgaaaagtacgtatacaaagttacccgtgaacgatttggcaaaatgaaggcttacattgacaatgaattgaaggaagccatcgagttccgcaaggttagcaagtttattacaaagccataaacgctcacaacaaactgttaaaaacaaacattgtcgtgcgaaatttttgctgcagcattaagaaaccgagcaaaaataaatggtaaattttaagacttcaaaggagcaggccgactcgttgaaagcagtgcatgaaaactttcccacaattttccaagagaatttggcgctgcaacttgaagcgacctaccgaaaaaatgtggactacgcctggcaagagatgaagcgtcggttggattacctgcaggaagtgcaagcaatcaaagaccgattcagcaaggaaatgatggtcaaactgatcactgatggcgtaagtaccgacattcttactacaaatcccccccccccccccccctctttgcttaattttcattctttatttttttaaatcatagattggttttaagcttttaattttgaaaacaaactcatgtccccgattgaatcgaattcctttaggtacgaaaacaaattgaaatgaatgagggcggaattcgcgacaaatatttggaccaatgtatcgaacaacttcgcgttctgtcagcgaaataggatttaatttggatactttaattataatagaaagagaaagacagccatttctatgcacaatttgttgtaatagggaaaattcatttgtttggtttgactatgactataaagccgaccgattaaaattgcttcttttgtttagattgattgctctctgattgataattaatacatataaaaaatataatgaaatgngtacttttcggctatgcatattcgaaggaaaattttcagctttctgtactttttgattcaatatatagctcatta

SEQ ID NO: 12739 - DNA, 3383 bp, Heterodera glycines
tgcccctcaagatcgttccatacttctcgatggttggaatgccgtgctgaacgagtctttgctgccgttattcaatcagaaaatgaatatggccgagacgtccgacagcaaacggttcaaacaattgcgcgaccttttgtccggcaaaatttcggagaatggccgttgcgatgtcattcttgctcaagcaaaggcattcttcgattttgaaaaatgggcaatcctactgaagaatgggtttttctaatgcaacattttttgatttcggctcaaaatcatttttgccgggatttttgagggtgttgattactaattcggaactcggatttgctcattcgaacccctggcccgaattcaaacaaaaaaaaaagagaaataattgaagcattgttttgcacctaaataaaaaaattgttaaacaaattcgaagccacttttctgcacaaaaatgcatctttgaggaaaaattttcaacttttttgttcgaattccggtccggggttcggacttggacaaatccgagtttcggttcgtgatccgcgctcacgaaaaatacccaaatactcattttaagctcaaaaaaaaaattaaataagaaacccccattcttcgggattgccgaaaaatgtttcaacaattttaaaacccccatttcgtaggaccatttgaatgaatttctcttcggcgttttggacggcaacggcggcggcaaaccctgtgaagatgaggcggagcttatgcgtcaaattgagcaattagaggaggaaatcatccgtctgagggctactcttgagacttagcagcgtcgatcattggaaataaattgttttaggggttaccagggtcggagtatccgattctgacatcaattttcgatcaatttcgaaccacagaaccggattcgaacaagattcaaattcacaaatttttttattcaaaaaagggaggggggtaccctcgacagtattaccatggtctcagttcaaaaatattgccgcttttgtaatttttatttcatttttcttttccgattgcatcataattgtctcctttccctccgagtgccaccgatatcttcagttcttctggatgtcattgacaaattaataaaacatttaaagcgaacccaatttatttaatttgtgttgcattcatctcttaattatctacaagcaaaatttaagaaatttttttccccataactttttttagtctattactttttgaaattttgtatatggatagagaataattggggctattgaataataccaagaacgttcataatgtttatcaaaaacatgacacacataattgtgtcacactaaactcaaataacaaacactaatgtttatcaaaaacatgacacacataattgtgtcacactaaactcaaattaacgaacactaatgtttatcaaaaacatgacacacataattgtgtcacactaaactcaaataacgaacactaatgtttatcaaaaacatgacacacataattgtgtcacactaaactcaaataacgaacactaatgttttatcaaagacatgacacacataattgtgtcacactaaactcaaacaacaaacactaatgttttatcaaagacatgacacactaaagtcacagaactgacactaattcgctaaaatattaaacaaattctgatcataacgcttcccaacccacttacaaatgatcgaccatccaaagctgaaatagtgcattcctcgagagtaagaaaaaagtcaatggcttccaaaactacgcaatgaaatcacatccaattgtaatccaacacgttcatacaataagtcctttcttcatctattggatttcttttcagtctgagcatgctgttgaatgatggctgacctgcagtcatcacaaaaaaaaaaatattgccgaagcggcagaatagctaaattacaaaaattatacaacaacagaaaacaatgcatgtaaatagacaaataacaacatcaacttcttctttcatgcaaagaatacaaaactaaaaaaccaaacaaacgaagactaaaaataacaaccatacaatcatatccgaaaattagaaaaactaaaacaaaaagctacgctgttcttttccttaatcttttacataaacagaaacaaaaacttttcatatgctaataacaaaacaatagaaactatgaatataagaaacaaaaaaaaaaagaaatttttaactgtgcttttgcaaaaatcaaaaactgacaaaacaaatatgtaaaaacgaaaaccaaacatttctttttttcaaattcatttataacgcaaaacaattacaaaacgccacgccaattcaaagcatggcggatacagacactcaactttattaaataggatatttttaaactatttttttattattcaaatattaaaaaatcttggtaaataaaatctcgctggattacaaagattaaaattatttctatttaaaattattttctattattttatattaattttgcctaaattcttattcagataaattagtcgacattgacaaaagttagatattttttttgtcgaaaaacagtacaagtcggtgcagtatgagttggttataaaatttgtattaaaatttaaagaaatttcctgttcacgcacgtgaacggattcggaattggttgactgttaaataggtcaatgtggctttttttttgaaatgagtttttgaggcatttttaattttgataaattggcattatgtttttgacaatcattcaacttttctccgcgctaacaaaaatctttaattttcttttcttccaacaaaattttgtttttttttcatggaaaatgaattatgtattttatgtttgtattagagaccgagatttccaaaagtgccggaccggaccggtctgatattttcagaagcaaccggtttccgggcccggcctccgaaaaaccggtgaaacaggaattttccctaaaatcgccgaaccggtttccgggcccggtaaaaaccgggccaggtccggctcggtctctagtttttatgcacaaattttgttttgtttcatttttggggtgatttgtgcatttaattataaaaccttttattaagataaaaattgttttcatctcttatttatttccgcctcgccctccataaaaatggaattaacgccagaatcagacaaaaacagtgaaaaagaaaaactcaaaaagtccaagttggcagaactccaatttgaggagttcggattcacttgcaatggactgaccaaaatgtgtaagaaaaattcagttcttttcggctctaaatgcacttaaagtctattataggttttcatggtcgcagaatacgaatgtgacaccgattttgacccgtttcgaatccctgacctgaa

SEQ ID NO: 12740 - DNA, 3441 bp, Heterodera glycines
caatcagacaaaacaaacgaatataataaaaatgcttaaacaaagcgctttataaatccaaaatagccgtaaaataataaagccaaaagtactaattttaaattaaatgtaattattcttcatataaaaaacaaaaaacaattatttatagagtaattttaaaaggaatattaattcaaattcatcataaattttagtgtacacagaatattaatttttattttgtacgagaaatgattattaatttaaatgaaataaaaaatatgattacaattaatacacggtcgaaccatgaccaaaaaatctttaataattaataaggaaattaaatttaatgagacgcctgaatttaaatatgtaataaagcgcgattgaatacaatcaaatcattacgcgaccaattgacgatagaaattacacaagatttaaaaaataaaatatttaatatggccattaacaagaaacattataaaaactcaaaaagtattttattaataataaacatttaaaattgttttatttatttaaattttctgtttcttagcacaaagctatattccttataatttaatcatacataatactattggcctttgctagacttttaataatacatatttgggaaataattgaaaccaagtaaaataaaaaaagctaattattagtaaacatatcgacttatatatattcattatccattattaataaattttataaaattctcaatctgaaaaatattgagcaacgatttaattaattttacaatgtgttaatcaacttaagataatctataccactaatttatgtacaaattctattttattaaataaatgaactttcaaaaataataaaatcacataaatttttgtgtctaaaaattaacaaaattatatacatgtttaatagattaaattccggcaattcctaagacctttttcattaaatttttttaaacaaaaataaaattaaagcatattttcaaactagataaaataaaaataaatattttacgaataaacatatcattttgctatacaataggaattcgttaatcatttaatgcacgattgattatcgatttaatgatcttaaagatataataaataattaaacaataccaataatatcaaaggaaaatatcgcgcattatttaaaataaaaactggttagctttattaatacattaaattttgtaaagatgtaatattatcatagttaatttaaaaacaatcataaacattgtaatgttgacaaaaactgcataaggaaataatataaattaatattaaaaaaagaatttgaacattttcaaactatttagaacaactaaatcgctccaacagacatttatgtgcgttaatttatgacaattaaaacatatgtatttatatgaaataatttgaatttatagcgaaaattaattaaaggtaaattgcttaaattaaaatatttaaaataaatgattcgaaaaactaaaatattaaacaaatgtattaaattaatggaaaatagtagaaattaatttttgaaaaaataaaattttaatttgccaataatataagtgcatttcattaaaatatatcattcagttttttgcgtgaaaaagaatctaattaacattttttcagaagttaaaaaaggaaataaacataatacaattaaaacaaaataaaaaaacaaataatacaaaacttaaacgaaattttataaaatatttgaaaaatttgtttcagctttattattaaaagttgaaataaattaataatttatttataattttaaaagatcctatacatccattcctaaacggaaacgggagaacggccgagaattaaaaaaaaattaatagattaaatgatgataaagcattaaataaatatacaatataaaggaaataattattttatttgcaaaatgtcaaaaagttagtatattttatttttaatataataatttatttaataataattagtacaaattcgacttttttatgaaaataagaaatcatgaaatatatttttttttaaaataaatcaaatttaaaacaagaaggttaattaaattttcaaaaaataatataaattaaaaatcgtgatgagatatttgcgccgcgccatttgcgccgcacagcaaaagtggacacttgcgccgctcagcaaagtcgacacttgcgccacgtcatttgcgccgcagacagttgcgccgcggatatctgcgccgctccatttgcgccgcgaaatttgcgccgcccagcaaaaatggacttttgcgccgcgctgtcaaaaatattatattcacaaaaattccactattatcaataagttttactaaaactataaaccatcgacaaaaataactaattgaaaattcgaaaaaattactagtcacaaagattgacattcaatttttaaccattaaaatcttaacattgaataggttcatcaaaaaagatatattccatataatttaataatcattattggcatgaaatttgatttttagtataaatttatttcttaaaaaatataaatttatattttataattgaaaacgcaattaattcttaaataataagttaaaaattattttgtcatttactagttacaaatcaacataaaattaattaaataataattttttataaatttctatggaaaattttatttattttttctctaatatatgccagtctccattaatctgccagaaattatctacccctttcgcactaggttgaaaaataatctctcagtctctatttatctacgttgaaaaataatgtaccatggcatataattagaaaaatacggtataccttataaagaaaatattaattaagtaaatattttaaatcacacttaaatatcaaagtcaaatttattagacattttattatcaaataaatagttgttttccccttaatgactacttgatcttttttccttgatttaattacgataataaacaaaagtttatcttaagttaaatttaaaaaatgataaaaagcattaaaaactaattttgtaatgggcaatgatttaaaaggaactgctatcaacaagtgaattagaatattaatacaacatataaaataagttaaataatttagtcaagaaataaaattttcaaatatttaaataaatttgagacaagaaaggataaaaacaacaaacacatttatataagaaaatttatatatgtaaaataaataaaaagtttataggtaattaaagagaattaaataatgacctcgaaaaatcaaaagtaaaaaaatgtatataccataaatttttaaaatatgttttatgtaaaaatcaaaatcacagcttaacatggttcgtgcgtctttacacaaatacttttgcattattaacaactggggacggccaagaaggcgatcattgcccgtgcaaacgaagatccaattatataaatattata

SEQ ID NO: 12741 - DNA, 1128 bp, Heterodera glycines
ctattttagtgtaaataatacaacgagatagttggccacccccgataaaattgtggaaaatttgaataattctgtaaatcggaccacgggggtgaaaccaagtgcagtgacattcaaaaaggcaccgccactgtggcacaggttatataaggaagccgatatacccaattcatcaactacctcctcaattaaacgagcaaaaaataacaacaacaacaaatataaactgggcgacactgtacgcataagcaaggagaaaggagagtttacaaaaggctattaccccaactttattgacgagctattcaaaattgtccaggttaaaccaaccaatcctccctcatagaattcgcgatttacaaggtgaagagattaagggtgtcttttacaaacaggagttggtaaaaaccagtgagaaggacaaacccaccgggttgaagtgttaaaatcgcggacccgaaaaggattaaagaacaccttgtccgctggatagggcattccgatcagcataaaaagtggattcgggacgctgatcttgtaaaagagcgcaaagctaaataaaaaatggatgaattttatgtggtactacgatccaattcacctggaccagggaactcgacctcaaaattcactgtcaggcttccacacacgcttgagctggacgcaaactggatggtggcactttcatcaattatatacccatattcatttccatccgtcggaattgatgatgacgacttcattagcattaaacttgtaaatccaaattttacattcgcggatgacaaacgttttgtggatattgaactaaaaataccgagcatgcaattctctagtgttggccatttaaggcaaacattaaatgacataatcaaggatgcatataaacaacggtttgggctctcaccacagaaggccgccggaacaacggttaaagcgaaacgccaaattgacgttacggaccttttttttcacgatcaccctggtgattattgggaaaaaattgaagagttggaaaaaaagttggctgaattaaaagaggagattgcgacgaaggagagggaacatggtgccaaaggtacagagcagaaaagaaaaaggaacttgaaggtgagttgcaaattttaa

SEQ ID NO: 12742 - DNA, 2713 bp, Heterodera glycines
  unsure (1)..(2713): unsure at all n locations
acactgaaattcataattagtattttttactaaatccttttaaaaaatctttaattataaaatcatcatacaaaatacctttcattgcgcgccataaataccggaactcaccgcctgaattcattatttttagaaagtccaaattaatttataaatactttaatcatttaaaataaatttaagtgaatacttattggaataattgctttgagttttgcaatttttatattcataaaactcatggttcgactttggaaactgaatagaaaaaattgagaaaaactaaaaatcctttcaagtaagttctaagaaaaaatatcaaaaataaatttattaaatataaatttgcaaataattcgaaataaataaaaataatagcaaaaattcaaataattcattgttttttgcattagaaatagttattaacacaaaaacggctcccggacttttcgacagaggacttttcgacagaggacttttcgacagaaggacttttcgacagcaaaggacatttcgacagtaaaggacttttcgacagaaacacaaaaaatagtggacttttcgacagtaaacataaaaacaaataatttttattaaaataaattatattgcttgttagttttactaaatttcttttaaattaacatactataatatgtattgctaaatcattattactagggctaatatttttaggttttaacctaattttttcctgactctcattgacctgaaacgcacgaaaaaatgtttttttttggttgttgttaagcaatttttcgatttcttagcatctattttctagatttttattttttagaactttaaattaataaatttttgcaaaaaacttatgaatcaaaaggtaataaaaacgaaaaagacaccccctaaaagtcgatcaaaaatttcaaaaaatacatcttaagaaatggaatattttaaaaaaatcatctccatttatttgtttacattcttgaaaagaatttttgaatttaaaaattatgtatctcaataattatttgacttaatttgttgcttttggataaaattttaagattttacacccctaaatttgaaacttaattacattttactgtcgaaaagtccactgtcgaaaagtcccctccttaaatttaaaatatttctgtcgaaaagtcctttgctgtcgaaaagtccttctgtcgaaaagtccggcgcccaattaatcactctccctaactgttcatctcttcctctctatttctcttctctttatgtagcctctctctcctcgagctgtccctctcacttgttcaaatactttctgtatatttccattttactattttatgtatgctttcagaaattaatgcataaaaatgttcatggcatcggtttntttccgcccgttcgcggtccaataatgttacctgcattattagacccccagggcacccaacgaggagggtggcagtggaaaaaccggaaaaaccatgtgccccacttacctgggtcgcccgatgaacttccgacaggcaagtcgaagagcctctttataggagcgttctttgcagtgagcctgcgaaaaagaaagaacccccccccccacctcccacccacgaaggacccttccaatatccgccacaccgacctgacattttcagtcccgatgtggcggagcacctgcccgtgccgctcagggcgccttctgccccatcagctcctccaacagcgccacatccccatccgacacgtccaccgacggccccatctcctgcagcatctccgcctgcgcggccgccaactcctcttcactcatcaaaccctccagccctcccgtctccaactcctcctcccccacggcggccgcagcctcctccaacgcctcctcaatgcccaccagtggctcccactgccgcgtccctcctggggcctccgccagctggccctgcgggcccgccggccgtcgatgccgaggagctcggcccttcctcgttccggatgaccaccttcaccttaatggtggtcccccccctttaccaccccacccccatcccgcacctggcaaatcaggcgctgggccttcttctttatgctctccacgctcctgggggaccaccccttcttcttgccttcggcaacgaacacgaccgccagcttggccagccgggccttatcctggccgaactccccgccaatcgtcttctagtgcaaattaagtaaggaaccgatgcttcttcacgcacaaactttagaaacccctcctcctcgcccgtccaacgcgtcccgcacaggccgccgcccgtacttggcacaaatcgggctgtggtcgggctttgctcaccttttttgggcattttatagaattgctataagtcatgattaagtaaggaaccgatgttcatgcaacgagctatttccaagcctatacttatgcacaaacccctcaccagtccgcagaagcatcaccccggattgttggggtgataagtcattcaaacgtgcgtgtttctcaagttcacgtttttccatacatacgccattaagttaggaaccgatgttcatgcaacgagctatatgggggttagcgaggctgctgagcacgaatctggcatcctttttgccatctgttcgaccattgtaagacttttagacttttggtctaaaagtcgaacatgtgtctaaatggatgccagattcgtgtcctgcacccccacacacccccaaatac

SEQ ID NO: 12743 - DNA, 214 bp, Heterodera glycines
aatttgggtaatagtagggtttgtcccccccccccattttcaaaaaaaaataatttttttttttgaaattcatcaaaaggtctttcctggggttttcggggtcgctgatcacgaatatgacattcatttcgaccaatttcgaatcccggacccaaattcgaacaaatagtcaaaatttcatttttcaacaaaattcacatttatcttccaaaat

SEQ ID NO: 12744 - DNA, 2368 bp, Heterodera glycines
attttgccaacgttgcccggttatgtgcgcaaaagtgttatggtcaagcataacgggaagaacagcggtaagtgcttgtgagagagagagagaagaaaagaaagggagagagagaatgagaagagaggaaaagagagagagagagagagaaagatcagagtgagagagagaaagagagagagagtcaatcccgggttttcaactcgagaatttctcgacctttttaaaatttgcctattctcgactgagataagcaagcgaaattgagttgcacgattggttaaatgagctttgggccatgggtccaaatcagcctgcctgcaagttttaaaaaaatgtttctcgggcttttttgggccgctgatcacgtatttgacaatcaatagatttttttcatttaatttttcaaatatttttgtatatgttttttgattttattttagttgaattgaatcatatttttattctataataaatatatgttttgattggtttaatttcatttttttaggcttttgttctgtgtttggcaaaatgtcaattccaaatggatcatttttctattacgaggttactattctgcacaaacattatgagtaagttaatatttaataattaatttacattagttattcttaataaaatatgaaagggcctcaaagcgcattgccgcgccttaaaactggcaagaagccaattgcacaccgaaatgttcctctgatacaaaaagcttgactcttatttaaatcagagttcccaagtgtcctttttttaaagattgtcctttattttaggcttccccaaattttaaatttttttgtgcttaattatttatttcgctgataaaaatgctacaaaaactcccaatttcaaaaaattttcccggcggcgcctttcggcaccgccggcccccaaaaacttattttttgtttttttaagaaaatggcttaaagccgtaaaaattggtcatttttggtgaaaaattgttaacaaatagtgtaactgcccaaacacaattttacaattttctgaaattttttttcctaaaaaatcacaaaatttggacaatttttgggcaaaatctgttaactaattgcttcaaatttttctaaaaaaatttcccggcggcgcctatcggcactgccttcccccccccctatctccaaaagtttttttaagaaaagcgcgcctcaaaaaaagcgttttttaaaaacaaaaaaaggcgtctactggctaaaaatcgcaaaatttgtcattttttagacaaaatctgttagcaaatcgcatttaaatattacaaaaatttctcggcagcgcctatcggcaccgccggcctcatatactctactttcttttttggaaagaacgcgcagcaaaaaaaaacatttttattgattttttaaattttgagtaaaattttccaaaattattttttgtcggcaaaatgctgattttgaaaattttcagttgacaggcaatgtttttacgctaataaaatgttgttttaaatcgattttcatgtattttattgcgtttctttcgcgctaatattagttttagaaaaaaatctttttttgagggtccaaatcttagttttagtatcgtttgtcctttttttgaaaaaaaaacttgggaactctggataatcttacccaaagttcaaaatccaatttctcttgtgtcttccctttgaaggattctttcaaattcccgaattttattcagaaaaatatgctgtacgaattgtttgggattgtgcacagtttccgttcacatttgaacaaactctttttggagtgtgttttagttggcgaagtgccaaaaaattggagtgacaattccctttttgcattgtttggcgctgcattgaacggacagattgaaacccttaaaattctggtaattgcattcagttttagcttaaaaaataacaaaataatttattttattaagtcggaaagcaacgacgtaaatctgagaatgggccaactgaaaaccgctggaggcacaatcggtgattaaatacaatagcaagatctggacttgctggccggatccattcctaaatttttctctgaatttttttccaaaaaatataggtccagatcagtctgaaaacagaatttagacatgaaaaatctgtgttatttttcattgtccagctttgtctaattctgaagtcactttattggatataaattgtgtgtttagacggcgtctcattgctttggattgcatctgccgccggtcattttgaaattgtcaaatttttggtaaaataaataatcaatttaaaatattaaaacttaattttttagcaccaaaagggcgacgatgttaatggaaatggatcagtgacatttgggga

SEQ ID NO: 12745 - DNA, 3632 bp, Heterodera glycines
  unsure (1)..(3632): unsure at all n locations
tttcggacaaatcatttgaagccagcccacttggcggtcgtaccagaaaagggctacgacagctgtggcgataatcaaagcgacttggcgctcaattttatgcagtggtatgccgacaaatacggagttcacattcaaaatgccttttccgctgaaggagagaaaaggtaatttcttgaacaaataaaggattaaattttgctaaaagggttggaaatttccgccttgacggatggatcgagactcaaaagaaagggcttgagatccatgtgcttttttcgacagttctaataaataatttagctcaacgcagcattagaagaggggtaccgagtaacagagcttttgcgtgtacttgagtacagtaaaagcgacaatgaattattccgcccgtacatgagcgaatttgttgtccaaaagctgcacgcttcgggatttgatcagaacatccgtgggaatcttgaagccgaggagcaatttattgcagaatgttgtgaacaattcggaatgaaaatttatcgcaacaaaatgatgccaaataagggaaagagagcccttgccaaattggcagtcaataatttgtgtatgttttttttaaatttttttcatctccccttaatttagggggtcgtttttccctacgcaactatagactctcccaaacgctcattaccgacgacccgtcggagttaggcaactacttggacaacaagaaaatcgatgtcacagggcttgacatgttgaccccggaccgaattttgatcagctaccaacagaaaaaagattgggttaggaacacccttgctcgaatgttgtcgtctcactttttaccacttctgcagctcggcttcatttgttaaaagcaatgcaaaaggtcgttcgaacacccggctgtgtccttttatatacaggtaagaataaaatttctatccaaaatatttgcaatttcagataccgattctttaatatatgctcacccaactggcaaaaaccctcttagtacagggccccatttgggtcagttcactgatgaattccccgaggttagtttaaaaatattaatttttctcttaaaaatatttttagcatgacatattggaatttgtgagcggcggctcaaagtaatatggattgaagctcaggcggaaagggactgaaaaaattgagcacatgctgaagctcagagggattacactcaattatgatgtcaccgaaaaccaagggcttcgatttgatacgttcaaagaaaaagttttacaatttgcccttaccggaaatgttgagccaatcaaagcagtttacccaaatttcctccgtcctacagtaaacgctggcagcgttatctccgccccccttcaaaagatatacaaaccatatgttagtaaaggaattgtttgctctcgtgactttcgtgtgatcgattttggatatgttgcacagtaaaattgtattttaattaccgaacaaataaaaaatgtaaaataaagtgtaataactgatatttttgtggtatgagtaatgcaaatatcaaaagagaagatacactttttaaaaaattaaggttaagaagtcaattttggctgggaaaatgaaaaattaatgaataggagatacaattttgagaatattagtagataagttttatacatttgaactacctacctaccataaagaataaccgtcgctttggctacattcttggcgtccgcttgatattagtgatgtctcagtgcttgcattttcgtctgtgttaatgttgttattgttgtcacttccggtttcagtaaaaatacgtcctagccaacccggttcaatctgtccagcattaattttgcatagctcaagcgggtagaaccgatcctcctgaccctcgggaaatctctcgattacacagtgcaggaatgggtgtcgaagtttaatgcggtggcgaacgtaaaaatgcgctgtcacattcacattgaagggtcttcccaatcgcccgtaagccatagttgttgatgctccttgcggtgttatgccaccaaacgcaaagctctttgtgaaaccgtttcgatccttgtatgttgtttgtacgtgacaccccttcaatgctttaacgacatgttcaaaatctgaaggatgattaagccgatcgcggagctcagacacacgacaattcaaaatttgggcgattttctcagtaagaagcataattaatcaaattcaaaagctaaaatattgtaaaaattaatgaagaaaagatgtaaatttagggagaaaaagagcagaattaacgaagtgaagaataaaactgaaaaatataagtgtgcatcaactatttataacaatcttggttttgtttttctgggttaaacaaacatcaatctgtataaaaacggtgaacaagatcactttattcaatcctttattctaatatatttaatttattaaaataaataatcctagctaataatgccgactcctcctcatgacaacaaaatttacaaaaaatctgaatatttaaaaggtatttttgtctcattatttattaataatattcaaaaaattagtcgatgatgctgatgaagtggatacggacccctctcctgaagaagttgagaaatggacgcccgagcaagtgattgaatgggaccagcgtagttatggaaaaatgcctgccgaggaagagatttggcaagaattcctcgacaaaggagaagcgaatgtcagtgatatttatccattttaatgtttaaattaaaactttaggttctgcgtgagttctttggcggagagggggctcttaaagttgagaaaagtcttcgcgaatatgccaagaagaaagaacagcgagatgaaattctgatgcgaaagcggaaagaatatgaagaaaaaatggaaaacaacaaaggcgaaaattaaacactcctttgtattattattgttattgattcaaatttggattaataaatcttttatcaatgttcaaaaaacgacttcttgaattgggttaggttaaacaaatattaggagctataaaatcaaaaaaattcgtgatattatcgtccattcattcattcattcattattaacatatcccaccagcccattcattatctcaatgctccaaaacgaagattcctgcatgaatgagccaaaacaagaagtcaacatttcatcaccaaaagttcaatcctggaaactttttcgtccaaaatacatgttgacttaccgcttgtgcgactgtaagtttatcaaattagcaaaaatatttgactttgtggtttaagtatgtctttcggctctttggtccaacaaaaacaaattcacgaataacgaagaacgatcagtgatcagttttgaactctgtgagaagtgcaccattgacaattgccgagctactgatgttttggccccgtacagaccaaagaaataactcttcataagaatgcaatagttagggacaaatcaatatttttcattcagtacatcattaaatttgttatttaatttctcaaataaaatgtcaatattcggaattccctctcaattattttccccgnattaatcggcacctttcagtcttccattgctctcgagttccttaatgtttacagaaatattgccgagaaaattttcctctccgcgattag

SEQ ID NO: 12746 - DNA, 969 bp, Heterodera glycines
  unsure (1)..(969): unsure at all n locations
atatttcgcgatttatgtccatatttccatatttgtcctccatttgtgggatttttatccatatttatgtccatatttttgcatttttccaaaaaaacctctattagaacggccctagagctaaattgaccttttggacaacaaaaaccggaaaaattttcaaaaaaatcatttaattagcaaaattttcacgaaaatattgatgaaatataaattttcttaaaaattggttaatttatgtcaaaataaacaaaaaagcgaaaatttcgcttttcaggttgattttttgctaaattagaaaataagcccgggggatctattacaataaatacgataaacaacagcatatccgtgaatttttgtctacattttttgattaaatttgttttttggtggaggggaggggtcgaacaaccgaaaacattccgttttatttataaaagacaattttatttttagtttaatttactgacaatttcttttaaatttattcaatcatcaattcaattatgatttttgccatgttaattgtgctttttgctctcgtctttctcattattagaaactttaaaaagggccaacggtgagaaatttataaaattagaaaaacaatcaaattaattaaaatgaaattgcattaaaaaattgaataaatcactttcaactaaataaatctttctgagcactaaaatttctaaaaaattattcaaaattttgggcaaattggcccaaattttgccccattttcattttcagtagcctcttcgaaccgatcacattgtccgtctctcaacatgttcgttgcattgaacttcaaacaatgtctgcagaatttggcaaattttttacgttggcaccgaaaatggtgagggcggcacgcaatttgtcacatcggacccggcagtggccaacgaaatattcgtggcaaaatttcaaattntagcgacagaaaggtaaaaaacgaaaagg

SEQ ID NO: 12747 - DNA, 3237 bp, Heterodera glycines
  unsure (1)..(3237): unsure at all n locations
gcgacagaaaggtaaaaaaacgaaaaggatttatttatggttttgnatcattnntaaaaaattgtcgaatntaaggacttttcttccaaaactggccacgtgttcatcgcttccggcgaccattggaagacattgaggcacaacgtgtccgtcttctcaaacttaaatgtgaaggcggtgagttttttgtccgttacacagttatcgtaattgctctaatggggctaccgtagacattctttcccctcaaatgtggcagttatttattggagagcggcacataataaaggggggggcaattagtgcaaaaattaaattggaagatggctttttcttctcagttcactccgttgctaaatgctgccgtggactcaatgctgcgcacaattgcagcgaatgagggcaaagcaattgattttcacaagtgagtctcatttttttaaaaattacatatttaatgttatgcgactcttctcaaactcgagattttctcgcattttcctgaaataaatgtaaggaaaaaagctatgagtaggtataatgcggaaagtagaaaatgctcgcttatttgttagctcagtggttaatcgttgccctcgactgtgggtggaggcgtgggttcgattccattcgagaccaaacctttttgtccatttcttccatcatttccttgaagttcactaattaatccggccataattagtcgatttacttttttttctccctatcattagcacttcgttgcatttggtcgcggccattttggcacgcatcgcattttgctgtgtccatcagcgtgatcatccggcacagttttgcgacacgtacaccgcttacgccgagcagttgctgctgctgaaggaaaatgcgcgcctttttcgcgcattgcctccggcgaaaattgggcaaaatgcgcagcaacaaaacggcgccaacttcgacatgttcacggagctgtacaagcacattttgaggatggaattgcagaagaatcacgaacagaagcagcaacagaaaaacagaatgatggaacacgtaattaattaataataataattaattgattgattaatagtaaaataagtccaataactaattatttttaaaaattttaattttcttgagcaaaacaacagccccggtgattatgatgcgtatgacgaggattgccatctgtttgcttgcactttggggaacttctttttggaaaatgccatgaaaagtgtggggtcagtgccgaaattattaaattctgatttcaatttctctcccatcattagcatcgacacaattggccattgtcttgccctcgtcgtccatttcatggcccatcgtccgtttgttcagcaccgactccgtgaagagctgacggcgaatgtggtcgatgatgaagtgaagctgctgcccaagctggtgaaggccgtcatcaaggagacgcttcgtttgtgcccaattgtttcattgtgcgcaaaaatttaattttttaatttttgctcttatttttggtgatcatagatgggattttatgtagtagcgaatcgaattcgttgtatgtttttgaaggttttcgaaggtccattctaatggatgcattttttattttaacgcatttttggtatgaaattttcaaaaattgcgaaataatggttgatggcgttaagtccgacacattctggttcgggggggggggtggggtagtgctgttcgagaccgaaaatttcccgagaccgagacttgaccccgagaccgattccgagacttgaccccgagactcgagaccgagacccaaaaaacccgagacttttctcgagtcgagactcgagaccgagactttttccaacaatttttctagttctcacttaaaaatcgattaaaaatcaatcttttgaggtttttctcacaattttgctttttaccttatttaagctaccatccatttttccttttgatatgattgacgttttacaccatttttttgttggtgctcttttttcaaaaaactttttgggaacagaggtctggcggtgccgataggcgccgccgggaaaatttttaaaatttgagtgcaattttttaacaggttatgtccaaaaatatccaaaatttttgcggttttgagccaattttttaagaaaaataggggttttgggtgccgggggtgccgataggcgccgccggggaaaattttgagctttttagtgtaatttgtgaaaaaaagtccaaaaatgacatattttacgattttaattgttaaaattgtgattgaattcccatcgaaaaacattaattttgaaaaatgagaagaaaaaataaataattggaggggaactgatccaacgcaaaaaaaggaacaaaaccaagaacacaacccactggaccacgcatatattaacaaaattggacaaaaaaggatctaaaatttataaaaatataagtttaccaagagccaatcattaggggtgtaaaaaagtctcggtctcgaagaccaagaccgagactgaaaacccgagactcgagaccgagaccaaaaaaaccgagacttttctcgagtcgagactcgggaccgagagtctcgagcagcactagtaaatgtcccaaaaaaaaattccaaaataatgtaaaattacgtaaaaatattttgatgaaaattagagtgcgccgggaccgggaattttgggcaaaaccgggaccgggacttgccgggacctgagaagccgggaccgggacctcgatttttgttcgggaccgggaccaggaaccgggaccaaccgggaatttttaaaaattcagaaattcaaattttaatttatttcaagtgaaaatattaaataattaaattttattttggtttttattttataaaatccaaaagttaaagctatttaaattaataaaaattttcaaacaaattttcttcaattatttcaaccaacaatcattttgggctttaaatgatcgaatattaatataaattcagatttacatacttttcacatcactttttttcggcgcgctttttccagaaaacttttggggaaatatgtgtgtccgcggtgccgataggcgccgccggggaaaatttttaaaatttgagtgtgatttgttaacaaatttcaacaaaaaaaggctgctttttgagattactaggctcaatttgacggatcttctttaaaaaatgataaaatatgtatcaattaaaaactgtgaggaatcatattttgtcgataggaaagccat

SEQ ID NO: 12748 - DNA, 923 bp, Heterodera glycines
gttttctgtagtataaaaagttataagaacctagttctgaattcgtcagtttgttcccatataaatcagggtgaccaagtgtcctggtttttcagatttgtcctgaattttgaggtctctggtaaaagtataaaaaggcgatattttgtaacaaattcattaaaaatcccaaaatttttcccctacggcgcttatcggcaccaccggctcaaaatattacatatttaatttttttaatttaaaaaaaagtggatgtattaatttatacatggaaaatgtcaatgagataaaaagtcaaaggctgcgttgtcaaactcttaaaatctccaagttgttgttaaagcagatggaaatccactggtggaaattactggaccaatgtatttgacaaatctaaactttttgaatgaaattttaaagaacgatgtcagtctcttagacctccgattcagcagtatatgccaaaattggttcgtctcggttgaaatgattcatttgccatatcagagcttgcttgtcacttcctaagaacggaaaggaaatctttaaaagtgactttaatccatttttactattaaattttcagaaggccagataattttgttcaaaatgctttcccgacggcacccatcggtaccattggaccctaaaaatccttattttcttaaaaatggcgtataatcgaactattggtcattttttgggaaaacctcaaataattagtggagagggggcgggggaaggtaacccaatccaactaaattacttgttaaaatccaatttaaaacgaaaataactgaaactttttcgctgattcggcataaatttacgtgggcacagatagggaggggcatcaccatcaaaaataaactaacaagggaacattccgaactgtatgtgttcaaatcacttttaaacacttt

SEQ ID NO: 12749 - DNA, 2695 bp, Heterodera glycines
attttattagcgcagaaatcactcaattatgaaaagtgaaaaatacttaccggcagtgcacaaatggacggttgaatggggtgcccaagttattcctgtggttacgtttcgttgttagcagtgttattaaaacaaaatgtagtttaattaccatttattgcagctcggtgattaccaaatttggccataggtctgcacggtacccgaacgtcgagaatgacgacctgaacattttcatacttctgaagctgaagacacttattctccgttgacctctttagactcttgggcaaccgttgccaattttgtcgggtcccgcttattccaggagagatggttcagcattctcctttcggcatcttcgtacaaaatggttgagtgttgaagtgcccgcaaatcttcaaagaccaaagttaaagttgccgaaattacgactaaaccgaaaagtcggatgcttccatcggcgcctgaaagggaaagaaaagttaaaaaattaagcaaagtaaggaattcgaccggcggtggcgaattggtcccgtccgttgtccagtcgggtgaatgcaatgtcatgcacgggtttctcatgagcaatcagctgagtcttttgcagccctttgatggacggcgcctgcccaatcggctgattcgtcttgggaggaaaagcatttgcataattactcccagtgctaatttgccacctcaatgttccaaactgtgcaggtcgtgtcgatgctgcacgttgccacaagggaagggtccacttcattccaatccaaatttgtgagcggtgacgaataggcgctcgattttgtcttgaattatattttttttcaaaaggaatgccaaccccagaagtctgcccaaaaaataatttatttttacggaatgggacactaacggaccgaccgaaaacggaccaaaaagtcttgtaccccacaaggccactagcggaccaggcttatatttatcttttttaaaaccaatttttaaattttgtaggataatatataatatttatcaaaataatataaagattattatatttggtcgactattaaagaattatggaggaaattttggttcaataatgggcaggtccttacccatttttaagttttataactaaattatataccgcactcagttcgcattcttgggagatggaggcggaggacggatggtatcggaaaatccgcagacaattcgaagtggtagcaaataattctggttgggaaacgtcctaagatcgaacgaatgcttttagtctataaatgaatggccgccccctcaccgtatttggaatgaattgcgtggcagtgcatgggtacccgtgcaaaattccgaatcgtttgacaagttcgccgacattttcgtccagttcaatgatgtacatcttcaatttcaaaggttgtccctcgtcccctccccatcagggagttgccttgttgctgctgatgccctcttcgtccagcagcagagtaccgaccaccaatcggaagcgtttgtccgggtacaatttgttggaccacgcagcggcgtacaacgtgctcttcgcaagtgtaccgatagatttcctttctcatccgcagttgctgctgtcgtccgtgcatttgcagcgccgcggccgactccgccgcgggggctgccgcgtttgtgctaccgacggctgggttggagacggtggcagcgaacagttgcgggtccccaaacagcgacagttgcggctgaaatggtggaagaccgttcatttctgccgaaagtgaacagtccaaaggcaaaagcggagacacctaatgaatttgttgtataatttatttacaatcaactaaaacacgtcaaatttatttattaaaatacacattttctttggatgaaacccgtaaaagtaaatgtaaaattaatgtaaataaatggaaatgagcaaaattcaacaaaaaataaaaataaaatcggctgcctaatcggaggatcaaaataccgtccaggtgattcctatcttttcctctctttcttctccttctccggctctatcagcccattctccattttccactcgtacactatcctttcctgcgtcgcttccggcactggcgcatatcgactgtattccattgtgaattcacctttcccttgggtttccgttctcagttcggtgctgtatccgaacatatcattcagcggggccttaaagaacgtaaataacaaagccaatgccaaatatttgttatttagccttgaagaggtgctcacttcacattcaaatgtgacgaactcttcgctttgcgttgtccctgtcataatgccattccgtttggtgagagtgccggccaccttttccttaaagggaaaacaacgttaagaaaactcgcaaaagtgcacagacatgaaacatctttggcacagtgcaggacaccttcatgatcggttccaacagaatccatgccgcccggtcataggcctcgcgcatcatatttttcttaatattggacgaaaattataagacaaatcccatttctgtaccattgtagcttgcatagcgatgtccgtagaatcaaccacgtgcgtttgtccgtcttaatcaaatagaaagcctacaaatatagaagaaaaatataccgcaaatgatgacatttattccgcaaaccggggcttttatcagcggaccttcgcccgacatgtccaataagcccttaaa

SEQ ID NO: 12750 - DNA, 1447 bp, Heterodera glycines
tcttttcatatagtcgccaaataatttttatctttttttaaatttactattgttttggctgatttgcacataatgcaccatttttaggttttaataatgcgtcaaaaaacatatgtattggccaaagccattctagagagaaaggacattctctttgggtcaattgaaaatgtcgtcaagccgcaggcgatgaaggagaaggaggacgcctgggaaacagttcgtactgaaatgattgagcagggctttgtcaatttcgagcgaaagtcgtggcgcgatgtacgaaatcacgactggcaatacttaagacgttctgcggttgcaaaatacgaacacaatcagaaggcgggcgttgaaatgatccaatacaacgaggcatgtgccaagtttagaggacattcacaaagattagttggtgcaggtagacaaactcgtcttcgaaataatgggcaacgaagtgtcctccttcgacaacacaaacaacgattctgttttcttacacaattttccaaatgatgaaggacaacaaaatgaagtggccgacccgccgttctttccagccactaatgcattgcgaactccgaaattagaagaactgcagcaaatgaactccaacttaagccattccatttctgttggttcgtctcgcgacccaccggcacagacaaagggattttcggttgaaacaatcaaatttttggactttgcagaacaaaaaggtgggtacaacaaccatttaaaagttagtcttttttgacatgttttagcagtttttttcaaaaaaaaacgtcaaagattttctttaaatatatgaaaaaattttctaagatttttttctcttgaaaattttctaactttaaaagaatttcttttaaatttctgcggcgagattttgtcgcgtcccccacctgcgccgcctggtgtgcatctttttcgtaagagcgctaagaatccattggcgtgcggaatttttacagacattttttattaataaaaaaaattgtttttttattccaatgaacaattattgcacatattcgaaaaaaattactaaaacggaaaaaaatcaaatttgttccaaatacaaatttacgttttttgaattgcatttcgttaaaaaaattttactagcaataagttagatttcagaaatttttaaaattattttgtcacctttcagattctcctccttgtggcgaaattcagtccgaccttttgcacagtctcatttcgtcatcctctctaatcaacgcctccgatcgcaaagagaccatcccaactcatcccccaatttctcgacctttgatcaactcatcttcagacagaaagcgtcctctttcgtgctcatcggcgtctgtgaaatcgacggaggacgaagtgaccgaggcaaaactgcgccttgttatgatgaaaatcagaaaagaggagataatgatgcagcaggaga

SEQ ID NO: 12751 - DNA, 2090 bp, Heterodera glycines
ctgcttgggttgtgtgcttgcgcgctgttttgtccaagtcggggctaacctccgcagaggccaagtccgtgtcgcttcccttctgaaatgaatggcatcgcaattcttgctgatttatgatttacaaggcccacaaaagaagtcagaggggcaggggtcattatctccctccccaccccacccctctttctctcccatcccataaccctccactatctctccttttcctttcttccccttccacccctctctatctctcacatcccataaccctccactacctccccttttcctttccctctctcccccctcccctctcctcctctacgtccacaatatctcctctcatcctcccgttttcttccgccccccccccctcccaccatttgcccacctttctttgctgctgcctccatcccttcggtggcgcgtttccgctgtgccatgtgtggttgctgttgtagttttggtcgttcattccgctgttgtgatgcctatgatgtttggccgacaccggcgccgatcccgcgcctccaggcactgagccgttgcgctggccatttctgccgagattttgcagttcagagccacgagactcgataattcgattgaaggacaaatcactgcgcaacatataagtggtggatggggtggagccgagacatttggaagccttaagaaatgccaaacaaagcaaaaagatgccgaaacggacgacggactgaccacgggaatgtcaggctcaacgcgccaaattttgaatttgcgcacgaaccaaatgaacggtacagaagccatcgaagtaacgacgaggccaaaagcgatgaacagagcccaagtggggtaggggacattgtgctgatgggtctgacaaatgagaggaaaaagggaaataaaaggggaaatggaggggggcggggacaaacggtggtcgagtcgtaggcggagtatttgggcacatcggagaacgatttgaagaccgaagcgacgaaaatgacggccataataacgggggagatgaagcgccaagtgattgtctgcagggaaaagcgtttgtgcgagaattacactaactaattggaagcaaaagccatgccaattgagcaaggaccacaaaaacacccgcgggcattctcaagaaaagtgtcccccgaggcaaagccaaattgagagagtccccaaatggttaaccaatcatgaatttgttgcggtgcctttgctggtcatttcgcttcatttctcacccaatacggccccacactttcgtcggtcatgtactgaatgtcgcgcacaaatcgatcacagccgtacacataaatgacggcgattatttcgaagaaggcgacacacatcaaagcgtaagaaccggcgaattggtcgaacagagacacccaatactgaacagggaaaaggaagttgggggacgaaatgcgcaaattggacgacctgtccggcctgagtggtgaacaccaatccgacaatgcatgccgaagtgcaaaggatggcggccaacatgggcttactgagcgggatcattttggcatcgttcagcgaagtgatgacgccctcaagcatgccgaacatggagccaaggccgagcatcagcaacatcatgaagaacagaacggcccagaggggcgggaacggaaattggaggatcgcttctgtgaacaccacgaaggccaagcccgtcccttcagccgccttcaaaggaaaagcatcgaattgagggaaaatgaaaagcaaagcgaagaataccgacagacctgggcaatgatttggccgagttcgcacttttgataggacggatgatgaatgatgtcggggaatttggactcccgaaagtcataacgcatgtaagaggcgaatctgatggagatgagtacgaaagtgagcaaagggaatttcggactcactcttcgatggaaacgttcgcgcgaaggtcgtccaagtcgcggaaaagcgtcgggtgcactttgagaatcaaagccatgtccctgggcattaattaaggcaattagtgttgtcggagaatgaaatgagtttggcacaaatgaatggggggcatttgtgctttttgtgtgattgct

SEQ ID NO: 12752 - DNA, 1944 bp, Heterodera glycines
  unsure (1)..(1944): unsure at all n locations
agatgacgaaggccgtgtacagtgaagtgagcatctcctacgccgacantcttgatcacantccttcttcacgttgcccttcagcggattgtacgaggcaaaagcgatgagacctgcaggaagagtttggttggcggggaaagcacccgcgcccgggggcgacggactcaatcgaccggactccttcggaccccaaaattaagcgcggaaatggcgcccgcctttggccgtgccatttcacatttggccttctcttccgcagtcactttgacacttttcctttgcccgaccttcgcgcctttctcgacataaaactttacctccaaagccgagacccatggagtagaaaatttgagttgcggcatcgagccaaacttcgggctcagaaagacgagaaagctgaagagattttggggatcagtgaaggactcggaaggacccggccaaaaatccgcaaaatgtccaaaaaaggggcgaatttgacgggtcgagtggcacaactgtttgcgaattggtttaaagaatttaaattgctaaaatttgagtgccattcccgacccaaacaattgttttgtccaccactttggcatgaaaacaaaaaataaaaataatatggcataagcaaatttaaaggggaagggaagagggaataaataaagcaaagacaaagggagagagagaggagaagagataaagccgaaacaaagcgaaacaatgggaaaatgataagtggacaaatggacaaacaaaaaattccaagtgaaaattaaaataaaaaaagggaaaaacggacgaaagggggggggggagtaattaatggcaatattggggacattggcgggacaaaaagtggcattacaaattgagacggagggagtcaaacaatggaaaatgcaaaaatggcaaagacaaatgctacaaaagcagaacgccaaagtgatcagtgaaggaaagagaggtggaacaaatttagtcagatgtggtggtcatttaagaaagtaatttcaaatgcattgcccgacggaattgggcaaatgctctccaaagcacgcaaaggtttcaaacactttgccaaatggccaattttcgctaaaatggtctcattaaattcctgtcccttttccctttccgatgtttttgcccatttttgccccgtcattctcggcactttcagcttacattcggagtgatcatgtaacgaagtccggcggttgctccgtccagcattatcgaacggaacagaaacaaagtcatcaccacgtatgggaaggtggccgtcacgtacatcaccttgggatgggaagaggagagaatgattgactgatcagacgaagcgatcggaagccgaagaacggacgaaactcactttgccactgcttttaatgcccttcatcacacacagataaattaagaaccaagagaacaccaaatagccagtcattttccaattgaagccgccgaagtcgccaatcgaactgaaacaaattgggaagtggaagaacaaaaaggcaaagacaagtcaaggaaacgaaacgaaacgcactctgtggtgtcaattgcttggcgattccaaaagtaattagtgggagaagttgaattggcacattccaaaacgggggtaatgccatcgctgagagtgggacaactctaaaagaggggaggcactgatgggaagggcattttgaagacgaaaaacgcacactccagggaagttcgaagcggaaggactggaacaagtagtagatgacccaggtgaggatcacgttgtaataaagcgccacgaaataggacacgacagtggcggcaacgccaacgccgcccaaatgcgggtgaatggcattccaaacgccgacagagccctcaaaaatgccattgaacatcaaaagggttgaatggcctatgggacaagtgggcactgttcaacaggggtccccggcccactct

SEQ ID NO: 12753 - DNA, 2883 bp, Heterodera glycines
cgataatttttcgaaaaatctccatttttaattgagatcttgaattttaaattaaaaaatattgtcatttgctaattttcttaaaaatcttcacagttctccaaaattccattaaaattttcaaaatttgacgcaaaagttgaccattttgtgacttttttctttcaaaaaaagaattatcaaattttattttttatattaggtagtttcatggcacaacgatttctaagaattttgtccgaaaaatcataataaaattgatgtctacgtatttttcttcgatgcctatcgacaccgccagacataaaaacccattattttcttataaattagttaaaaatcacaaaatatggacagttttaggataaattctgttaacaaattacatttcaaattcaaaattttcccggcggcgcctatcggcaccgccggcctccccctgttcccctagtttttgaaaaattcactgtcgaaacaaattcttgattttcgatcccgatgcagtttacgattttctaattcccttaaaattgtttaaaatgataataggaggcgaaaatacaaaaattgacattaattgattaaattgtaaaaaaatacttaaagctatgttgataaatgttctaatttttgaccctacagtctgactttttaggcatgatattctaattttggaaaaaaaattctataaaaacctaatataattaccatccctatttttcacaatcgaattgatcaattataaatattagataaacatttcaacaaaacttagcacaaaactaaaaattaaaaagccaataaaaaaaattgggttttagcaaatcccgataatcccgcgggatcccgaaaaaaaatcttcgggattcatcgggatcgggattcggttgggatcccgactcgggatccgtctcgatcgtttttctaaaatgttcgggattgatcgggatcgggattcagtcggtatcccgactcgggatccgtctcgatcgtttttctaaaatgttcgggattgatcgggatcgggattcagtcggtatcccgactcgggatccctccgaccccagttgtccggtctctactgcaaaagcacgcagcaatggacataaactcaaaccctatgtgttggtcaacagaaagcgaccggtgccgcaaattatcaaccaatttgctggaaaattgttttttttcagaaaaaattagtgccaaacaatgttctcaaaattctatttatcccccatggggggtaaatggagactgggtgattattttttaaactcctcagaaaggggggggggataattggagactgcggtattaatagagactgggctataattagagcatatacggtattatcaagctatatgcattgagattgtaaattaaaataagtattttaaattgcgttaatttttgaagacattaaatatttaatgaacttttatttttaaaaaattgatccatattagagttattatttttagatttattaaaaaatatttttttaaatattgacacaagtttttgctattttttacattattttggcatcaattaatataaaaattgaaaaggtaaatctgtatttaaatattaatttcttattttaatatatataattttaagcgtcatatggttttaataaaatatggattactattttaattaattttatttataaatatgacgaaatactctgtcaacattcatacttttttggtatgttaatataaagtttgtttgacttgcaatattcaatatgataaaaattaatggatcataaaatatattttttacttttttaaacaaacaaattaattcgaaaattttttgtttctttgcttttttgttacaggattcgaaattgggtctaatagagatagaccgtaattagtgacccttaaaataacgtgcagaacttttatgatttattacaaaaaacgcaacccaaaactttgagtatttcattttgtacaattatttttttggtactgaagtgtatattttagtgaaattgatttgtccacacaatactcgaataacttcgattcaatttcatcgattaatttctaaaaactcatctgatctttcgaatgatacaaaaatttgttaaaaaatttttattcaaagtctgcatcggcttatttttgtgacaattttttgatttaaaccggtttgaaagcgacattttattgccgcttttggattgcttggaagttttttaagttattttagagtatggtacttataattgaaaattgtcaaatttttatttttcatcattttaattattatttcttaatttaaccaaaaattgtcaaaacgatgaaaggaatgacagaatttctgtcttcagttgactatatgctagagtgcagcgggaccgggaccggccgggaattcccggtcatccgaggtcccgtcccggttcccggtcccgggttttaaaaattctcaggtcccggtcccggtagggcaaccgggaaccgggaaaaacaagcactggtaagaatgggggtctgagtgaaaaattagtgaagaaaatttgagtgaaaggaaaaaattttgaaaaaataattaaatatattcgagaaaagtagcactaccaactgtgaaaatggcctagtggctagtctccttgactttcccttcatccttcccctggttcaatcccattacagaatctaaaatactttgaatttactttttatatattcatgggtttcctatcgacaaaatatgattcctcaattgttttaattgtattttatcattttttaaagaaaatcagtacaaaatgagcctattaatcccaaaaatcagcattttttgttgaaaatctgttaacaaattgcactcaaattttcaaaatttcccccg

SEQ ID NO: 12754 - DNA, 1171 bp, Heterodera glycines
tttgagcctatttttaataaaaatgggggcggggtaggcgtcgccgggcgggtgaaaaaaatgcgaatttggggcctatatattaaaaatctacacttacgtcatatatttaaaatgttaatttttgaaaaatttaaaaaaacaaatacttggaggggaactgatctaacgaaaaataaggaacggatccaaaagcataacccactggactaccaatgcaatgccgattgcaaagcaaaaagttataatgagatttaaatttaaatttaccataagccaatcattaagggtgtattttcactttgaaaactcaatctttagggggtgtatttttctcgaagtttcgagcattttcacgaagctcgaagtttgaagcccaaaaaacgcgaagttttcaaagctcgaagtttcgcccacccctgatcggcaccgctggaccccctttctttcccaaaagttttttggaagaagcacgccgaaataaagtgatgtgaaaagcaaatctgaatttctattaatagctttacttttggattttattaaataaaaaacaaaattaaaatttaattttgtattattttctattgaaataaattaaaattaaattttttaagattttttaaaaatttttaaaaattttttgaatttttgaattttcaccggttggtcccggttcccggtcccgaacaaaaatcgaggtcccggcttctcaggtcccggcaagtcccggtcccggttttgcccaaaattcccggtcccgctgcactctactatatgctactgctgctctcattgaatggtgggcgtccacaaacgcgtcgctttgataaggctcagagatatgaaagattgatgtgagaacgagtgaaaagacatgcaaagaaagagagagaattaaagaaacagtgagataataagacagagatagaaaaaaaatcagataagacaacgagagagagagagagagagtgagagagaaaaagtggagaagagaatgagggcgagaaagaacgagagagagagagagagtttccaatgcattttgatgggaattttttggcaaggaaaaattaattgatttaatgaccttaattaatttccaaaaaactttacaaaatcataaacaaataaggtctgaatcttaactctgaaacttttgactcgtcgctgt

SEQ ID NO: 12755 - DNA, 839 bp, Heterodera glycines
tttttcaacaatttgctctggtgacttctgatcccacatgtctcttcaattccgtccgttctcaaccaaaacgtaataaaattccccgaggcgttttacctccgttttccgggggcgaaaatttttcccttttcacaaaaaggccaacgggtgagtaggtggacggaccgacgggcatcaccgcccccgagggccgaatggccatcgtcccctccccccttccttccccccccccccatttcttccgcctctcagcggcggcctccgtccatttttcaaagacggtgagtcgggaagatatgtccgtcccttggaggtggtgatgagacgacgaacacccaatggggaagggtccgtcctttctcgactttggcgatgagcctacgactcactctcgattgagagagaggggcggaagagggattggccatccaattcagcgggaccattgaaggtgttgagggaggagacactctgctggaggagaaaatatggggattctctgctggaagagaaggaagagattgataagggaagaaaggaaatggaaagaaaacggaagaggaaaaggaagaggaaaagaaaaacggaagaggaaaagggaagaggaaaagttaacggaagaggaaaaggaagaggaaccgccggggaggcgaaattcagccccaagggatgtgaccagcggaagagtcagctgagagcagcagcagcatgccaatgtgaaatgcattgcaaaatgaatcatatgcgaagtgggaggtgggggagcgggtgactcgattagggggggggggaaaagagggggtaatgggggtgtggacgagggggggggggggttg

SEQ ID NO: 12756 - DNA, 3139 bp, Heterodera glycines
  unsure (1)..(3139): unsure at all n locations
aaagaaaatccatgagatccctttttggggagaataatcgcaagttttcatggcactccgatgccccccccccaaacattctctcatcgtcggctaaccaacgccaaatatggacacaacgtcaaatacggacggacgacggccaagccaaagggaagagtggtcgagacccactcgagaatgaattggaggggtggcgagagcggaagaggaagtgtgggaaaaggggaggggaggaagacggagagaagggagaaggcggcgaaaggcggagagcggcgaggggcagaggggaagtgggacatggacggacgggcggctggtgtggggacgtcgccgtttttttttggtccgccgaagggaagagaaagtgcgccatggcgggaggagggagcgatgatggtcattccctagccaccgcaccacaaaaaggaatgaatgagaatgaataggccgtgaatggaaagaattggagatgaaaaagtgggagagggagagaaaaggggaaaagcacaaagggacacaaaaagaatgggacagctggggagagggggggggggggatatctgaaagagggaggagagggggaggaaatgccttaaataatttaggagggggggggggcaaattataggtccctaaccgacgaaaagagggggagtcaacattagcttaaatgcttattagtaaatatgaagcgaagtgcctaaggtaaaatttactcaaatggacaccgaccgacgacggggacattcgtttgggggaacgaaagctaagggatggcaccgcaaggccatccaaccttggggacagccgtctaccgccgatggtcatccaagtgccagccgaggcaaagaacggcaaagcgcgaatggggacgaagccggggggggggaacatccccagagggacaaacattcctttgccgccgcccccctccactcactctttcccgccgcttttcctccccctcccacccctactctctctcccctttctctctctctctcttttcacttttttctcttcccatcacttttcatcttttttagtttcattaaattttccgaaaatagcctgaagcaaatcagctggcaccggccaaacggcgagtgttggacaaacaatcaaaaaatgggaggagggaaggaactacgaattgtaatggttaaactgtcacaaattggcaccgttcagacaaattctgaaaaagatacgaaatgaatttttttaaatgaaatggcatttttagaaactaatggatgggccaacatttgacaagaaataattatccgaaattaacggaaaaaaagacaaaaggaatcaaatgagaggaaaaatgaaagttaaaacaaatcgccagaaaagatgaacgaatgaccgacccttaaaaagggagaaaagccacaggcaatttgggagtgggggagagaaaaggggaaaaaaggtaagggatgtaaatcaatggcaaataattcgattgaacaataaaataatggggtggggggacgaggaagtcacctcaacccaatccaacccaacccatccatcccttgcctttcttctctatctgctccataagaaagaaagtctctaattggagcacacccatccanaaatacccttccctccccccccccccccgagagatttggcatttgtggcatttgaagtgaatttgctgggaaggtggtgggcatggattgaacctgtggaaaatgtgtcctaaaaagtctcgtgatggaaaatgtgcgcttgggcacgcagcaaaaatggagaagaaaagcaaaggaatcgcaattgttgccaaagtgaacattcattgattatgaaaattgaataacacgcggatgggtgctcttctgcctctgatcggcggtgtaacttttgtcttttgttggattggcattggcatggggcaacggcacacccccccccccccctaattaattaatttttgagccaatttaggactaattaaccccttctctccaatcttacccaccactttctgtcaaaatgtgcaaattgattgtcgcgccaatcaaaacaaaaataatccccgcaaaataacccaaattttctttgggtttttggcagtgaattgtgtgctgttggcgggtccctttgctgctgatgatggccatttcctttaaaatattcgtcgtcttaagtcactcccccgttttaaactcgttccccaccaattttccttttctgcaaaaactcaactcttaatttacccaaggggtgaaaagttaaatggaaaattgaaaggggcggggggggggggacggaacgccaatgatagcctaaggcattaaaatggcgaaaaaggtggtgtccagaaaaaaggaaggcatatgaggacggacggagcagcacaaaacgtcgccagccgaaattacgccgtacgaatttttggacaaaaactttttttgaaagttagcaattttttttagaattttgcagaataataataataatataattataataataataatagaaaccgaacaagacaaaatgcttaactttgctccccttctttccccctcttcccttcccccttcgctcccttctttccccctccttcatctcccgctgcccggtcattcatccggcaatcacttctctgacattatttggtcaatccacctgacttttgtccgatcattcacttctccaaaccccgccccttctccctctccccccccattccatcccatctgatgatcgctccatttttcctttcccaaatggccgggcgggccgattagaacggaccatttcacatgcatgtagtaggggaataatattccatcaggcacccctaatttgaagctaatatccattgatcagcaatccgatcaacagattggtgtgaattggggaaggaatagggcgcaaaaaatgtaagagagcgaagggggaaaatgaaggtattgcttaatgtggaaattttgtgaatgaaggaaagttgaatgatcaaaaagagagacgaagggaggaagagataaaaagagataaagagagaggtagattgagagagagagtgagaagagagagagaagagggaacagagagtgataggaggagagagagaggagagggatagagatagagaggagagagagag

SEQ ID NO: 12757 - DNA, 2471 bp, Heterodera glycines
  unsure (1)..(2471): unsure at all n locations
tttcctcctcccccgttttatttggcaattttaaggactttttcctcgacatcttcagaacagtcggagaaagcagcttcttggaactgtccaaaaaacttgaccgatttatcagcggagtgcgccgaagagcaaactgcccaaggggcacaggcggacgacgcggccaaaacaacggcggaatgggaagcgaaccagaacaaaatggggcaaaagggaaaaaatggccagcattttcgggaagagaaaatatggaagaaggcgaatgaagagaggggaagaagaggtggaagaaatcggaagacggatgggagagggggaaggaggagaagaggagaaggaaggggaaaatgggagggaagaggaggggaggcaaatgggagagatagcgcaaagggagcacccgaaaaggaggggaggaaacagtaaaataccgaaatgtccacacgggttcagaccaatgaattaccccggaactcagtggacatttttggagtgtgtgatggatgaagaattgaagttgatgaagaggaggaagaagacaaagagaaggaagcaaaaggacaaaaggaggaggagtaagaggaagaaaagaagggggaacaaggaatgggaagatgaggtggaagaggaagaagcagaggagcagcaaaaaggaagcgacggcataataatcagcaaagtgaaggggacgcggaggacgagtggcagacagaaagggaggaagagacagtccagcacaaaagaaaaatcggcggtctgtcagtgttagagcattcagatcaggagtgggacgcgaccgcgattcgcggaatttttttccgcgattcgcgaccttggcaatttgaatccgcgaccgcgggattttttttttttgcggcgcgccgcggatttttttggcaaaactttataaagaaaattttttgtagttttaacaagctctattaacttagaaaaaatcaaaaaatttgactttttgctattttcatgttataagttttttgataattgtctaatcgcgaagcgatatcgcttctaaatatgttgagcatgaatgatctccttttcatctatttttttgcggatagcatatgctgagataagcgcaaaaaacacattttcttcgatcacttttccatttaagcgatttttagcaactattttcaactatttttgcttatgaaaatttttaacaactattttggcttgtgaaatttttaaaaaactttttttttaactatttctgtttttcaataaaaaattattatgaaaaatgcaataaaaaaacaaaaatgcaccccggaaaggaaaatattttttttcaaaaaatacacctctaagaatcgatttttcaaaaagcaaaaatcctggctgtgatttggcggacgaccgaaaactttttacacttgaaaatcttcaaatgtatttgatttacaattgcgcaaccgaaaagaataaagatgaggaaatttttgaaaattcacacatttattgacatgtttttccaatttttgcaactttttaacaactattttggcgtttttcagttttttcgcaactatttaggtacctatttcgcgatttttagcacctaaaaatccgttctctgataccaacaatgtggattttgttgataaagaaaaaagttgagtccaaaaaatgcagtggccaaacttgtggggctcaactgacgtagaccgttcatattagtatttcaatattttgggggttttgtcaaagttttgtaaatatttgatattttcaaaattttactgtaagattcataaattctataacaaaaatgcaataacaaataatctttttgacgcatgacattttttggcgacatgttcaagaaatttcaaaaatttctcattaataaatcagtcgaaaaataatccccctgtctctctccatttgtgcccccgtatctaattatcccccccctttctgaagaggttgaaaaataatcccccaaggggctataattagagaatatacggtaaatcccgttatttgttcattcatttatgtcattttggctttgtaattagaggcgaattttcataaattatttaaaaaatgaaaggaaataagtttatccataatcagcatcaatagcatttattatcatctatgaattagcagtaacagagggcactctgtgtggcaacggtcgggtttgattttggtggagaactgtagaagaaatcgtagtgtcttcttcgggtccaactccatcgggtcagtgctatcgctggcggacgatggaatttctgaaaattggataaaatttaaaaaatgaacaccgcgtattctctagttatccccccgtctccattaatccccccggcgngatggataaatggaatttttattttttgaaaaaatgaatttctaagacatctcgaaaattttataatgccgggtgttgtttgatatctctattcccgtccccctcacacaaagga

SEQ ID NO: 12758 - DNA, 2179 bp, Heterodera glycines
aaaacaaaaaggttggtcaaattacacggctttaattggttgacccccccccccccttcttttccatgtatgattgtgggtgacccattgtgatcggaaagaagggacctgagcaagttagttaaaaatttcaattacctgaagatagtaaaatttgtcgataaaaaattcacggctgaagtactgtagaagcaacggtacactgtccaacataaggcgccgcagatagcaactcgaatggtggccaatgtcatggacgaaggtttgccgggcgcgacttgtcgcgaactcgcgcatcatcaacaacaatatttgggcagcagcaatttgacaaagtaaggcacgctgaaaaaaatatcgtaaattattttaaaaaatatatattctatttaaaaaagccgaaaaatttctttttggaaaaaaggatttatatttctttaaattttataaagatatgtatgaagaaataaaattaaaaaataatttgttaattaagacatttttaatgataaatttttttaagcacgagtaattatttttgtatttcttattgaaaaaaacgatttaattgggtactcaattaataaataatttatttggcaattaccgcggttagcacttcctgcttgagcaatggcacaaagttggacagcaaatccttggtgctgaccaaatttcgcaacactgcaatgccattcaaatacgcctcgtgggctcgccatgagccggtggaccctttcatcaaattgttgcaactgaccaaaatgcgatccaatttagcaaatatcaaatgctaaaaaggggaaataattaaataaaatggaaaaaatatttgaaagaaaagaatttcaattgtaataaatggcaaaaaatttaatttctctcaaaaatacgttaattaatggtcgaaatcgaacaatattttttccttcctttatctttatcattattttttagttccgttcaccttttttattttttgattttgggttctgttaatcgcttcctttcagtttttaaaaaaatttaatggtatcattttgccaatatatttttatttgaatattttgtccacctccgtctccatgtgttgcgatatgcttgtggtggtagccgaacggcacaggcgaccgcccatctgctggtggttgttaggtctggcaccgtttccgaccacagtgccaagccaacagtcctcctcgaagaagatgccgctttcgggcgagcctatcgcatcgctcccggttactgtatgctcagtactgtactgctggcccgcctcagcctcatcagtttcgtccgtggattcctcatgctcggtccacagtcgcttttcctcggccaatttggcacggtttgcacggcactccttcttgtccatttctgtcctcgacagttcacaagcgaactgaaacaggacgaaaatggaattgaatatgataagcatttttggatcggaggttatcacgaattttccaccgaaattattaaaaaaaagagtcaattttagcccacctgttggatgagttgtcgtgaaagtgcgttctgttcggatgccagcaattcgcgcacaacacgctccaagttggacaacgactcgtcattgttcgggaacatcaaatactgcttgatcttcggcagtgtccggcacagttggagccttaaaattatggaaattaaaattagtaaaaaaaaaattacaaaaaaggtgtaataaagacaaaatacgaatgatggaggggggggggggaattttcactgaatattttttagcaatttgcatttttaaactaataaaaaagggaacaagcataaaatttcaaaagaatcaattatattattaattctaacagaatctaacatttttagtttttttaattttttttatttgtgtgctgtaaatgtacagtataccaaccgtatgtttgagattgggtcagcggacagtttgagcaccgcgggcaaaaatttgtcgataaaaaattcacggctgaagtactgtagaagcaacggtacaatgtccaacagaaggcgccggcgatagcaactcgaatggtggccaatgtcatggacgaaaaagtcgacgatggtttgccgggcgcgacttgtcgcgaactcgcgcatcatcaacaacaatgtttgggcagcagcaattcgacaaggtaaggcacgctgaaaa

SEQ ID NO: 12759 - DNA, 3235 bp, Heterodera glycines
  unsure (1)..(3235): unsure at all n locations
gacggggctttttggcgcggagagaatatgatcaatggaaaagttagaggagcgttttcggggatgattgtccatttttttttattctgagagtggagtgaaaaggaatgagcaaaatctcggtatttatatgcgagcgccggcatggaaatggcgtgaaatggtgaatgaataataaatatttggacatggaaaaatttcaaaaaacttaaacaanactatggcctgaagagcagcacaccgccacccatgaagcacaagacgacagggcacctaaacgactcgggaaattagtcaagtcaagcgaaagacctcaagccctaaaaggcaaattgctgccaggataaacggtgctttttgtaattaaagcaaccgccctggttaacagcaaaaatatttattttaattatacggtcccaaaatcacaattaaatgatacggtccccataaagcacaggacaagtgaggaagaggagaggaaaacagcagatgtgcaaaaaaaaagtgaaaatttttaaaatgaatcgggaaaatgaccgggtgtacgatacgcgtactttggccacgcccacttgcgcaccaaaattattcccaacaagaaatcgaaatcattctttattcaaattttggaaaatgaaacgccccaatttcaacaatgctcttccaatgagtgagaaaaagcccaagcttcgtcgacggctcccggctgaattaaattgcgaattgatcagtttcgtgcctttggtctgcctatttgcaaatgtgaagcgggctccaattggccctgtttgctaccaattcgagtgtttccgtagtcggcgacaaaagaattttgaatatttggtaatttccctttttatttttcattttattaccaaaaatatttttagaagggtgttattgctttattcgatgtgatgtttgaggagaaaaggacaccgaagaagaagaaagtggggagactgcatctacaggaagaactgccgcatgacctcagccgaaatgagctcctgcactacctgtgctacggacgactgggaacgaatttgttcgagacttattttgtgatgagccaagcaacaaatgtaagcgaatttttaaatttttaatgacaacaaaatttttagtcaattgccattgggaatttgtttgggcttctgctcgattttgcaatgagctcaccaactccttggctcatgaaacgaccaatttgctgtggaattttctaccgtcaacatttgccgtggattctgcaacaaccgatgaacgtaatgctttctcatggcttttttccggaggtccgaagtgatggttttgaatttttttggctgttcaacccacacttgaaaaagtatgctgggtatgtcagaattctgcctgagcttagtcagcctgacaatttgcattttttccttagcattttctaagcattttacttgaccaatttattcatcattatcattacatacagatcggaatttgtcgatttttccattttctcaataaattgttgaaatgaatgaccttgtgacatatgatacacaaaaacaatacagtgtggggcacacgttgacactaattgggattgataggaacgaatattttttcttaggcccattggaaacttattcaggaatgatgacacaatgacagatggtattttttgggctaagctgtcataataaatcactggttcttccattcccttcgcataaattgcgcaccaatgagaccctcccttgtaatgtgggtcccggttcacaattagcgctgcgggatactgtagagtgaccggaggcggtaattgatcactggcgaagcagccccgaaagactcgtgcggtcccccggttttcgttcaagattaatgtgatttgcacgctgtccattcttcagccaaaaaatagagcaaagttgatggagaaccaggctgacaataagcatcaagtacaatgcaaacaccgcccagcaaatgacttgttgaaaaaaatttagtctttgcacaattggatgagtggcgtgagaccagctgacacttgctcttcaattaacttgtcactttttgggggagaggaggtggtggttgttgatgtgcttgttgtagacggaattgttttagttgttgtcgatgtaagcattgcctttcttcttatatattctgaatactcaggaatttcctctctacatgacactacgggaagagaaatccgaagaaggaataaaataacgccaacttttttggaatacatgtttattattgcaaaaaatgaaaacaaaagtgccttaaatagtgatgtcagtgctgatcgatcgatttttatccaacatcaccagcgagtcgcactcgcccatcaccaccaacattattcctccagcgggcaccgcctgattaaatttgatgctcactgctgtggtcccgttccttatcagatcaaaaagcgccgcttggtcgtctccactgctcgtcaagttgaacacgtaaatgcaatgcgtagtgccgaattgtgctagtgtaatcccgttgctttccgatgagttggcgaatcccaccgcttcgttcatgtcgttgaaggggcgcacatactttccgtttgggtagtccaagtcgtaggctgcttgagggtaggagcgcccattggcaattatagaaatttcacgcacattaaatggctgaaagttgaaggggctgcgtgaaacggtgccaacatagtcagcattggccaccaatcccattgtgatgcgccggggaatttgatccatgaacaaattagacgtaaattcaaaacgcccatgactgatgaacagcgacttcatcagcgttttcctcactgcatatcgtgccggcttcaactcaagctttcgcgcaatgtccaacgccaatccgtccatcagggacaccttcttcacatacattttcagaccgacaacttcgaaatggtagcgagtggctgcagcaacaccgggtggtgtgattaggacaaagtcgttgtcgttgggcaaaatttcaatgtccaactcacaaaagttgatcaagtagagaggctggttaaacaaatcggcgtcaattttggcaatgaattgtgctgttctgctgcctacaaacaggttgcgtcgtgcagtgcatccgtctcccacctcaagcacaccaccagtgtcacggtagtaacctgcagcattcaaatgcgagtctttcgcggtagtggaataggagagttcgtgtgaaaaatacgatttgt

SEQ ID NO: 12760 - DNA, 4089 bp, Heterodera glycines
ccaaaaatgctaaccatcgattctccaagccttgtgcagttttttctgcgtcctcctcataaacaaatttcacgtacacattgccaatctgtgaacaatggcaaattatttattgtgaacctgccaatttttaccatgtgttcgccaatgttttcacaaacctaaaagtaaaatttcgtaaattaagcgaaaattcgttcccaatttacgttcaattcttccacgggacctgaaaataaaaaattgtaatctcagaaaaaagcaattttgaattgccgaccataagtgcgttgaagttcggtgaatacttcctcgtaaaactcatcaaaatggcgctgctcaagctcatcctttttaccgacctctgaaaagttatgaaatttagtcacaaagaatcaatgaatgttttattaatagtccactagagtaaggaattttgaaatagtcggcatcaggaaaaaggtcgagatggggttaccaggaccaaatcccggattggccgggattgtcaggatcataggatcatcgaaaccgatcccgtctgggctcttcaagttaataatggaaaacggatggcgtaccgccggggacttcccggaaaagccatttttggggaaaacccagggactttgggccaataaaacgtgccaattttgcttggtttccccgttaccggaccgtcatcaaagcccggacctttcccactccaattttttcaaaattttggttccgaattgcttactgtcgaaagcgtccgcctgtgccgggttcacaatgggactctggtagaagtgcttgagcagcactgtatttgagaaggtaggtctgtggtgggcccgcaaacagttgtccccgtgtcgacaggcgccaatctaaaaaaaaccaaaaatttttttttggcattttaaaattgaaaaaatgttatcaaccttgaagaagaatgagcaattcactttgtccttttctgtgccgtaaatactggccaaatattcagctcctgacaggtcatcggtcgcatcataacgaggcatttttgcaaaaataggccaaggtaatcaacaaaaagcaaataagtgataaaattcaagaatacttaaacctcaccaaatctaacaaatgtaaatgatatatcattcgattcctcttggtatgtaatgcattaatccgaaagaatttttttgcggaaagcactttcatggacggtaaaaaaggaaaaaaagcggaaaaaaatcgttggcgtaaaaaacaaaacgccaatgcattcaaaacaatacaaagtcattgtcaacggaacgggccaactccgtctggccaactccgtgttttttacacaaactgacaaaagaaaaaaatgtaaaacaaaaacatttcatttttaacacaaaatcaattatgtatgcacggaattggaaagtgccgagaattcgctctaaaatggcggccgggtcggattccgagtccaacattgccaattttcacaaattctgcccagcaattgtcaaaatgtcatccaaatttgtttttttaggcggacgacaccgtggtgattgacattggcactggcaaagtgacggactacgtgaagtttgatgctggcaacatttgcatgatcactggtggacacaacattggtcgtgtgggcattgtcggacatcgcgagcgtcacccgggctcctttgacattgtgcacatcaaagactctgctggccatggccattcatttgccacacggtttgtttcttggggctggttttgcgtgtaaaacacatcctgaccaccaacacttttggtccctttttcggaaatttactcagactccgtaaattttggttttgattgttgcttatcttgaaaatgggcatcagttgtgcagccaaaccatgtgagacatggaaaattgggcggaaatgtctccgtttctgagtaatactcagtttttctagactataatccatctcttttaaagccggtatcagaatttgaatgagggaaaatgtttccgataatgagcaaaaaccgatcagtgataatcctctttttctgtccaggatgaccaacgttttcatcattggcaagggtgccactccgttgatcagtttgcccgcttccaagggcatccgtttgtccattgcggaggagcgtgaccgccgtcttgcgcagaagcagaaagtttgagcctgatcccgaagaacccatttttctgtcatggatgttattgttttgtttgttggcataaagaaaaagagtgttgctattttcacagagcccccaattaagggaggaaggcccgaaaatgatgaacattttttttgttacttttctgcacaaattagtgtggggggaggggggggggggcgttggcgagtgaaaacataatactttcttaaaaatgaaggccaaagttggaaacgcgacccatggcagaatgcatggcaccgaaattttaaatccgaccaaatctacttttgaattatactgacaatgagtgtacgtgtttgtttataaaagatcgaaatgacaaaaaaagaggagaaaaacaaagacaagagagagagggtggaggaaataacattccacacatttgcaaaacatccatcaaaaagaagtcatctcatcatatccatcacccaccaattgtaattaataaaattactgtgatttgtttgacatttatttgctgctgtgtttttgtttgtttgttgttgcttttccatgaccaaaaacataaaaaaggaacgaaaaaagtgggagaagaatattccatcatccatcaaatacaccatcatcatttatccatcaatcatatccatccattcacaaatcgtccgcttggtggtcagtcagtcggtggtcgtctgtcggtccctggcgctgtcccttgtctagaggaaatagtcgggcgtacggcgtgtcacgtgcggctcgccccgacgcggggccgggtcaaactgcaggaaggagtagttgagctcgtcgtccagctccaccatggccgcctggttgccgcaccggtagcaataattgggcgccgagaacacggtgaccacgttgcggtcatggcaccaattgtagcccttcggggagcaaataaaataaatttaaaaatgtaacggcagtttgcattttgtcaatatgaaacagtcgaaagcaattacgcgttttttcatgatacatttgctcaaattaacgttcggatcgaccaattcccaccactgtggtttttcatgaaaagtagttttttggtacccaatatttcaccatttagcaactttgtttttttaaatgcccccccccccccgaaatacgcacttccatgacgagctgatgtgctcgcgagattagcgaaatgccgttggcatggttgaacgtctcggagatgtcttggccaaaagtgtaaccggcaccacgcggcgaaatgccccaaccgccacgatcgtccgggtcggaccacagcaagtcgcacattgggcctaaacaaaatgaattgtcaccatcgttttgtaaacaaatggagtgttccccgttttggtggtgtttcatgtagaaaattaacaattaccttcatgtggcacttcctggagacgttccaatgatcgaatgtggtccaacgagtcgatggacggcgacagaccgccgtgaagacagaaaatttggccgtccaccaacgcagtcaacggaaaataatcgaacagatcggtgaaataattccacacctgaaaaacgggggaggggcaggaaattaccgacaggactagaaaaatttggacaaaaatattggaaacgaaaagcgcaaaatttttggatttctaattttcgaaaattgccgcccgtcagccaacttttctttccaattgtatccaaaaattgcgtatttgagtgacgcctcaccaaaaatttgtttgttgaaaaatggcgcttgacaaacaaatcaaccaaatgctaaaaaaacagacaaccttcgaattgccatatttgcgcaaacactcgtcatagaagccgtacacttgggtgatctgacgcgactcgtggttgccccgcaagatggtcacacgttcgggataccgtacctaattgtatagtaaaatgata

SEQ ID NO: 12761 - DNA, 4055 bp, Heterodera glycines
  unsure (1)..(4055): unsure at all n locations
aaaaatgtcaatatttgctaagaaattattagaaacgaaatgtacctcatttgcaactgcaatcagtgaataaaaattatttttgctcaattgttggctaaaaagtatgtgaccattcgtcactattttggcactttttcctcactattttagttaacgatttcaggatttttcgtcactaaaagtagcgactctagaaattgtacataattttctgccaatttaaaaaatacgctttacctttactgtcaaaatctcaattagacataaagagtaagcgaaatagttcagtgtcgaaatcacctgacaccttttttctaacccatcattctgctgtaaaagacacaaaaatccagtcaaattaaatgcattcgaatgaacgaagcgacaaataaatgtgaggagcaattatccgatcactttccattcataatgattgatcatttctcatttcccaataattctttcactttttctttcgctgtccgctgggcccgggattcatttcaagaggaccttttacgttaatttggcccgattctggtggcgacaatgacctaaatgaagtgcgatttaaatatgacgagacaaataaaagcaaaagctgttgccactcacccaatgcaatttccataaagctcaaaagcgattttgttcaaattgtccgtctttttgtcctcccattgaattgtctctccaatttggcaccgctccaacacgcaattaatatatgtatattcatcatcgtcttctgccttcaccttcaatgtcagcttttctttagtccgttcgttcaccaattcaaactgcgtaattgaggtgtgagttttgaattggattatgtaactgacagaagtggtggcacggagaaatgcctaaaaaatgagaaatgaaaagcaaatgccaattaatccaaatattatgaaaatattggcacacctttttgaaattgttgacccattcattggtttctgacgtataatcatcacgaaattgtttcggctgcccattttttgtcggaatgtgtaaccatttggacagaatttggccagcagaatacgcatttggcccatcatcagcaattgcatcgagcaacaaataatcggaatcgattgaatccaattgaatgcaatcggtgagaattgtcggcgaaataagacgacgtaaatcgtccaaatgatggccaacgggaacggtcaaatggcgaatgtttggcgcaaaaatgggccaaatttcacgagcaaaatcattccacattggctggacaattccgttgtcgtcgtgcacatcatccaaatacaaatccatattgatgcctttgtcaaaaatttgcttgttgaacgaagaaattcgatgacggaatggtcaatgtatcagaaaagtaatcatttatcacttaacaattctttggattttgaattactcaattcgaaggttgttaaagcgaattttgatgggcaacgaattgctcttcgtaactacagatagaagttttgttccattcttggcaattctgatttgtctccaaattgtctcgcttttgccgtcaaaatgtttgtccaccaaagcattgaaacgtggcgaaatcagtgccattttttggccgagttgacgacgacgaaaaaggggcaaaatatccatcaaaatgtcgttgcacacccaactgaaattgtcaaaagttgagcgtttagcgcggtgttaaaaaatgaaatttcataatttttaactcaaaaaattttcacattttcttcaaaatccgattcgttttcattgccacgcgaacacttcgccgtattccaaatgtcacaaatgaacccaacggtttcttctgatgatttgtttcagttgcagaaattgggcggtgatttgcggaggaaagttttttcttttttttgacgggtgccatttagaaaataataagttagcctaaaataaggaaaaattttgaaaaaattagcaaaaataagcgtggaattgtttttcatccttttttatatacctattcatgtatagggcgaggatttttagtggcaaaaaaccccaaaataattaactaaatagtgacaaaaaaatggcaaaatagtgacaaaaataatgacgaaacgccaatagtgacaaataattattttagtggccaacttccaaaataattctttctagtgatgaatagtggcactaaaaacgaaaattttttgaaaaagaatgtgtttttcgtgcatttctcatcaaaataaagccgcagaaaaatagttaaaaaactagaaatcctcgccctattcatgtgaagtcaaaatttcggtaatactctagtttgtcgcccccccctttttgtgaaaattgttttttgtttttaaaagtcatgaaaacatgtttccaatggtttttggggttgctcatcacgaatccggcatctgtttcgaccaattccgaatcccggacccagttcgaacaaaaagcagaaaactcaaatttttcgaatttccatttttagtctaaaaatggtttaaatgatcttttattgaagcactaatgacttaacttcgttttcatgtatttaaacaaagtttgaaccaagaatgtgagattcaaaaaattttaatttttgactttttgttcgaatttgggtccagggtttaagaattggtcgaaatggatgccggattcgtgttcagcgaccccgaaaacacttagaaacatgttttcatgacttttgaaaacaaacaaaaaaattctccgaaaaatgggggcaaccatctacctaaactattaccccaaccccattttaccaaaaaaggtcgcgccacacactagcgcaggtttccgagccccaatcttggcacttacatcagctaatcctaatatgctatggctataacaaaagtattggatcggacaaatttaggaaaattatagttaactattattttttcttttggtttacatttacatatcaaatttaattttttcagctttttccaaattattttcattcaacaaaatgaaggaaggccaaaagccccgccagtcacgacacaagggacgactctcaaagaagacgcgcattgtgcgcgagcttgttcgcgaggttttgtgtactcaattttgtgtaacatcataatcataatccgtcgcaaatctgtttggttgggctcactgattggttgcaattttttacatttttggttactatcgaaaatttataaaagtttaatcaggaaactaaaaattttttttttgccaccctcaatgtgtatccttgatgaatttttgctttaacctttaaaccgggtcaattttaaagaaatctcacaattttaaggttgttggtttcgcgccgtatgaacgccgtgtgcaagagttgctcaaaatcaggtttttcttaacccattcatcataatggaaaaaaacaacaacaaaaaaaatttggggaaatcctggatacgccagcatttaaaattgatttcgtttggcaatccatttgatgaacttttcaacggattggcctttgaacccggacctgatgcatttctatgcgtcaaatcgatggccacctttttgtttcttagaccatggctttttttcttatcaaaatatacttgtcttgggctccatcgaaaactgttaaagtctcgggaatttataaatgcaagaaaagagcaaaaatcacattaagaaaaaatttatttcgatttgtaccaaatgaatgtaggtattgaccaattaagataaaaagttacggtctaaaatcaaaataatgctatcactatcatgttttatgataacgtggacttaaaaaactttaaacgtggcgtcgtttttgggcaaaggcgccaatgttgggagtggctcatttaagtttttcaaattgttcactcgtaaattcgtgaatgaggtatcccccccccgccccctataaccagaaagtgtaaccaaatttaattatgaaatttcatttcccatcacaataangcaaggacaanaaggcgctgaaagtcttgaagaagcgcatcggacagcacacgcgggccaagcgaaagcgtgacgaaatgcagcaa

SEQ ID NO: 12762 - DNA, 1286 bp, Heterodera glycines
ctccgtcgatgtgaaatgcggaggagagatggtcagacttatcggaatcggaattcaatgcttaacggaggacagaaaatgccaaacaaatcgactccatgccttcgaaatgccaattcggcagttccttacccgagttcaaaagtctgtccctcatgacagtggcaagttcaacgaatgcgtcgtcacagtttatgcccgtttttgcgctcacttcgtaaattgacacgccgattttctttgccaaactaaaaaaggagtgtaatacttaacaataaaaatgggtacttttcggttttgtgtatacacctctaaatttaaaaatatgtacaaagtttttttgatcgcacacagggaatagtttacccttaaaatggcaagaaaccttagattttttagagcaaattattccttttgtgccatcaaaaaaacttagtggatcttttgttggcatatttttgaaaattttagtgtgtacacaaaaccgaaaaatacctaaaaatgtataaaaattcctccgtttacttttcggcacggtcaaagtccaccttccgctcggagtccaagtcggctttgttgcccaccataaggaggacggcattttgtggcgcgtgttccttcacttgtcttagccaataattttccaaattttgaaatgacttttcgtttgtctaaattccatttagtaattagcattaaattacaatttgtgccaatgaaccgaccaagtcgtacacacacatcactccgtgggccgagtggtaatacgaattgtaaatggtccgatacctttccatgcctaacgataagcattttgatgcaaatgaaacggagagttaacacattgaaatacctgcagtgtcccttaaagctgacaattaaaaacgcaaggcaaagtaaaacccaccacaattccaaccgaattttgtcccgtccaattttgatggttttcaatttgaaatcgactccgagcgtactcacgtggtcagaacggaaggaattctcggaaaagcgcaacaaaatgcacgacttgccacagttgtggtcgccgacaacgacaattttgaacaaataattgtaactcatcggccaaaaggacagaaaatcaaagcaacatcaaaaagggaaaatacgaattgaaattggaaagtcattgaaaatcaaatcgtaagacgacgaaaataaatttaaaaaaacagaaacctatcaaatttattttatacataagaaatgtaaaataggtaacatattttattatcacaagaaaaaggaatttgtaccataat

SEQ ID NO: 12763 - DNA, 3784 bp, Heterodera glycines
tagaatatcaaaaatattttttttttcaattcctataaattaccggcaataaacgactccccaaaggtatgttctgaaccaattgttagttgcagaattcgcgatgtattttcggatgagtattgggtgagggacgggaagaagtccgacaagtgttccatgttggaggaatttcagaatttcactttcatcggtgagccctctgcaatggaaagggactgaataatgtgagtccattaacccttttagaatcccatttcggacttgtcaatgcaaattttctccacttgcggcaccaaaatctgcaagactcgcatgatcgtctgcagtggcaacttcttcttccacgactccacccattcacttgtcggtgtccattcctcctcaatggcaacagtttcgttcgtctgttgcccatttttggctccctcctcccgattttcgagctgttttagctgttcaacttcctgttgtgtttgattttgttcgctcgttcgtttgctttccaacgattcttccatcgttgtcattgcgccgattgccggcgtttgtgccagtgatgacgattttagctctgacaattaatgtgttattatttccagcccaatttcattggtaattattcctttccgaccaatttgttgctgtttcgcccgttctgtttgtccctccgtttcttcttctttctttgtctgttcctccacggcttgctgttgttcactgtcctcattcgccttcaaagtcgcgccttttttgcctttcttcaaattctgggcaattgaaacggaatcactgctcaaattggccaattggtagaagacttgtcgttttcgaatgattgtatataccaaatttgaattgcctaaatgtaaaaaaaaagtattttgaaaaaggtagaaaaaagtaccgtcaaactgatattggatgatgttgttgaacaattcaagcaaaaagaaaatcaaatggtgatttgttggagttgagaaaatgaaccaaggagtgctaaaggaaaatttgaatgtaaaaaaacaactgacaaattgggtggacctaaatgcttcaaccaaatgcactaatttattagcagtaaccatcgatagcgatttgagataaggagaaactgaaaaaacgaattgaaaataatgcaaaagcaaaagaaaactttaccattcacgacaattgtaagaagacaatcgaaaagtgactgcaatttgtgatttccgctggtgattaatttgtggaaaacctaaaacatttttgaataaataaaaacatgattaaaaataacaattatcagcaaatcggcatgagatccggtaaaaattggcacgtcaataagtcctcgggaagtgaaaggctaaaaatggagtaattaatataatttcaatcgtgttttatcagtcgaattttgacttgccttattcaatcggacaccgaaatttctttcaccactcaaaagaagaattaggaaaacgcccatatgaatcaaaccaatccgagcttaagaacaaaaattcaattaaaagggtacttagaagaataaaataaaacccgacttgggtccgtcctcgaatcattgagatggaacaaaattgggacgagaagttcaagcacatcgctgcttttcagcacataataaaggaatttctgtaacaatccgataaaatagtgaaaattgtagccaactgtaaaaaggacctggttgtactcacaacatttccatagcaaaacaagcagttcctggtgcagttcaaccttcttcgtggagttcggcagataagaagtttgcaactgactgttaagaagtcgggtgaacccctaaagagaaaaagattgaaattaataatttgacaaaattattcagattggaccttaagcataaactcaaagtcatcttcacggtgaatacgcgacaagtaattgacaaagtaattctcaacataaccgttctaaaaaggaagtgaaaatgaattaaggggaaagggacacttcgtcagagttcggctgcgagtcgcggtcgagacaaacgataagcaactgaagggcgacttccaccaaaggttcacgggagtcaccaaacaacaaataattgtacggcatgccaaacccaacggggtcataagcacagactgtgttcaacagagaagtgaacagcggaagctaaagttaaaacgtgtctttgggttagcggttgtgacgtgattccaggggaggtgggaagtcaattccgcatatcgcaagggaatcggaagcaaattcgcataattttcggcgaatcaataaaaaaattgagatgcaaaaaagttttccaatattgaaatggagtgaaatatagaagaaaaaaacacctttttcaccgtggcaaaaaaaaatcagaaaaaatatttgttttttcaattggaaagggattaagttgtaaaaggtagtgaagagcataatttaaaaaaaagtcaacaggaatttgttaatttcccaaaatttttgggctctgataggggaggagggaagtcaataggtcaaaaggagttcgaatcaacccacctcatccctcccccctttttaggggacgggacgaaatctcgccgccggaatctcgccggccgaaatctcgccgagacaaaatctcgccgccaaaatctcgccggctgaaatctcgccggccgaaatctcgccgcagaaatttcaaaaaaaaaaaattcaaacttagaaatttttcaaggaaaaaattttagaaaatttttttataagaaaattccaaaaaaaaactatttgctaagtttttttgaaaattaaaaaaaaaacagtaaattttcataaaatttcaaaaaaaattgctgaaaaattgctgaaaaatttttcaacaatttttttatttaaattttcttataaaaaaatttttctaagaattttttccttgaaaaatttctaagtttgaaatttttttttgaaatttctgcggcgagattccggcggcgagattttggcggcgagatttcggcggcgagattttgtctcggcgagattccggccggcgagattccggcggcgagattccggcggcgagatttcggcggcgagatttcggccggcgagattccggccggcgagattccggcggcgagatttcggcggcgagatttcggcggcgagattttggggtgcacccgaaaaaaggaccccaaaaacttaattttttcaatttgaaccaaaaatcacttgccatttggtataaaatcttaaaaaaaacatccgtatttttgacagattctctcattcatgcgccccgtaaaattgcttgaagggcaacaaaaaaatcacgaaattatgtagttggaaatttgtccccacttcgccttgcaaaaaatttccttttttatttttaatctatgaccctcgacaaaaggaaactctaaacccatatcggctctatttgtgtttaggcccataattttatttttagtttcaaaataaaaagctaaagcgtgaacaaaaaagggaaagtttgaattccgactttttgtttgaattcgtgaaatgaatgtcatatttgtgattgctcaatgaccccgaaagcaaaaaaaaaaaattatggggcctaaaccataaaatagccgcaatgtccctaatatcccgtgccccgccccctctcactcgaatacaatgccatgcatttgcgtagtctggcaccgctttgcccgactgcatcatcagccgccgtcggacggtgtccaacggataggaaaagagagcggccaaaaaagcgggacactcaaatcaaaaaaaa

SEQ ID NO: 12764 - DNA, 2383 bp, Heterodera glycines
gcaaagctcaacatgtcattgtgagggaacttgacctgattatgtatttggcttttgcctttctcttcatcggttatggtaatttttgctgtgtcttctgtaaggattcgctgttttatgagtcatcgcttggtccgccggttcgtggacccgaacttcgctgtgggccagcgaatggccccaatgtccggtggaggaattcgccgtcattttctcgctgattgaactgttcgttctgctcattggcattcgtttctgtaagcgattgaccaacaaatgcaatttaactgactttggtctttttaaggttataaggcacggaatagcaattggacagaacgctaccaattcactttggccataattctcgaagctgtcgtttcgttggtgctcaattgcattaggtgggcttttgatttgctttaattcttagttgatcatttccttattttgataattatacaatttttaatccttcacttttgttaggttttctttcaacgaagtcggctcccgagacgcgctttttttactgtccgttcttcagcttcatctgaccatttcagtgaacattgctacgatcataacaccaaaatttatggtcctattcgtttgaaaatccaaataaaatgaataaattgtctcagatttcttccgactcgcaccgacgcgcgttgggagacatcgccggaatgggcgtcagcggaagagcgcacccatcgctggccaaaatgcgcgagaatttgatcaatggaaccatcgactttcaggaagtgccgatcatcgacatgaaccccgaggacattcgggttagggggggggagagacttccatagtttgtccctttcgcttttacattctttccacaggctgagctgaagagagtctacacgcagttgaggatgtacaagctgaagaacgcgtaccaggacaacccgcacatcagcaaacggaaaggcggcggtgccgtaaagaaaagcgccgcgggcgatgcgactgtaagcggaagactgtcaagcggcgcgggccttagcggtgcgggactaccgaagggcgtccgcggaacggagggctattgtgccgtaaaacgcaattccatcccccgtgaggcgacaccgaatgctgttacatcgccaaaggtgcaaagaaacaaatgaaaaagtagtgaccgtgccgtgccattttattcttggcgcattctttgaattaatcgccttcaaataaatataaattcgaaagcgttaacgttcgcatttggtcttctgtgaaggtgagcaggacttctcccaatttaagcaattgcatggcgctgatcgcccgcctccgctcgtttttatggacgaagacaaaagcggcggcgatttgacggtggagtcggcgcctcataatgtccacctgctgaccagcagattggcaaggggaccgcctaccatcgcaactccgccagtaacctcaatgggcacggactgttcaattcgagtctaatcggacgacaggacgaagaatgcacattgaaaaaccaaaatagagcactatttcaaaagaatcagggacatttatttttcagctttcatttttgccagaaataaaattatataaggaaatcgtggaatatttgtaggtaggaatttttctgtcgctgactatgattaaaatatgaggaaagaacttttttgattaatattgcaattagttggctgataagttgatttgtcacagactcagagaatttcaacaacttttatcctttgacaaagacaaaaaacggtaacaacaaaacagcgaaggatgcatcttcggtcgcccactttaagttcgaatcgcttgcatcatcccaacgcctccggggcctaaaaggacggaatattgtgtatgagaagaaaacggaaataatggtgctttgtcccccccccttttcgaaaaaaatttttcaaaaattttaatgtcatacataaatagaaatcaacatttgcttgcttgtacaaggaccagggcgtggatccaggtcttgagaagcctgcatttattctggactgtatttttgtacagtaaatctacgtccaccatgtcacccaggcttttgcttttttcaaactactgagctaaaataaaatattaaattcaagatttctatgcttttttttttgattttccaaaattccctccattgaaagatcgtctgaatgaatgatgcacccatttgcccccgaaaagaagggaattagctatttaaaaatgactgatctttttgaacccctgatgggtttgattaattaatttttttgttggccattttttatatttgcaaaatttcccttcaaaatccaacaaaacccccaaaaaaacaattttttttttttggtcttgattaaacaaaaatttt

SEQ ID NO: 12765 - DNA, 1826 bp, Heterodera glycines
  unsure (1)..(1826): unsure at all n locations
gatagagaaagaattctgcatctttctatagtgaattaattttgtctatggtcaaactcaaaangttgtaaataataataaaaacgtatttctttttcctctcattttggcgtactattttcaagtctctaacacatgaaaaaacatcaaattcgcaaattcctataattttggttatacgggtacaaattcactttggacatttagaaccaatagaaaaatgattagtttcgcattttggttgaaatcagcagtttaggacttgagttataacgtgataaaaatttgaaagtatcacaacttttttctgagatgtcaaattgcttagcattcgcttagaaaaagattctccttttcaaaaactttttttaaataccaaatttgttcagtttagttgggaatgaagcgagttatggcagatcaaaataaaaaatacaaaaaagacattttccagtgtaaattttgaattaacgcgcaaaaatttacgccaaatacgctatttggcgttatgagcaattttgtctaacactgggcttgacccatagtgacatacaatacttaaaattaaaaaaaacctttcaatataatttaaatatataacaaatacttttagaataccgtagtaacataaatttgaacgttctgctgatttttaggagcttccaattaatgaatggatctaatttttccaaattagggtagaatttttcaaatcattaaaaaacctttaaaatggctgaatatatttttaaaaatagtttcagcaaaaatgcaaatttgtattattcataattttaagcgaaaaaaggaggtaaaataattttcaacttttttgcttatttttggcataaatttaccaatgctaattaaattttttgtcacttggaatcatttttcatattgtctttgcctccggcagatttttaaattcaaaattgatgaaaactgcactttttgccatgaaaccatccacgagcaaagggattcgattgcgtgagagaattaattaatgaattaattatcatcggtcggcttttgtctctttttccgttcggttggacatttgtcgcagcagttgctgagccaaacacaaaaaaaaaaaatgcatttatcactttgtttttcattgtggttaattgactcgaacatatgatatccctcggggggggggggggacggaatttggaacattttcgaaggggggggggggagagaagaagcagatcgatgatatccatcaccacaagtagagggggaagcaagcaatgaaaaaaaggacatctgctgacggatccaatttcacccctaaaacgccggagggaatggcggccaaacgaatgcatttttatgtaaatccttccaaaagggagacaaaagcgtgtgatttccaattatttatgtaaatttgcaagtgccatcttccaacagctgccttttttccattttttgccatggcatttccttccgtcgagtggggggggggggagggcactcggagaagggcactctttcgctcttttctcagttcattttccttcgttcttcgacttgcctttttgcacctcataacgagttttcccgctgacaatttccactcataaaatgttttgttatggcactttcccacaacaaatgcttgccaaattcgttttcttacaaattcgaaattttccataaaataattgtttttgaatttcctctcacaccaaaaaaatggaagaggaggagaggaaaagcgggggaagtcgctggagacggaggcgaaggcgcggacgcattttcagaataagtgccgggggaatcgacctccgcttggccattttctc

SEQ ID NO: 12766 - DNA, 1157 bp, Heterodera glycines
tttcaagcgacgatacggtagccgtacatttcgtcctttgctttttaacggtgcttttcagggttttacattctccaggcttacgttccaacgtgggtcttctgctgaattattttttattccgcttttatttaagttatttgaccatcatcgtttcttgggtcggcttttgcatgggtctgtattttcttttttttgcaatttctctatttgtgcatttttattttttaaatcaattgtcattttagaaccgaaggcactcccggcacggacaacggtgtgtgccaattcccgcccccccccccccccttttgacatttcccttttctaaggtcggcgtttcctctctccttgcgcttactctgcaagtacgaaaatcaccagtcaaattgttaaactttgttgttctgttgctgttgtttcagttcggcaacattcacaaaaaccttccccgtgtttcttatgtgaaagcgatggatgtttggatgttgggatgcatttcctttgttttcggcacaatgatcgaattggccgtcgtctgttacatcaccaggcaattcactcttcttcttctcctgttggattttccattgttctcataattcaaataggcgtcaaaatataaaccgttcgagacttggggggccgcgaaggtcgtcgagtcgcggcgattccctctcggcgttctcccaaaatttggcccactccaatcgccgctctttcgctttcggcgacggaccatcgccgacgtgggaaagcaatcagcagaaatgtcagcgttaattggttgtttgtttgtttacattcgctttagtgagttgctgctctgaggcgactttattccgactgatgcccacgcaaaaggggggccaaccgaacactttgagaacgcacgcggtgcccttccgaaacggcacaattccgaacagtgccaacggcggcggaacggtgcggagacaaatgtccaactcatcaaattgtggtaggaagaaaaacgacaaagcaaaattaatgagaaaattggcaaaggaatgtttccaattgcgagacgaaggccaaagcggcgcagcgataatttcgacgagcgctttcaagcggaagacgaaccattgaataggccaatgcaaaacgatggcacgccaatggaggcggaggac

SEQ ID NO: 12767 - DNA, 2263 bp, Heterodera glycines
  unsure (1)..(2263): unsure at all n locations
gcaataaatctttaaattttttggccatcggtcaaagcgaatcacagatttcctttccaaacgcttcaagacctactgaagggagtgggaaaatcccctggagttcatcttcgccaaatgcagggtgtattctgttgaggaacgttcagttgcggtgccatcgtgttggtgcgttgtgagccgactgactgtgtcgatgctttgctcacgccagtgcctttggttgtccccgttgttggattcacaatttgatccgtcaaagtcgtgatttgtgcctgtaaagttgaaatatttaaattaatatcagctgcattattattaattgcctcagtgttttgattagtgcgcctatttaatgtcctaactgctcggttcattccgtcttctaaccttaagacatccagatgggctctttcaacgtcattcactttcacttgggttttgccaacccaaaaattccgatcaatgaccgaaatgcttaggtcattttggtctccgccgcccccccccncccgccatttcgcagtctttcccccggttgatcccttctccgatgccaatgccttcggtcgatcgtcctccgcggccatcactgatcagcaagtggcgatcgatcggtgacgaggaggaaaatcgaccaatcattcagccggaaagcatcgacaagtgccttttgccaaatgcgttctgctgatttcgctcgctttcccttcagattttccattgtcgtcttccctttgactttcactcttttcaatgtgatcactgatcactcccccccttaaattactgccctttctctgttcagctgatctactggtgctattatttgtccctcggcggtcaattcgattggcaaagcaatggcactttaatggctcagcaaaatggtcatccgatcgagcattagcaccgatcagacaaagcgattagccccacttttacgatcgtatcttttagagttctaatcccaatcattttgcaattaattgttttgttttttcattatttattgaaacagtaaaatgcattaatcaatcagacattctgtaaattgatttatagacagcagaaagacaagcaaattaaaattgaattcaaatggaaatgcactaattacagtatcccgcttgccgtcgtttactgtttttagggcggtcgttgttttggtgcatgcggctgggaactggcaacattttgcagctgctgttgctcagtttgggctgtttgctcctccccaagcgatgccatcgtcgggagcggcacagtgcccgcttttgccaattggtagcatgaacaggagatgatggagacagtgtcattcggctgttgctgttgtgagttttgccccgccatataaaatggtgccagccgattggtgctggccccggccacggggtgccgacgacgccgtggcaacgacccatccaaagggtcgtcgtccgctgctccgcttggcgtcggagacggggaagaggaggngctggaggaagagtaggaggacgaggaacggcccttcagataatggcgccggccctggagactgtcgatgggcgcctgtgttgggacaacgacgcgtttggtcagctttatcttttgccgtcatttaccaatccctttgctgccagccgcgcctcccttttgtctctcctttcgtcttcggtgtttaaagtcagaaatcggagcaccaacagattcattgctgccgaaatcacctgtcattaacttttttatttacgcattttggcccaaaaattcatacggtaaggccaaaaacgatgaaaatcagtgagaaaatcacatattctggcctcttttcgagtgcaccgtccttttggagggcgacaaagtcgccaaaaccaatggtaaccaaagtgatgaagcagtaatagacggaatcgaagtaggacctaacaaattagcaaaagtaatgggggggggggggagagggactgacaaatgagtgaatggcaaaaatcaaaaacaaaaccaattttcatagtgcgaaaagacccaagcgccggtggcaatgcaagcggtgcttagcaaagagcaaacgacgattaaatccatgggggagacgagggggggacgacgaagcagcagcttaagccgtttgagcagaatggagcagaaagtgtttagacgttcaccgattgattggaacattaccaaaccctaaaaaaggggggggggaggaattgaaggaaatatttacaagattggacaaaggccgtctcttaaagtcttggctccattaatt

SEQ ID NO: 12768 - DNA, 1214 bp, Heterodera glycines
  unsure (1)..(1214): unsure at all n locations
tgttttaggcgtattttcacgtgtcttctgcattcccctacttgttactattagattaacaataagatgtgttttcatcttttacacgtacgcttgttgtactaatatagtcacttgtttatgtttttatgtttcgccaacttatttattgaattttccagttttgtgaatttgcaatatcaattattttatatgtctatgtttacatgtatttttatcgtttcttttacgtgtttatttgttctatttgcacgtcttttttctgcgttcaatatgatttactacttgactaacaaaaaatgtgtatttactatgttttacacgtgcgctttgttatacaatactaacatgttttaacgtttttttttaaatttcatcttattcattttattattatatacggtatatgtattttgctcacatagttatttaaatattttctatacgtgaataaattttgtcattagtttacgtgtttgttccgcatacctatcttgttttcacgtgttgttatgcgttccaaagtattttacaattcagcataacatgtatttcacgtatttttactgcttgtttatttattatttgacgtctttcattcacaatgtttattgcactaacaaattttttcacacgtctttttctcacttgttttgcgtgtttgtctgcttaaatgtgttttccatgtcctcttttcaggtccccactatattaagttaataatatatattgtatatttgcgtatttttacttctgctcatatatttttaagtatcctctcattcaatgtattttacatgttcccccattctgtttttgcgtgtacttcattgcccaatgtttttacacaacacgtccgctgtcctatatatgtgtgttttatatgtttcccatttatgtgtagttccttctcaagtgtttttaccgtgtcccgacatttgcggaatgctagtgatttgagccacattgattaaatgatggtggattgggcagaaaattgtggaggggctgaacggcccagtacgaggccgcgaagcggccgagcgagtacctttgacgcaaaagttcaacagcccaaggaacacaaaaaggtagaaatgctaaagaaatttgctgaggttgagtcccagtgtttgtaatgccggagatttgagtcccagagattgaaatgctgctgggtttagtttctgtgacngcaatgttattgagagttg

SEQ ID NO: 12769 - DNA, 2691 bp, Heterodera glycines
  unsure (1)..(2691): unsure at all n locations
ccgtcacatgcttcggccgttttgccaacggcacaaatgaacatcgcgcaaaatggcgccgccggattgtgtcaaatgctttgatgttccaccgcccggcttccatcattccttggcattggcaaatccgctatcgccatccctcttatcccagtcttggtcaattggtacaaatggaagactataaaaaacaatgatcagctttttaataatcaaaaatgggtcgttcaccttaaactatttttatttagcagcaatatcatcatcattatcatcatcataaccacattctttcggtgtcccccgcaaatggacggcacacaaacccatttcctttggtgcaaacgaacagacagaatcatgcctataaagttggttataattatgaaataaatgaaatttacattaatattttcttaattatttttatggccatctaaaaattaaaattggtttttttttgatttgcgatgcttttttgaatattgtccttgaatttcacaaatttgtcttgtttttcattgacaatgaaacctttttttattaggcggagataaatcgaattttttgactgatcaaaaaatgaaatcgtaaaaaaaaatcattggccaaaaataccttgaaaaatccccaatcattattttggaaaataaattaccagccactaattaatcatccacatttctttgtaacaattttccaggtgacggtccgactgagcaaagatggaactgagctcaccgcgcttggcccaacattgacgacggccaagcagaaggcggccactttggcactggcacatcttcgtcccgagttggagcagttgaaacgcttgttgaaggaggcggagggcacagcggaagaagaacaaattgtgccaaaattggtgaccaaaaatgatggcacagaacaacgcagcaacaaaggcaacatttgttggattgtgatgccgtaccaaaatgccatcgttcattttcatcatcaccgactgatcaaatggatcaacagcaacagtatgattcgcccctctccccctttctctctctctctccatctctctttctctttccttccgtctctctctctcaccatctctttctctctccccccctttctctttctctctctctctctctctctctctctttttctctctttatttcttcccctcttttctcctctttctctctctcccgccctctctttctctcttctctcgcgcactctctctctctctctttcttcccctctttcctcctctttctctctctctcatgccaattttcattcagccaatgccgcagccgggcaatcatcaatcatgaccactaccaatagcacggagaacaactacaataccaatgctgattttgcgctgccatcaacgcccgaaaatatgcaaatgccaatcatcgacatgtttgttgtgccacccgaggagcctgacatcgtcgaggctgacaacaatgacaatgctagccaatggaacaacaacaacagcaacaatccgatcatcaatcagtgccaaacaatattcatggaaaaacaatggcaccagcaggatgatgaggaggaggaggaacagaacggcagcatcgtcgctggccgtggtggggaatggcaccacaaagcaacggagcaattagcacaaatgccgcaaaaacagcgacaagcggttccaaaggcgttgggacgttcgccgacgtggagcagcagtgcttttcgtcaacaacaattgatgaacaacatcaacagtttatgcagcaacaacaacaacggtgtacccatgaggcggcacaacgggaaaacagcgacagcaccgacaaagtgttgttgaacaacgataatgattatcagcgcttaaattgggtcaatccgccgtacttggaagtatacaacaaaattgtttatttattaaaatatattttcaaatattaaaaaaattaactaattaagaataaaagtatatttgtaatgttaaattttatgtcgattttctctgagaattttattaaaaattctttaaaaaaaactaccatacttactgaaaattagaacccctggggttctattttccaacccccaaagggagggggtctaatccagtaattaggctatatcaaattgaaaaaatttattaaaaatttattttttttaaaatttgtttttgtaaatttattattttcttcaataccctgtagatggaagaggaacaagctgattctttgcatgggcaacatggttatgttacacaccaccttcagtgcgcgcgtgtccgccgcccggcgcgtcggagtccgccgactcggtggcgccgctgaagtccgaactgtgcacaaagcccaggcgtcgtctgcgaccgtctaggtgtgtgtgtgtgtgtgtcgcgtcgtggaaaatgccggaagcagctcgtttccttcccccacccccggttgtttcccctcatatcattcccccacccactcgaaaattaaaaacaaatttttcaaaaaatcgaaatttttttatgagagaatatcaagaaaaaaaattaaaaaatttttagcgatttcaacccaacattttccagcttaattttttataaatcttttttattttaaaaaaaaaaaagtttgaaatttcggtctggcagaatttcgnctgcgacaagaaccgctcttttagaaaaaaatagcaaattctatttca

SEQ ID NO: 12770 - DNA, 3332 bp, Heterodera glycines
ccctcctcttcctcctcctcatcctcctccggaacgtcctccattcctagtaccattgccacgcagaatgtttggacatggggtgggtcgtcgcgtcagctaattgtttttattttttaattatttgtttaaaatctgttttgtacaatttgttgactggtcccctgtaccattgatggatcaagcccattgacggctctcaccacccacccaccaccaccaccaccaccacttcgaccagaagtcgaaagtatgcccggagcagcttcttcctttattattattattattattattaatattattgataatacattttctccaattagcctaaacatatcatccgtttgctgagccggttggccctgttgtgtttgaagcacaggtggcggtgcttgtggcatttgaaccaaaaatgactcaaattgtgccgttggcatttgtacattcattggcaaagtttgctgctgggcagcgggctgaaccggtggctgtagctgaatttgctgttgctgctgttgatttggcacagtttgctggggggaggggggggggggggtactcaattcgtacaaaggctagtacatcggcaattctcagtgatcaaataccatacaaattttttttaaaatgtcttttttaaaaaaaaatttttgaaattggaaaataatcttttttaagaaaataaaaaaactgaaaattatactttaagaaaaaaattaaattaaattttttttgtgtaagagttgcctttgtacaagttgtcacaacattctactacaacaccatctgctgctggtgctgctgctgctgctgaaccggcaatgtgtgattcaacagaataggcattgtgttttgccacaccgtcgcttgctgctgtgttggttgctcctgctgaaccgaaacgggttgcagctgcgttggcatcgtttgctggaccgaaactggttgcagctgagctggcatagcctgctgaaccgaaactggttgcagctgagctggcatagcctgctgaaccgaaactggttgcagctgagcaccaatagagcgaatgaacaaaggcacctgctgctgctgctgctttttttttttttaatatcccaaaagttataatccgatttttttgtactgccccaaacctgtatttttggtgcgaaaaaagggttaaacaatattacgattgtaattagtttttttactaaaattttgaaaaccaaagcattagtactgttgaatttaaaaaaatggggggggggggttcaaagggcagtacagtattttaaacagttttactggaggccgctgtactggtgcgtttgcattgacttgatttcgctgtgtttgccttccccgccgccaaaaaaataaaaaatttatttattattatattttttttcttattcaatcatatttttttataagatatgtcagaaaaatattaattgtcttttagaatttaaatttaaaaatttttaaacaatttaaaatttttaaattaaaaaaaaataaatgaataaaaccaccgtcttgggagaaaatgtccatggcgaggatcaacaagatgaggcggaggtggaggaaattgtactgtccccaaatactgctggtgtacaaatggccatgggacttgaaattaaataaattttaaaaaaatcccgggcctcattaacttttcttagttagacttataattttttcattaattctctttatggggggggggggataataatttaaaacaccttgcgcacgctggataggacgatgtagacgctgaaatgagtccaaaaatgattattcaagaataaaaacaaaactatgaaaagaaacgaaaaataatttcaaaattattaattcgatcgagaaatttttaaaaaaattaatttgtgcttttttcacctgttgtgccctccactgccttctgctgatgctatttggcaattcatcacgccaataccatggcatttttaattaggaaaagacagccaatttttttttcattaattgagaattgtttattttttatttttaaattaattttattttcattattattatttttaaattaattttattttcattattataagtctttttttattaattgagaattgtttattttatttttttaatttatttttttcttcattattataagtcatttttttattaattgagaattgtaatgattaaaaattaaaattaaaatatttagcaatacaattataaaattatatttttattatttatttgcttcaattaaaatattattgcgaatcgcctaataataaaattggccagaatgatttcgctcctcaataaataaacaatttctgctgatttcgtttttttaattttttttttacttgatcatttcatcaatcccccccccctccctttcaccccgaaaattgtttatgccctccaaaaaatatcgtttatgttttcctctccctcatctcaatccccgcatttagtcaaatcaatgtatttaaaacatacgccaataatgaccccatatggccaagtggttagtgcagtggatttgaattttccatcgggatttagccctttagacgcggtggtatttttgaagaatttttaaaattcgaagatttttaaatttaaataaatttcaaatattttaaaatataaaaaataagacgtttaattcatgaaaaaaattctcgcgcaaagttcaataatagaatggaataacgaaaaagatccaaccggaatggggggggggggcaataggtttgggacatagccagtaccttttggcttggactcaatcaatcaaatgattgattgggaaaaatcgataatttaagtatgaatatattctacttatacatcccattatgagcgctaaaattatcagagtgccgaaaatcgcatgtgatctaagcctagaaaaaaatggtctaagtaaaaatcgtaattacgctcaaaaagcttctcaaacaattttagcgcttccaattccttctacaatcgcctttatacatcccattatgaacgctaaaattatcagagtgccgaaaatcgcatgtgatctaagcctagaaaaaaatggtctaagtaaaaatcgtaattacgctcaaaaagcttctcaaacaattttagcgcttccaattccttctacaatcgcctttatacatcccattatgagcgctaaaattatcagagtgccgaaaatcgcatgtgatctaagcctagcaaaaaatggtgtaagtaaaaatcgtaattacgctcaaaaaagcttctcaaacaattttagcgcttccaattccttctacaatcgcctttatacatcccattatgagcgc

SEQ ID NO: 12771 - DNA, 1652 bp, Heterodera glycines
  unsure (1)..(1652): unsure at all n locations
cgcttacgaagattttttttgagtggaaaagttttaaaaaagtatnccaaaatatatgcattaatgttcccttaaaaaaaatattttttgttttttctgcncanaatgctnngnaatacgggcggatgcatttatagttntaagctntcttaattanagccatggatttaattcctttngaaaaggcgtgaaacaatntaaagctttttcaggctccctttttaagttcattttccgtccgcgtgcaagctatcccgacgggagtaaatcattcttttagtttccgagcgattaatgggtactgtaaatctgtagcctgcaaaccggtgaaaacgcacaaatttaagcttcacggaattaaaaatttgtcgcagcattgaaaaaaatttattgcattcactttaaataaggaaaattaaaatttttttcgacttttgtctgtaagtcctggtatttttttgttaaaaaattgaaaagtggcaatcgaaactgggtcgaaaaaggcctgtattttggacactttctataaattttgaaaatccaagattgtcatacaaattgaattttaataattagatagtaacgagaatggacctaacttttctaaaaaaatttattgaaactttatcaaaataattttttgaattggcgatgcacattccactttgaaatggcacagagacgattacagtggtatttagcgacgatgccatcgtctttgctcggggttgtgctatcgggagaaatatgttgattttattcagaaaagattgatcctttttcagtactatttgcatgttacatttcgcttacgaagattttttttggagtggaaagtttttaaaaagtatccaaaaatatatgcattaattgttccctttaaaaaaatatttttttgttttttctgcccaaaattgcttggaattacgggcggattgcattatagttttaagctttcttaattaaagccattggattaattccttttgaaaaggcgtgaaacaatttaaagctttttcaggctccctttttaagttcattttccgtccgcgtgcaagctatcccgacgggagtaaatcattcttttagtttccgagcgattactgggtactgtaaatctgtagcctgcaaaccggtgaaaacgcacaaatttaagcttcacggaattaaaaatttgtcgcagcattgaaaaaaaatttattgcattcactttaaataaggaaaattaaaatttttttcgacttttgtctgtaagtcctggtatttttttgttaaaaaattgaaaagtggcaatcgaaaacagggtcgaaaaaggcctgtattttggacactttctataaattttgaaaatccaagattgtcatacaaattgaattttaataattagatagtaacgagaatggacctaacttttctaaaaaaatttattgaaactttatcaaaataattttttgaattggcgatgcacattccactctgaaatggcacagagacgattacagtggtatttagcgacgatgccatcgtctttgctcggggttgtgctatcgggagaaatatgttgattttattcagaaaagattgatcctttttcagtactatttgcatgttacatttcgcttacgaagattttttttggagtggaaagtttt

SEQ ID NO: 12772 - DNA, 3552 bp, Heterodera glycines
tgaatgtgagccgctcgattatttgcgcacaattagccattacttaccgtattaattttttttacaaattcaacttttcaaaattaaattaagaaaaatattttcgattttttaaaaaattgcttcctggtgcccaaacttcccggtgcccaaacttcctggtgcccaaacttcccggtgcccaaaactactcaacatggaagaaaatatttttaattactttataggtgtagagaaaaacctaaactaacgacaagctttgagctattaagtcaatattaataaatatataatgaagaacccatggattaatttttgtaccatgcactaactcaatcctagatcaaagttgcatatgatactaatatttatccagcccatataaaatttactgacaaaatttttcccccaaaaaaaatcctgttgaaaaacctttgctttttggtctgaaggagatagttgttaaataaatataacaaataaaaatttagagaaattaatcttttataacaagaaagtaaaataaatgaatctttttgaataaataaaaatactaaccagcataaagattttatttaaaaaaagccaagtttctgattaataaatggaatacaaaaatagtcttcaaataatgagaaacaactaaatttataaattatatttaaatgaattattaagagcattaattaaaacttgaaataaaatttagatttaacataatcaaaaaatcaatcgtgctattaaaagaaatcaaatctaattcaaaatgcaaaggattaaagaaagaaattattatatacttaattaatgaaaaaacataaataaaaataatttttttcattaagacctttcattaatattaataatgctaatataaccttggtgattaataattttattgagactatttccctattcaagaaccagggccccaaggggcaatactgtctaatgttcggacgggtgttcggatgggtgttcagatgggcatgccaatgcggatatcggatggggtaaattcaccgatagtcggggaaaaggtgaaaactgaaatagtgtgagagggggtgcgaaagacatgcaaaattgtggagaaaatgttggcgaaagaagcaagagtgttggccaagagagtggcagtgccggtgcaggcaattccatcacccttgcctccttttcaacccatcacttttcttctccagttctccacttccttatatataaagcagcattgttttttacaaaacaattaccctcggacaggcacaccggatgccgccgacttgttccttttgccatcctcggctgactaaaaggagaagcagagcaaatacgggttatacatacataaatatacaagaccgtttgctgacttgtctgagggtacatttttttacatttttgcataaataaaaaatcagaattcactggtgttgctcgctgttctattttttcaattttttatactttttatttatgaaaaatttaaaaaatagaacagcaaacggcaccattgaattctgattcactgattccaatacccaacattgtgtgggcctccatcagctgctcctgatggaagcaccagcaccctggaaggctttcgccgcaccggtgccgccgcccgatatgcagaagacacatctcctttatatataagggaatgtgaattaggagaaaaaatgtgatgggttgaaaggggggaaaggaggagcgggcaatttcctccggcaatttcctcgcctccaaaggtatatattttagcctaatatttcagacttgttttcactcaaatcacacaaattgtttcgcagaaaaatttattgcataaaagaaacgacaaaaaaaccacccattctggtatatttaatttacattctcatggccctaaagagggccatttgggataaagggtaccctcctttttgagggaccctgggtttgtcaaaaaaatttttcaatgcccgtcccagtgggggacagccgcaagccaacaagcagtttgtggggtcaggatggatagtttaaaataaaaaaagaaaaacaaataaatgaaaaaacaaataaaatggttataaaatagttgaagatcagacgaaaatctaaataaaaaaacaaaaaaatgggagggggagaaagaatacaaccacccctcgacaacagccggcagcaaccgcccacggctagtagtggacgcaatcaacggctccggatccttggagagcttgccgttgttgtcctccgcccacaggctcgtgtccccatcggcattaggcccatagagctgattaaaaaaaccgaagggccggtagtcccatccggcaatgccgacgccgccaccgcaaccgcccgcaccgccgccactgtgcatggccatgcccacccaggcgcccctctggtggcgctgcacagttttgttcatggaactgtttttaaaaattagactttaaaaagtgaaaaaaaccaaaattccatgaattcggtccgaagcttcccaagtgggcagcggcgccactggtggccatcaccgcagacgaagcagaggaaccgcccgccgccgacctgctccgggaacaccggtgcctttcccaaataggcaaccgcccagtgtactaaagggaggttaattttaaaaaatattaaaaaaaaattctcgccacccactccccgttccctccccattcacactttcaccaagcacccagcaccatgcagctgtccgggcggtgcccaatgccatgacaagcatggcaggccactcgcttaacaataaatttcagtaatttatttattaaattttaaagcaaaaaaaaaccgtctcgccctggtcgtcaccaaaacggtacacaacgcattgcgagggcttgtgcccaggccatttgcaaagcccacaaagcatttggggacaaaaaggaagaagaagaatagcaaaaagcaaaagctattctaaaaaacaatttaaaaaatggaaaagcattaatttaatataacatacatgtaaaaaaatgtataaaacaaaaaaatatagaaaggaaattttataataaataattttttggcgttatgtttagttttcaaatttgttactaattttttggcgtctttttcaataataaatagaaaaacatataatactcgcattgtcctgggctgttgccatgcggttatttaccttcaccagccccattaatgaacaatttttagcgttaaaatggttcaaagcttctatttaacgaatctcatcaacgacttaatggctgactaggtccagaacaatctggaccggtacaatcagtacctgacggactctgagccgagaaaggcgcgagtcaacaagcgcaagatcggaagaaacctgaaggatggggatgtgcgcgactactccccagaatcccgggcggctgcggaatggttggtggcaaacccctggccaccagcggaagcattccgccacaaattgttcaaaacaagtaagctcaattaagtatgtgccaataaaggtatcaaatataccgtttaataagcttcaattcagtttggcactttgcaagg

SEQ ID NO: 12773 - DNA, 2906 bp, Heterodera glycines
  unsure (1)..(2906): unsure at all n locations
tttattaattttaaagcaaaaaaaaccgtctcgccctggtcgtcaccaaaacggtacacaacgcattgcgagggcttgtgcccaggccatttgcaaagcccacaaagcatttggggacaaaaaggaagaagaagaatagcaaaaagcaaaagctattctaaaaaacaatttaaaaaatggaaaagcattaatttaatataacatacatgtaaaaaaatgtataaaacaaaaaaatatagaaaggaaattttataataaataattttttgacgttatgtttagttttcaaatttgttactaattttttggcgtctttttcaataataaatagaaaaacctataatactcgcattgtcctgggctgttgccatgaggttatttaccttcaccagccccattaatgaacaatttttagcgttaaaatggttcaaagcttctatttaacgaatctcatcaacgccttaatggctgactaggtccagtacaatctggaccggtacaatcagtacctgacggactctgagccgagaaaggcgcgagtcaacaagcgcaagatcggaagaaacctgaaggaaggggatgtgcgcgactactccccagaatcccgggcggctgcggaatgttggtggcaaacccctggccaccagcggaagcctgccgccacaaattgttcaaaacaagtaagctcaattaagtatgtgccaataaaggtatcaaatataccgtttaataagcttcaattcagtttggcactttgcaaggggcgccggcgtctacgcattaacataagattatttatagaaataatatcaaaagcgagaaatataaaaatttaattcttaacaagcaaattaacaattgaaaaatttaataaccaaaggaataaacaaaatggctcaggcatggtacgctgataaaattaggataaaataatacaattcggaatgaaaaaaggctaaaattattaagacaatttttaataattatggatatttaaatatcaaaatgttaatattatacagggacagaaaaacacagatgccataaatattaattacaaaatgataaatgaagaattattttagcaaagaaacattaaaacgaaaaatattttcgtgaatgacaagcaaaaactagaaactttgatcgagaggtgagctcgttgccattatatgcaaaaaaatattatacaaaaattttacgataacagaaaaaattttaaatattaataaagaatatgaattttgtcaaaagcatttttattgtcaaaattcgacaattggatgatgaaaaattatgaaatttatcccattcataaagaaaataaaagttaatgaatgaataagtaatgtgaataaatcttaataataagtaccatgagataaaaaaaagtactaaataatgaaaagtttatatttataaaaataaattcttttattctgttgattataaaaattatgtaaataatattttggttttatagtgtattgttttaaattattctaattaaaaatattgttttaaattttttcaattcaaaatgttataagatattcccaagaactgatattattcgtagttttgactgtataatcgtcataaatattataaaattaacaaaatacctttttataatagttaaaaaattatattttaggatataattatagttaatgttttttttatataatttttttaccttttcatatgtaataattcgcattgtattattttgaataattgtttttttattttatttatgattgaggaatgaaaatcttttaattgaccaattgaattttattttaaaatttcatccccatgttgtttttaaaattttattataataataatcgtaaattaggcacattacagataatttgtacagaatttgttataaatgctagaacattttttgtgttcattatattgaaaatgtttggaattgtttttcaattttaaaattttttttcctatattattcgcttattcattaatgcaaaaatggattgaccactaaattttctaaacttttaagaattgttgcgcattttaaaaagcattttttagatataattaataaatttattttatggttaataatgtattgcattttttggttaattaatattcaattaatcacatataccgattaaggcatatttcaaaatttgtttttttactatatcgatcacttatagttttacaatataacatttaattatttgttattaatttattttatttcttgcttcattagaagtgtccaatttttaaaattgcttttttccattttgaattttatcttatttattttttgggttatccgtataattatttgcgaaagttcaaatgaatattattattttaatttgtatatttagttagctaaaaggtaagattttttattatttagcttaaggtcaatgctttactttaatcttatcttttttaatcgtcaatggcatttccaagtcatttatcgctgccattcgtactatttaatatcagttttatgatttcttattatgtaaattaaattattaattttattatatatttttagattatgaccttatcttgtggcattcattgttttggaaattaactgataaatttcgtaaaacgaatttacaaatcaggcatttaataaatgataagcaaacaccaaattaggtaaactaggtgaaagttcattaagctaatgtttcgttttaatttcgtagatcagcgaaaattaacttttataaacaaaagctaattttaccaaatttgaaaaaaaaattccgacatcaccaatcaacatgtgaacaaattttcttaatttataaaaaatactcgtcaggtaagaagaatttgttttttaaacccanaaagttgatctttaagggtatattttaatagca

SEQ ID NO: 12774 - DNA, 2131 bp, Heterodera glycines
cccccgctaggtagtacgaatatgttatgaacaattccctacataggaaaggataattatgaaataaaaaggaatgacttcctttgaattgtgttcgtactgtcttgagcaacccaaagaacaacagatttttcgaacaaaatcaattctaatactatactaaatctaaatccaaagctagtctaacacattatctaatcactgttatctaatagctctctgtaaacaacattcttcacctttctctctaaattgccatcatctaatctaattctcaacttattccaagctcttgctctcgaaagagccacatacaattgtccatggctaaacacatctttcctaagatcaattccaacttgctcaagggtttgaccttgggccttattaattgtcattgcaaaagctaacaccaacgggaattggtgcctatgcaggtcaaaagggtaatcttcagaacaacaaagcgtgatccgaggaatgtacacagtctgacctgccttgtctccagtcaaaatcttacacacaatcaaattcggttgcatttgctcaacgttcattctcgcaccattacaaaggcccatttcgatattcaaattccgcattaacaaaacaatagcattcttcttaagtctcaatttatgccgtggaaaccccgaagggtttaaagcattcaaatactcatccaaatagtcatctgctctttgtctattctcatcttgagccaagtctatactcgtatatacaacttcttctccaggcaacatttctaaaactattattcattttactaacatcaacattctttggtgctaaaatggcacttttggccatttcattccaattttcagaaacaatactcaactttattatataggattatgaattcccgaatttatcatatcatatatactttcttaaccattattaatctagtaattgtaaagcttatggcgtcgaagttgttgtttcggcaagttggtccatgttctggtgaatgttttgccccaaaatgggttcagttcagttatttgaagcaaagtcattcacttacacctatttgctgggatgcacaaagacgagacaggctctggtcatcgatccagtgatcgaaacggttgagagggatgcctcagtacgtattttaattagaaaatttatctgttttatggcttaattattttcagttagtccacgagttgggactcgaccttaaatatgtggtcaacacacacatccatgcagaccatgtgacgggttctggcgaactcaagcgcaacaaatactttccaaaagcaatttcgattttatctggaaaagcgggtggaagggctgatttgcttgtcaaacactccgatttaattcgttggggggatggactcgaattggaagtcagagaaacgcccggacacacaaatggtaacaaagatttttaaagaatgggataaacaatctgatttcgaagttttgtcccaagtttgtctagatatgttatatttgtttttttggcgagttaaatttttctaatttgtaggacaaaccgaactgtaatcattattaattaatagccctgtttttaggctgtgttacttttgtatgccattccaaccaaatggcattcactggcgatgctcttttgatcagaggctgtggaaggactgactttcagcatgttgagtttgtgaatctgctcattgatatttgtgcaaataatttcaggaaacgctcggactcttttccgatctgtgaaatcgcaaattttcactcttccccccgattatcttatctatccggcgcatggtaaactaaattaatgttgaataaagtatctttttagattatgccggcagaatggtttcatcggtttgggaagaaaagaaattcaatccccgtcttacaaaatcggaggaagaatttgcggcgataatggaaaaccttgggttgccttatcccaaacaaatcggtacctttgtgtaaaatataggtcatttggtcaaaattccgacttctttatcttccacaaaatataacaaacaaattttaaaaaggactttttagagaaatctgagccggccaatttgctttgtgggatttccgaattgatggacgatgcgttgagaaggaaagtttt

SEQ ID NO: 12775 - DNA, 3027 bp, Heterodera glycines
atggtttgggtgttcgcaccgaaagagggtcatttaatcatgggcaactggagaacgtcgtagctattttgccatacattaattttactcaacttttattgttccaaactcatttttgagataaaaaatcaaaatcgaggtcaaatcgatgaagtgttagaggtttttggtctatttcaattcaggaattttattattttatggacatgaattacgaacttagaacaattcttaattttaattttttctaactcattttttacaaattttttctcgccgtatcgtcttttatttatcactttttgtaggtctttaaattttgccatcctacagcaaattccattccttctcgtcttttggtcatttgcatagaaaatgtcttataatttcgctgggcttaaggaggcattttcggctgtcgtgaaaagcactgcaacaataaacgaaaacgaaaaaacttcatcgtcgaaaaacgaaggagcagaagcggaggaaggggaggaggaggacagttttttggtgtgctatttttgccggtagagtccagccgattgattggagtccattcgatcgatccaaaattcacaaatgctttagtcttcttttgtttgtttaattaactgtgggatttctaatcttgtgggagtatgtatctcatcattttttcatcagcgtcgtcttcatttccattcggcccttctcagtgaaaatgtcgccgattctccgcctaacaatgatcatttttcggtgttttcatcctccactaattgtgtcagcgaatttgggactgtcacggccgaaaatggacagaaaatgcaaaagttctgcgattttgtcgtttttctttttactttttcaatttagcggttacgacaatcgaataacaattgaactttcgtctgcgtctgtcgccaaattgagtggacttttcggtgaaatctgttagctttttgagattataaattctccttttgctttaaggtgatggctcttcgtcgtccatcgaattcccttcatcggttgaagtgaatttgccgatttggctttgcgaatttctcttcaaagcaacgcaaaaaatgcctatttccaattcactgcgcgaaggtttgtgagagatgcgagggacggagagcgtttcaagacggtttcattcgcctctggtggaccccgaccactgaaaaatattattagagcccgtaatagaaccggatcatgtcaggttttttaggactcctgatcccgacccggataattttgaaatttgacccagatcaaagattctttagaatttgagcaacaaaatgattggctggcgtacgattttttgaattcaattcaaacgccgaataaaaattgtcagaaggaggcaaaaagtgtctctttgagacgcctttacgaaatgtttccgaagctgtcgaagaaagtcatcggtcgagtggccaaagaaatggagtgagtgccgacaatttgggggatggagacgaaatgcgagtcatccaattgtgaattttagcttcgactttgaacagactgcgatttatctgcttgactatcctgatgatcatccgactgacccatcaaatactgcggtaaaaccctcggtgattgtgccttcgcttcgtccccgagtgatttcggcagaggaacagcagcggacgaaagggacgacgaacgtggggaacaacagcaggaccaatttgctaatggtgtgaccaaagaggggggggggggatttgtattgtgaaacctaacgaaatatattgaaattatatcatacgaaaaggttacagattttgggacaatgtttaacatgacaaaaaagttcacaaaatcagacttgttgcaaaactcatttctcaccaattttagcttccccccgaaagttgggacactgaggtccaagacgtggagaaggaattgcgtaatatggcggcggaacagaaacactgcagagagatgcggaccaaatacgtcggcttcaaaaactccaacattttcggcttttactccgcacgggtaacaaattgtaatttgtgtaaatacaataaatgcaaaataaagtaccaattattctatggaaaaggcatgtcatcatctgctcttgtttaggccaatgaattggaattggccaaaaagacactgacgcaatattgggacagactgcgcatttggaggacatcgaacgaagaatgcatcgacctgcacgaaatgagtgcggaaagggcactttctgtggttgttgagaaaataaacatttgtcgaggcgagttaacgcaattttttggctttaaatccgtaaatatttctctgttttaacagaaaggcacccgaaccttggcaaactgtacgtgatcacgggttacggcaaaacgacgggaattgctgtgataaaaccaaaactgctcgcctttctcaacggcaaagggatcgagtgagtgccgtttatcggggggggggggagttggccacgcgaatttgttaatcgtacaaaattgtgggtagattgaacgtgtggaggggagggggtacgaaaaccgggcaaatctgtcattttaaacaacattttagggcacgagtgtctccgaaaaatgaaggcgttgtggagatcagtctcagaaatattttcagacgcatcgaataaccttaggccccggcaaagggaaaaacattggttgtattagtcgtacgattcgaattactcactttttctgtgccggtggtgcttttgccggggcctaaaattcaattccatccgattttgtgcccgtaacttttcttctactcatttggttgttgattttcgttagttaattaaaggccttccatttcttttttgcataaaaatcttagaatgaagatcaatttcttctttgaaaacccctggtaatgctcctttaaataaaccctaacccattatttcctcagttttccactcattccgtttacaattagtgtgatttgcctgagtttacttaaaatgtacaaattaaactgatcattcttttttttactatcttttctatcatt

SEQ ID NO: 12776 - DNA, 824 bp, Heterodera glycines
agtgatggaattgggatgacaatggcatatttttctctcccttgtggtgatcatcggcattgatcagacaagcgatccttggaaaccctgatcagtgccgaaatgcaaacggagtgatcaaaaacagtaggacaatggagtagagtcttaatttgaggaacttaaattaattagagttttaaattatttatttattttttttaacataattttggatttaaccgtttcaaaaagtaaacaaaaataattttttggaatttcactattataaaaaccatttgaaaatcgatcggctcttatgaaataattatgaaaatttgctatataaattaataattatttacacttccaattttataaaatgagattttgtttttaaaatttcctggcaaaattttctaaatccaaaatggggcattttagtaaaaaaaaaactttttacattttaatatcaaactaactacttaaaaataattttcaaaaatttttaaattaattacggggtcaattaaattttattacattattttatgcgctgtgcactggccaataaaaataatggtgatgatggttttgatgatgatgatatattcagcagacagcggacgggcgagcggaagaatggatggtcaatgaaggcatattatttcatgcaattagtagccaattaattaattgtccaccatttttggggcgggcgcgcgggcgaaatggccagccaaagtgtgtccaaatggggcgcgacgcggcgcggcgcggtggacaaacgcggcgcgccgccccgcattttattgttggcccccagcgccaaacgctaaagccaa

SEQ ID NO: 12777 - DNA, 3605 bp, Heterodera glycines
atgaattgtaatatgtgtagccatgctgagaaaacaaaatatctcaaatctctcagattttatgggataggattggattggattttgggagaggggataaaaaattgtagggacggaaaattaatttaccgcatttcctaaaatacagaccccccccccccacctaaattcgaacccaaccatgaaaataaagccgccaattctgagagggttgaaaaataaacccccgggggctctattttaggaaaaatgcgttataagggtaaattaactgtgaatttgagggtaattagttgatgaaatggatggggataaacaattaagagtttttatttgaggggcaaaggatggaaaattgagtcaaaactgtgaggaaaagtgtgccgccacaaatttgttacaaattacggtaattaaggatggaaaacaaattaattaattttatatgcgtaataataaggctaggatttatattaatgaaaaagcctgaaatatcgaaataagtcttttatggaaacttttggacaaaaaatagttcatcaccttgctgaagagtaaccaaaattgcaaatcttaataacatttgatatcccaaaatgttgtctaattagcctactgtaaaaccaaaaaaatggtaactttcaaaaatgttagggcagccagaataatacaaaaaatcagggattttcgaacttttcataacttttttttttcgaaacttaacgaaattttttgaattttggcaggataatagagcagaacatatttagggactatcaaaagatattaaaaattaaaaatttgttgattttagcaaaattataagcaaaaattttttattttggcggttttctgagtgacgtcataacaaatttcggttttgccattttcccatgttttttttttgtttgcctttacattctttttctctgatgaaatttgaaaatttctttgttatttttaccgttttccattttattttcaattatttaatttgtatgaatcatttctaattaattttttgtcgcttacattctgcgggaggagaagaagaagcagcaccactttttgtttgcttaacaatttatttatttaatttcttataaatataaaaatattttttccaaattaaaaaatgtattttattttatttatttattataaattttgctttaattaatgccttttttcatattttgttctttccgtttctaatttcggcatttttcgcgtttttgcaaattaaaatgaagttgcaaaaatatgccacatttactcaaatagagtcagtcgtccctcttaattactcaattagaccctcacccccagaaataaagcccccccccccccttttgagggggattgaaaaataaagtcccctggggctctattccagtaaatacggtataataaataaatataaattccggcattggtataaatttttgttgcgaatactcagcagaatttggaggaaaggagttgatgaaataaatgccaaggacaaaccattaaaaatttacacaaataaaattttttaaaactagaaaatggtgaaaaaatggcaaaaaaaataataatattggccgaaatgccaataatatttagaaaaattcgatttttaccaattttaattttctaaatttaattttcagatttaaaaactttgttcaagcatgaaaatgtgctgttatagctgctctagtaaatggatgtgctggtgcggctttcacgtgacaactgtgggccaaatattaattaattaataattaattaattaatgccaattaatgaatcattaacatttgattatattatttgtcatggctcattgcctaattgattaattaattaattttaattaattaattaagaaaatttgattaaattatttgtcatagttcactcgcctaattaattaaatcaaattaaaaaatgaatgaatgaattaattaatagctaattaatgactcattaaatttgcgtaagctctttgccagtgctgaccgcacgatttatttaattaattaatgcctacttaatgaatcactaaaatattgatttaattgtttgtcaagggctcacttgtcgtcgcgtggattaatgtgttggccggcatttatggctttctatctgccataaatttatttggttataacgttaacatattccacattattaatttgatttcggtaattcttattattttttttactaattttcttcaaataagaaaatctttaaaaaatttaatccctaaaaataaattaattaattaaatttgttttttcaaatatttcatttatccctttcttttaagagtattttgcttttgtgcggaagtgtgccgataattgttggcgaaatgcgtggaaaaagaaccagcaaaatgtatgactatttcttgtcattaccgtatgttttttttggcaatatttctggtcactaccgtatgttttttggcaataatttttaatttattaatttaatttaatattttcccctaaattttaggccatttctttggcattcatagcgcttgccgtaataattgctacagtaatactgtttacaatagaaacccgtaatttgaaattctgcaattaattattattaagtccatcaattaaagaattgtgccaaaagtttttatatattttttaaaaattttcgggaaaatttcgaaaataaattatacaatttttattaaccgccctaattattatatattttatatatatatattaataattaattaaagattattaggaataataattaccaaaatattataggtattcatgcttttgacttttattatttgtgggcttacagtttccccctaattatctcaatttggctttactcaattgtgtaccgggcgtacaaatttgttcaacaaaatgaggaacacaaaaacggtggacagtacggacagaatgtcaaacagtaccaacagaatgccaatgccaaagtgatttaatgattgaattttcaatttttaataaatttttgtggctcggtatgataaatgtttgattatgttatattaacatttatttttaataaattttattcaattttttattgttaaacttggcaacaaaaaattcaaattaaaattttggaatttttttgttatcaggttgacaaacggcactttaggtgtggaaaatttaacttaatttaaggaaatttagcaaagaaaacattttaaaaatctccgggatttgtgtaaattttcgcctagagataaaatgccaacaaaaaaaaatgtcaaacaattggttgaaggaatccaaaaataggatttaaattgaacactaaaattggaagaaaaataaataaaataaaatttgtattaatgcttcttagaactaaagaatcttaaaagaaggaaaaaaacggcaaaaaattaagacaaatattcgccgaaatgccaacaaatttaagtcgaaaaaactcaattttttttgccaggatttttttaaaagttggaatttaattactaaaaataaaaaataaatttttaatcatcccactcatttttctgtttgcaaaatttgttagaggacgtatttgtttgccttttttttctttccaaa

SEQ ID NO: 12778 - DNA, 2860 bp, Heterodera glycines
atattacacccctaagaataaggggatgaaattcccataaaattttcaaaatggacctataatttggctaattttcaatgaaaagctgtttaaaatgtcaaaatttccaatttttcgtccgacggcgcctatcggcaccgccgtgccccaaaaactcctatttttcttagaaaaatgacccaaaatagcaaaatttggtaatttttggtgaaaatcttataacaaattcgtgttaagacatttgcgacccggacatttgcgcctcagacattttcgcgtttttttgaaatttcgcctttcgcatttatttttatttcgtcttttctgctttcgcaaatttcgcgtttcgcattttatttttcgagttggcccatccctggtctttacagtatataagtatatagataatgtcacacacagtttccaatcagggctctaatattatccataaaaaacatttttttgacggttttttattcttttattccgtccgtgggcgagattataaaacgatggaactgaaaatacttgattttttaaaaatgatacaataaattgatttcttttttaaaaaagtactccataaatttaatttccttggcataaacccaaaattgatttttttttttttttaatagtttttaaatttaaatgtcctaatttgtaagcatatgcaatttatgttggtttttatgccatttggtgcaaattccatgcatttttgtccaaaaatgcctaataaaaattatttacattttttgcgatttttcttcccaataaatccgaacccaaatccgccgttgcattggtccacctgcttaataaaaaatgcttaataaatgtaataataaacagaattgttgccactatggatgagtctcgcgcggcttttttttgaaattgcatgaaatttgacaccatcgctaattgctaatgatgatgataatgatatgcgtggcaaaatgggctaagcattcgcgcatactaatttttttttttatatgatatgtgtgcattgtgataaacgccacgccaagaagcaaacgcccacaacaaaaaaatcgtgatggcgggacaccacccacccaccaattagccgccgggaaccaccactatttaccctcattagcggcagcggcaaaggataagatgtagcagaacgagtattttttgttgttcgtctcgtgtggttcccagtgattgttgcggtttcgtcggcgctctttgtccgcaccgcgccgcacgaatttaattgtgcgtgaaaaattgttggcgtttttctttgatgaaccaaccagttgttgactcttgagagagagagagaggagagttaattaccataattattgtatggaatgcggcgatttgttggcatcttcagcagcgggtggcgtatgagtttatcatgcacataaatgtgagcacagcagaggagagagcttgtttctcgactataaattaattagctgtgtgatggatgatgatcatccatcccggcgcaacaaaaaatacaattaaggaatgcacttagcggttcattagccacacaaatattgttgcaaagtggttgcttgctttttagtggtagggggtattttttcaaaaaattattaatttttacacagtatttattgaattagaacccccgggggctctatttttcaatccttctaattactcaggggggacttcatttttcaaactcctccgaaaggaggctttgtttcagggggggggggggggttctaattcagtaaatacggtattttaccgcggaggccaaaaaatagagcaatttatggcctcaagtttaataaaatttttacattggggcttttgacaaatgcttcgcaacaaaaattttttcaaaatttacaagaaaacagtgccagaggcgttgtcttgaaggccaaaaaaaatgacgacggatttgagggcatttgtaatttaaaaaacgctgagataattcaaatacataattagatttatttatttagtataaattttatacataactccaattaaacaattattattttttgatcagttattatgcatatttgtaacggcaaggacggattggcactttctctctctctcactctctctgatcaatcgatggatcgttccgctccctcgtcctccgcgcagctcattttgttggcacttttggtgggggctcactgaagatgttcgccgggctcggcttcacccatccgccaaatgtgcgttccaattcctgggccgccgcgatcagaagcgcctcgttgaatggcgcggccataagctggacgccctccggcatgttggttttccgattcttgtacattggcgcggccagcgcggggaagccgagcacattggcaatctaaggcggcactttgtttgaccaacaataatgccattatcttgtcttggccttggcacccgaaaaaattcacggtaaagaccaaagaagatattggaacacgttcaaggttttggtattggtccaaagtcttggccatggttttggtcttggtacacaaaaatgcccacatcgattcattgttggcaaattttgtacaaaatcatggccttggcgcctatggcctcctctaccatggtgtatttgatgttgaacacagcaaacggctcctggtgatggaatggcactgttgttggccaaaccgggctcaccaacagaccatttttgccaagcaaattggccacctgtttgcgcagcttctccttcttcagcaacacctaaatgcagcaggaaaaaaaaaattacgctggataattttttttttttttgtaattttccatttttcatcaattttttatataaggacgaattaaattttcgttaaatttttaa

SEQ ID NO: 12779 - DNA, 1763 bp, Heterodera glycines
gtgcccctgtcctgatttgaaaaattttcgatggaagccttgctttaaggacgaatttaattttttggtaaaaaaaattttagttattatccatttttcgtaaaaaatctctgattttagggtcgaatttaccgtgcaattaattaatttccatttttcattaattttatgttttacgtaatttttagttttaggcggggggacattttcattttcttccacgtaaaatgcaaattatttttgaaatattaattttttaaatgattttattttaatgtttaaaatgttgtttaaataaatggcattttaatttttaaatcctcacaaattcccgctcgttttctgatttcggcgcaacaaatcgcttcagcagctcaatttgcaggccgagatgggtggcattggccacacccgcttgaatgtcataataagtctgtcgcagctcttcgtaggactggagataaaattaagaaattttacaatttaaaaaattatttttatttttttgaaaattttgcacaattttcgtatcatatttcattaaatttcccccgccggacccaattttaacttattttttaaaattttaacccaaaattgcaaaaaatttaacatttattggcacaaacaaaatggctttttttgtttttttgcattctctggcgcttaaaatttaaaaaataacactagagaaaaaatttttggcccggagagcaaaaaaaaaaaaaatcttcggattcccccctccttaaatttctcctgagaatttttgaattgctaagaaaaaatgcatcaaaaaattttaaattaactaactcccgagccgagaattcttgagtcccgggttaattttaaaaaaaacatagaaatttttgccaagttaatgacaacaaattcatcggtttcaagtcgcgaaatttctcaggttttcgaatcaattcgcagccatcttgaaaatttctcgactctcgaggctgtcaattctcgacaaaaatccaaaatgctctcgacccgtcactggcacggcatcattgaaatgccatgctctcctcccatgcatcatttttcaccggaatgccttcgctccacgggtcggcatagaacagttcgaggaaccgtgacatcagtgggaactccactcgttggaccgtcacattgtgtttgaactcaaaataagatttgaccttaaacaattaggggattaatcaattaattgccgctccttaattagtgtcgtattaattgacgccgttccctaattaatagagcacgaaaaaatatgcaccaaaactgccaaaatatgcatatgaatttttccaaaaaatcttttcgttaaatctaagctaaaaatctcgaaaaaagctaaatatggtatgaaaaatcattttgacgaaaataaaaataaataaagctaaaatatattggtttgtaaaaaaaaattgagtaaaaaaccccgaaaatttttcattttgtgtacttatttatggcataaattacattttttatattaatattatcgagaaaaaaaatcaaaaaattatccttaaagctcaacagggcctctttaataaagggggccgtttaaataggggtttttgaaaaaatgccaaaatatgcatatatttcgagccttacaatttggtttcctaattgttttcccaccattttaacggcaaattgtaattaattaattattattaattgccactccctaattagtcatggttgttttcgcaccatttttaacggagaatagtaattag

SEQ ID NO: 12780 - DNA, 2667 bp, Heterodera glycines
  unsure (1)..(2667): unsure at all n locations
aatagagttgagcgggaccgggccatccccgaaaaaccgggaccgggacttaccgggaccagaaaagtcgggaccgggaccaagtttttcgaccgggaccgggacagcgaaaaaacccgggaccgggaccaaccgggacttttcccaagtgaaaatttttttttgaaaaaaattgaaaatttaagtgcacttcgttacgaaaattgccaatattcaaaaatgcaccaataaaattttgtatttacgttttgggggatcgaggaaaatttttaaaaatttttttcaggggggggggggttcttggaattttctgagtcccaaaattctgtattttttaaaaataaatttacaatcttttaaattttttgcttttaaatcgctgtttttgtggcaatgttttttcaaaaaacttttttggaacagtgggagggggctggatccggcggtgccgataggcgccgtcggaagaattttgaaattttgagcgagatttgtgaacagaatttgtcaaaaaatgaccaaatatttggttaatttatggctttttaggctattaaaaatgaaaaaaataataattttaaattaaaatattttttattaattaattcaattaaaataatgttaaagaaaatataaaaaaatgttctgttccatcagggaattgatccgaagagacaaataatgaaagtaaaaaggtttagccacttgaccacttatacatatgcacacttgctataaatgaaaataaataatttaatttatttttatcaaaaatttctgatccctcaccaattcccttctcttttctcacccagacccccattcttaccagtgcttatttagtcctgccgggaccgggactggcaaaaccgggaccgggatttctgtttttccaaaaaccgggatcgggaccgggacctgaaaaacccgggatttcccgccccggtcccggtcccgctcaaccttacattaaagtgattcttgagtatttaagagaggttaggggattttttgtgtttttagcacggtgttttttttaaataaggcgcaaaaaattacccaaatggcgttatgaatcattttatgagttgtattttctcgggatcatggtcaggataggattacgaggattcaagtcacaattttttacagggtcctagtcccaggtgtcatttatgataatgtgatctgtcacccacaaatgaagttgggaaaattttaaaacttgttgattgagatttcctgcttctaaaactgacataaaatcataattattccagaaaccagtttatttgaaaactccgagattgaagtccatattttgtggaattccgaccctgaccgtttttcaaaaaaaaaaaagaatgggaccgggatccagtgaaaatcccgacgggacctcgatcccatccttgctctattacattttaatatttgctaatattttatctataattttaaactgccttaaatgtttttaatttttaatgactntaaagagcctttctattaacattgaagtggtagaaaacgaaaatcgtcataaatggcaggtgaagaagaagaagaaacagtggtggaacatcctttgccgaaaggctgggagaaacgaatgagtcgttcatccggtaagccaaagtggcgtattaaaaaacaaaaacttaaaaatggtttgagttattgtgacatcgtatttttgacaggtcgtgagtattacttcaatgtgttcagtcaaaaaagtcaatgggaacgtccgacgcgtgacgccgaagacacggcaaaaaaacccgaaactgtccactgttaccatattttggtcaaacacgaaagatcaaggaacccaaagtcgtggagaagtgacaaagtcacacgaagcaaggaggacgcgaccaaaacactcgaatgtccgttcaaactttgggcaccccaagcggaaaattaccatttgtattggaaaattaaaggagctagcattttaaaaatgcacaagaatgcgaactccaacttaagacctcccctattccaaataaaacatgagttgtttatctttggtgttaagcttatcatgccgaattggttgcattggacgttggcgaacgcttttcccgattcaagaaaattgcgcgggaattcagcgattgctcttcggccaaacgcagcggcgatttgggcccattcggtaggaataaaatgcagaagccattcgaggaagcatcttttgcactgaatgtggggcaaatgtcggatattgtggacaccgattcgggccttcatttgatctatcgtttcgcttaattttgaagacgagggtctgtttgctttcaacgtttaatataatttttccaataaaaattttcatacggaaataaatgacttctcaaaaaataattgcgttttatatgactataaaaccgggcagtcccaacaaaatgggcattttagcttaattgaacttttgatttttgtaattttaattgatattctatttggtagagttcaaaactacatggaaaaggggggtgggtcaaccgaagtttttgcgaaggggcccggccatgtaaatttacgatcttttttttactgttataaaacgtgtttgcggcgcgtttttcaaaaaatctttcggggaacggggggtccgcgccaggaaaatttgtctaaaaatag

SEQ ID NO: 12781 - DNA, 3349 bp, Heterodera glycines
tttgatctaaaattaggttaattagggtgaacaaaaaggccccaccaagagattacctgtggcatttcatgcatgccaattttcacatcattctttccaccgataagcttcactccaaaatgactcataaatgcacttgatgtgccggtcccgatttttctcacttccgcttcaatgtcggcgtaccgtttgctcggattagtcgtgtttgcctataatagtataagagaatgcgagggataaaaaaaaagatattttacactaagaagctcgcgcgaaataaattcggacatcttgtcgatggtcactcgctgaccaggcaagatgataacacacgacattgggaacaatgtctacaaccgataatgtggttaaaaacagttctaattttgttaaaaaaagaaaacctctcggtcctgttgctggcgaacggctggcaattgtccatttatcggaatgttcttcttagtacggaaaaagtcgaccatagacataggacgaccatcaacgtcaaaactagaaccaagttttaattaatccacaaaactctcaaaacctaatctcggacatcttccgttgactgatcgcatcaatgacaatgacgcgcgacggtgcataggtcaggtaaccgctaacgccgcgaaacaagtgattgaaatcggaccagaatcggtccatctgggaagcattgttgatgttgaaccgtcttttctgcaccatctccatgacgatttcctcaaggttacgacttgcgaagaatgcacaagtcttcactaaaaagaaaacttaagcactcaacaaacagaacaaagcaaaccgtcagcaaccaaagccgcctttggttcaccattggttgtcaatgacgcgaactcccttagcatggccctcgcgtgtgacaattccatcttcgagctctttgcagatctgacgcttaaaaagacgaccagcaccaatgatgtcatgggtcccactaagattaaacttgaaaaataattaaatactgctaattacgcattgagaaatggctgggaagtcagcatttcaaggaaagtgcgcaaagatctgtcagactgctcatcaggacggcgcgagatggaagaaaagacgtcgttgagatccagctcatgtttatcagtctgacagggtttgatctcaattttgaccgaagacccacgcaggaaatcgcgaacgattccttggactttttccgtgtcaatttccaatacctaaaattatataattacataattttaaaagacaaaaagcaaacaaattgttcgattcgcttgttcgtgaataagattttacggttgtcgtaaacaaattgtgcctaaaataaaggtaaatagtgaatgcgatttagagggaattaccgcttgtccaaatccctgcgtcgagtcgtgcacgaacttgatcaattcaaaacaaacgccgcggagcaatccatttttcccatcgtcgccaccgcccgaagtcaaacttttgtttctagtgagctgcaccatttcaacatcgtaacggaatgcaaaagcaccgccatgtgaagatggtcgagtttcgaacctaaataacttcagtgtctcaaaagcattaatttaactgcacacatacacataaacgcttgaaaacccttcgacaaatctgttacaaactgccggaggaggaatgttcttaaacaattacgaagactactgaacacaaatacattgagtcttacagcggcctgcttaactttcttgacctcctcggaaagagatgacatatttaatatttggtttcaaacaacgctctcaagatttcttcttaaattgttaaaaacaagctcaattaattgaaaacaaaaacagcaaataaagaaacaatttttgcaacatttatgtgtaaaactagggttggtcgggtccgggtaatcgggtcctgcagagcgtagtgatgctgttgatacgagattctgatcaggaatccatccatacgtattgtatggaatctaatcttagtggtatcatcgtgctctgcactacccgattttcgaccaaccctagctaaaactgtcgctgaataaagagttgtgaaaacgctgtaaactgaatgtagaaaaaagctttcggcgctagtctaaaagagtacttttgaaaattttttttcacttttttagtcaattttttgggtgaactgtagtgaacgccccgtgaaaaaaaagggtcaaatgatataccaatcgattcgtctcaaggagctaacaaataagcatcgaaaaatatgtctcgagttgcggaaatgccaaaaaaccggtttttgaaccggttcaaaactcgaaaaattgagagatttcgcactataactttttttttaaacgatcgaatccccacaaatttggtaccattcgaaagctcttgacgagctaagtcttaaaaacaattatataaagttgaaccgcgccatataaaaaccgacaagtatgtataaaccgatttttgaaccgattcaaatcttatagtgccaattcagtaccaaacgtaatttataattattgcgcatggaaactggtgcaaataggtcgtttttgttattgcgctaaaaaaccgccgcacactcgactacggcggccagtaggtagggcgagactacgggctacggaagaagtccgcgcgtgatccgcaggcgctcgtcagactgcttcctccgccctccgtctcgccccattacttgctccgtcttcgcatgctcccttttgcgaaagttagcttgtcaaattattttgttcatcctttatttctttggtactgaagtgtcacttttcactgggactcagtagtagtcaaagtgctcagatggcatcggttcgacttcatttccttatttttagattaagctcgtcaagagctttcgaatggtaccaaatttgtggggattcgatcgtttaaaaaaagttatagtgcgaaatctcacaatttttcgagttttgaaccggttcaaaaaccggttttttggcaactgagacatatttttccttgcttatctcctcgagatgaatcgattggtatatcatttgacccattttttcacggggcatttcctatagttcacccaaaatgtctatcacataataaaagatgattttttcaaattaattttgaacctccgttttaatttcagctgcaattcctatttttttctctttcaaattttaagcataagcatagttttttaaagaatatactttgaaatccgctaattgataaaattaaaatatttaatatgtagagtacattgttaaatattcaaatttacgccattttcggattactgtaattccactctatttactttctctcgttttcataaatac

SEQ ID NO: 12782 - DNA, 2434 bp, Heterodera glycines
  unsure (1)..(2434): unsure at all n locations
taacataaaaggataaattgtttttgtattaatatatcccaacccgagatgaacaatttatgatttttcgcattattcgaccttttcgtcaattcttttgctctccgacggattgggcgccttttttgtgtctccgttttcgtccacaacagtcatctcaaaggagcattgctttgttttggcagtttccaggcttcgcccctttccccctcattcgtaaaaccaaattaaaaaagcgccagctaaattaatcagtcatttaaaagggatgggccacgaaaatcgaccatttagaaaaagttgggtcgaaagccccgccgcttttgtccacctgaaatttgggtgccgctgtatttccgttggttgtgttgctggccgtgctgccactgctcgccgcccctcccccgctgctccgtctccgcaattttcttcgatttgccccctttttccccgccgtcggcgcttctccggtggcgcttttgtgccgattagcgctggtcagcgacagaatggcgacgcatgagaacagcagggacagcgtggagccacccaaacatagcaatttgtgctgctcacccagcgcattgtaatcggcactctgtgcgaattttgagggaattgcaccaacggcatggggaaaaggaaaagccatagaattttacaatactatgatcactgattctgatcagtgatcattaaacattagcctaaatgcataagcaatcactaatcagtgatcacaaagggcaaggctgatcacaaactgatcaaactaattggcataattaccaaatcagttgcacgacaaatcattaaactgtctgtccattgtctgtcacctgaatggtcagtgatgagagaacggcggtgtaaagagaacgccaaaagctttcgggaattgcatttgtaaagagaagggcgctgaacagaagcagccaaagggagtgaaggccgagcagaagcaaagtgagaagcaaatggcgatgagccaacggacggnccaactgaaaaatgggcggngggaattttgatcaaaaaagtacgtctgggaagacggtatttacggtaatgagagtttgtgattacggtaatgagtaagcaccttttgctcaacaaaatggagcccaattcggcaaaggtcgatcagtcggtgggagacgacgagcaaagtgacgacgaaaaagggcacacccaacagacaataaaagagggcgaaaagctaatcaaaatagatgggatcaatttaaaaggatttcgacgatgcgattctctggtaatcccaactcccccctcccatccctttgccatttcccccgtccttcccaaagtgccaattccctccctcccccctttggcatcactcccatttacaaccacccctttttttactttcccacggcttcctcccaattttcacctccctgccccattaattaattaattgttcgtccatttgtcccacttgtcctccccgtgttttcggtgcccggtggccgtgtccgatggtcgtcagcagtccccacgcgtatgccaatgagttctccagcgtccactcgttcaggttgggcatccgaagcggcaattggagttcgtactgtgacagcagttggagcaggtcacgcttggacaattaattgggcaattaacaaattggcaatttttacggcactatcatttagtctgattgatcaaaaattaatcgtgaccggaaaatcggtcagtggaaaatgggtgtactcaaacaattattaaaaatttttagatttttattcatctccctttttgatagtgaaagcatctgaatgcctaaaataacttgtaaataaaattggtgcgtttcagagcagtttgtgaaaacatatttatgaattaattttgctaaaaaaatacaatagtgaagcttaaaaattaataaaaaattttaaattcagaattactggagttagcatcatagcagtgcttttccttgtctttttgatgccctcgcaaaatctggttcgcttctgatcagtttataaaaaaaaagttaagcctaaaatttttcgcaaatttaaaaagcaattaaaaatttttagattttttattcatctccctttttgatagtgaaagcatcagagagccttatttaacttttaattaacatttggtgcgtttcagagcacgttctaaaaaatatttatgaattaattttgcaaaataataaataattaatgaaaaagtcagaatttcgaaaaaattttaaaaacaacaagcgttggcattttttcaggttaagttagtccttttacatggagaaggcctgcaaaatttggagagattatatcggattttagtgcgctaggttcgatgaaactttttaaatataagcctaaactttttggctgtttaaaaaggaattaaaatttttaaaaattttattctctcccctttttga

SEQ ID NO: 12783 - DNA, 1962 bp, Heterodera glycines
  unsure (1)..(1962): unsure at all n locations
tgtgccatttgctgtccgccctcgaccancctgtcatttgctgtgccattctttgtccaatgcttcgcaatgcgttcgccgcccgcggtcggtcgccccccgcggcaacgacccgacggatcagtgcctttgtccgccccgggggtcctttcgcattcgcttcgcctcccgtcgcatcattttgtccagttgtgccatcaatggctttgtccgtgtcgtcgtcctcctccatcgcgaaaggagtgaccacggcattttcatcgaaattttgcattcgaaggaaagcaaaaaaaaaaaaaaattttaaattaacaaataaatatttccagaaaatttcaaattgttacgaatttctcgagagagaatggctaatatttctgcaaaatgcaaatggtgccaaattgggagaagacggactgccaaatttattgaccgtttcctcacccgaatttgcccatcatttggcacttttattggaagtgccaaatttggaaatggaaatttaaaaaaataaaaaattttatgctttaacagcttggatttcggttttgactaaaaattcctttggtcattctcttttcccatccccaaaatctcacaaaatttgcttcgtcgcccgaggggaaaatgaatccgtccgccgccgctcccggcaaaatcctcttctattgggaccaatttgcaactctttttttggcatccgccggatgccttccttcgcttggccatgggctaaccgtcaaattcatttggccaaacttttcgtgccaaaatttgaagacacaatgaaatttgggccagcaaagtcaatacaaattcatttcaaagccgatattttcaacgaaacaaaaaaataacaattttatttatttatttttttaataatttatttaaccaaataaaaaaagacaatgctaacgccacataatgaatagagactttgtcgggtcaaaagccatggtcgagactctcgagcagcacaaggaaagagggaattaaatgaacaagcaaatgattatgccaaacagcagacagcccttaggcaaatgagccgggtccagcagcaactgatcacaatggcaacaattccaatggcccatttctttcccacggcactttcgcgccccgtgccgtttttattccgctcacttttgtcacttttgcgcttcactgctgcaccgccgtttctcgagtttctcgactggtgtagtcgctggtgggggtatgataattccttttggcctttggcggtgccgtctttgtccaccggttggcgtccgtacgccgtcgaaatgcccggcgggtgatttttacgcctccgggcgtgctgaatggcggaggcgcggttgggcaaggccaacccttcttcaagcagcgatttcctaaaatcaagcagtggcgagtcaattctacaaaacaagtttaattcttcgttttagcagattttgccccattgagttcgtctcctaattgccctgctctaatcagtgaggcgactgagacggctctgatcagtcatcgattacagtgatcgatcagtcaccgaaagaagggcgggagaattttttgtctgatcagcttagccacacatttagcccttcaatcgtttgattgtgcataattctctgatcggcacacataaaaatgatcactcgaaattgcctttttaattcttttccgatcattttatgctcaaattggctcgcctgtgctgtgtcgcctcgcaccaacacagctcttcctccgcttcgccctcctccgtcgcactccgttcgcatccctggcgccgattgagtgccgtcggcggcatttggcgcacggacatggcccggttcaactctttccgcgagcctacgcatcggctggacaccaaaaggccatcccctggaaaatacggatgccaattttgaaacttaaattgaattttgaaacggctaggcatttaaatgtttgcctcccccc

SEQ ID NO: 12784 - DNA, 1678 bp, Heterodera glycines
gcagggatgcaaaaaatatgcacgaaaagtggccaaaatatgcacataaatatgcaaataaagtcgtgaaatatgcaccaaatatgcacaaaaatcgtaaaatatgcataaaaaattgaaaattaggggtgcaaattcaattttaaaaaaaaattttttactagtgcacttgccaatgagctgctacatttcttttataaaattctctttagcaaatattgacattttttaaatcaaaaatcttgtcatgaaaaaaaaatttgggggaagaatttttgagaaaatttccaattcttaggggtgtgtttttttaaattttcggtcgattcttaggggtgtattttccgtttttattgcatttttgttaacaaattttccaaaaaatggcgaaatatgcataaatatgcacaaaaagccaaaatatgcaaaatgcaaataaaagtcccgatttttatacgcaaacacaaaaagagagtgtttttcctgctatttagagcatggagaagccaggaaaaaaaaatatgcatttgcatgttttttgcatccctgacaattagaaattatccgctttaaaatgctaattgccaatgcctttttgagaaaatgtcggatttttaaaatttttacagcatttttcgtttttatacatttacataatttttttttttttttttgctttaatttgattgtcaattccatgcgttccgtttgaccgcgaacattcggttcagcgactgcgagtcgagtcgcgaactctccgcgcgaatgcccaaaacgaattgccaacgcatcagcgcgcgctgcaaattgtcggcaatgcaaaggccgggacgcattgagcacatcgaaaaagcggcggattaaaacagaaaaaaccatggccaacggatttatgatgatcaaagattaccaatttggtgatccgattgatcgcctgcactcgcgtgatccgattgcaatgcatcaaataggcggccacaaaggcgggcccgcggtttcggcccctcagcgaatggatgagcacttttcttgaacaaaataatgatcaatgttggaaggggtgggcttttcctcgctttccaaatgccaaaatggcttttcttccctcgcccaatgcttaaaaaggtctgtcccgccaattccgacaaaaaaacgaacttttgcgaaatgcgcgccttgcgaatcaaatcgatcagagtttcgaagtagcgaatctgatcagaaatggtttgatgtgaaagtgccgtccaattttcgcccaattttacgatttgttctctctccgccagctgtgccttcgtttccgccgtcgacggacgcgtctctttggcgagcatttgctgctgcgagtcgtcccgcaatgtcatggccatggtcatgcgcgagtgtgccgtccgtcgagagcataagcacgggaactcggagcggggcctaagaagtgccaaaaatgggtcagagaaaaaagctggcacggttatctcgacaaaaaggacggacggattaatgacccatcaatgaaaatgtgccgaaaaagcgcgggaatggcacataaatggggactgattgtgagtgaattgaccggctgttcagctgcaacgggtcgtcctcctggccactcaagtcgacaatgtattcgatgttcagtcggcacagcaaattccgattttgcaccgcttcg

SEQ ID NO: 12785 - DNA, 1042 bp, Heterodera glycines
  unsure (1)..(1042): unsure at all n locations
attcatcgcagattttaattgtaaatctcgctaaaaattcattgcaaaaataggcaattaaaaagagattaattgcaaatttatttaaaaaaatattaaaattgaaaatgtcggcaatttggcactgtttttggcctaagcaacggttctataaaaaatcactaataaacatggaatgcctcggcatggctttccctctccaaaaacactgaaatcctttggcactttccaccggtttttttttaaattaaaagttttattaacctatgcaattaataagtatcaattcgtaaatatttcaagtatattcaccgtttaaattaaaagatgtttgtgcagtataaaattggaaatagaatgactattcatttgacataattggcacgtaaactacgcaatactttttaaagagtattttatataacgaagattaattttattatttattttgaccatattatttatttaatatttattatatatcaataatgatttattttgctcttttccaaaagacatttttttgattgaaaaagtgtctatttgttttattcataacatttttgggttacctttatgtttatatgcagttagggaattatgatgtttgtgcaggagtaaaagtaaagacagacaggcagaaaatcaacacagtccaatagatttctattggccatataatatatataatataatatatcataaactacgcattctttctactgctggaatggaatttgaatatacatctatcattatataatattaaattcgatcaatatgcattaatattgtattttatattttgcttttcatactcattttccattttattgcctcttttaaaaactaacaaaagcttaccacggaaatttacaatcaaaattattttaaaataaatttaaaaattaaaaaatatattcgaaaaatggaaaagcgcacatcacataatcacacaacagcagaagcattggcaagagctgtccanatggagatggatttcatacaacgcattcttttgggnccacacggggcaatttga

SEQ ID NO: 12786 - DNA, 3490 bp, Heterodera glycines
ttttgagtttattttttttctgtcggtgaatttttttgctttttacaccgtctttttttctggtatgattttacaaaaaaaaattttggaaaaaggggtccagaggagccgatagacgctgccgcaaaaaattttgaaaatttgagtcttatttgtgcacagattttgtccaaaaaatgaccaaattttgcgaatttgagcaaattttttatgaaataataagtttttgggcccagcggtgccgataggcgccgccgggggtaaaattgaaaatttgagtgcaatttgttaaaattgttaacatattttatccctaaaattagcaaattttaatcggtctaaaaagtcaaaaaacgatgaaaaatgcaatttataggagcgcttgcatttttcaagttaaaaaaaaatcgggtactgaagtgtccattggcaagcgcgcccataatttgcatttttcgcataattgtgcacgttatcaattgattccgatcatttttaaatggttttgagtttgggagctatgagacatatttacccaatttttaagaaaaatgggggttttagtggaaaatttttgaaaatttgttgggatttattaactgattttgcccaaaatacctttatttcgagcgaatttttaaaagaaatttagagttttaatttaaattgggtcatccttgaaactctgctttttgtttgcacttttcgaataatattggtagatcataaactacgcattctttctactgctggaatggaatttgaatatacatctatcattatataatattaaattcgatcaatatgcattaatattgtattttatattttgcttttcatattcattttacattttatagcctcctttaaactaacaaaagcttaccacgaaaatttacaatcaaaattattttaaaataaatttaaaaattaaaaaatatattcgaaaaatggaaaagcgcacatcacataatcacacaacagcagaagcattggcaagagctgtccaaatggagatggatttcatacaacgcattcttttgggcccacaacggggcaatttgacggcaattgaatatttgaaggcacaaaatttaggaaaaagtttatcctcaacaaagccaaatgacggcacggaatggaaaaatggggaaaaagtgccaaaatttaacatcgaaaagcatgcaaaaggaaatgatggagcagaaaaagccaaatcgacggaggataaaagcgaaacgaacggaaagcacaaaattgggatgggacgaatgaaaagggaagtgggcgaatgcaaagtgtgcgcgaggccgagcctttactgctattacggggtcaaatgttgcgaaagtgagtgccaacacaagcaatgtctattttggcattttaattgtttttggtttttaccttataaactagagactggaaattgcaaatttgtgggattttctgtgggatttgaattcaaaaatttaaaaaatgacttaaattataataaagaccaaaagctgttcaaataaacaattcgtcattgagttaaaaaaggttcaggtcatattaacgcaatttttggtggtgaaaaaacaatgaaattgaaccaaatggttaaaccgattaaaaaataattatattttcatattgttggataatttacaaattattcatataatcgactaattaaggctgcaagcaattctttcgtcgtattgtttccatgcgaactttgttcaactgttttgaaggaaaacattgccaaattggcgaaggtaaaaaatgtaaatttattaaacatttatgaatttaaatatggtttttgttcttttctcagatggcatccgatgccgcggctgtcgcctcgacaaatgccttttggccggcatggatccgacaatgatcaaagctaatgcgaaggacggagaagcgttggcccaatatttggccaggttggagctgcggaagagaaatgctttagcgaggaacaattgcgcggaacgaaacaattgaatttcgattgaattttgtattaaattccttagaattgaatttcaaattgaattttaagttgaaaaattcacggttttcgtgaccttgaattgactccgtgaatcgtgaccgtaaccactatctaaaaacccgtgaaattcacggttttcgtgaccgtgaccgtgaattaactccgtgaatcgtgactatctaaaatttgtgaaattcacggttttcgtgaacgtgaccgtgatcttgaattgactccgtgaatcgtgaccgtaaccactatctaaaaacccgtgaaattcacggttttcgtgaccgtgaccgtgaattaactccgtaaatcgtgactatctaaaatttgtgaaattcacggttttcgtgaccatgaatcgtgatcttgaattgactccgtgagccttgatcggtgctttttgcgccttttggcattcttcacactgacggacaatccgttcaatttccgaatccatgccgggccaacatacgtgttggcgggcgagtgctttcatgcgcacaattccggggtgtgccatgtgcagggacttcagcattcggttgcgaagcgattgcgggacgacaacgcgattttggtagagcaaacagccctcgatttccaaaatgtccctttttggaaaatacggtgcgatgtccgggtcgctgcatttctttggccaattcgattgggtgaatgccaaaattttcgctaaaatctcatctttcggtgtcgcctctgcgatttcgtctgcagtgacgggaagttgttcggttttggtttgcagaatggtgctgatgtagcactcggtttcggtgcagatgttggcgatcaaaatatcctcctctggtcggggataattggcaatgaggcgcgagagaacgtcagcctggccaaatgatgcggtgttgatgtaccgtttcaaaatcgtaattggccatgattagggcccatctttggagccggctggcggcataaatggggatgcctttcttggagccgaagatggccagcaatggcttgtggtccgtgagcagtgtgaatttccgtccgaaaagcatccggtggaatttttggacttcgaacacaagcgccagagcttctttctcaatttggctgtagttctgctgcgcgttggtcagaactgttgaggcgtgctcgatgactttttcctttttgtccggaaaaatgtggctgattgtggcgccgatgccatcttttgacgcgtctgccgctacgacgatcggaactgtgaggtcgtagtgggtcagcagaagttctgaaaccataattgccttagcttgctcgaatgcggactgttggtcatctccccaactccaggattcatcctttcggaggagttggtccaatggcgccctaatttctcgcattggtttaacaaaacgtccgtaataattgagcgctcccaaaaatgaacggagggtcgttttgtcatgcggcgcaggcattttctggattgtctctgag

SEQ ID NO: 12787 - DNA, 3995 bp, Heterodera glycines
ctctattatttcttttttagcttttcagcacaagacttctttagaccatgcaattaattgaattttgggttatctcacgattagcaaaatgtcaccacaacgggcccattgcgagaagtcaattgcgttccaattgccgaaggattggatattggtatgcgaaaatttgttaaataagaagccatcatattgtttagatgcgatgtgcggggacttaaattttactaattatttcacacttaattatgttgacggtaagtgaaaaaaagaaattacaaaaaaactagagactacaattctttagcattgcctaaatgggttgtcattttttatgagttttttagacaacaaaatagcagttcattgtcaaaggaaagcacaacaaaaagcgcagattttcgacgacttttttgtgtttgccgaaggggtcgtcgttttttgggacgtcgagtgggttatgtttactacaaacatattcaacatttgttaaattttattcaagtcgcaatagtcagcagtccatcatcaatcttttgagaaaataccaacacaatcccttcaccgaccatttaaaagatgacgaagaagaaacgatgaccattgactttacaccgtttgtttattattatatactatacaaacaataaatgaatttttaatcccgaatttttaagtggtccatcgtacgccagcaatgatgtggtgttcctcaattctgaacgtcatcaaaatgctgaacattcgctgaatggatccaactcggaaatggagcaatttgctttttctcacgcgatggctgcctcagtgaaaatgggaatttgggagcagacacttgataagtgttttttgtacgtaattcaaatagagtaaatccctttcctttttaaaagacttagatgacaaagttcaactttgcattgaaggaatgaaggacaaaaatgggcgatggtggaacttgagaagaaatggcatcccatggacacacaaaaaagcactgcgaatgattggtaccacaattattgtatttatgagataattctgaatttgaattacaggaaactttgctgatttgaggtttggagaaagatattgaagcaaatataatgattgttgtgtatttttagacatgcagtcaattcgacagatttgctgtctaaagacgtttattggtcggtattttatgcaaaggatattcaatgaatgtcctagaaattctgcacttttcaaaaatgcaatgcttttaagggatttgcccgaagtcgagtctgtttatgggtcattggcgaggcgactttgtcttcaatcacgcagaaatttgatcaatgagcggtagaatgacaacaaaacatcaatagcatattatgaccttttaaggcttggtcattgtgaatacttttccaaaacaatttccgaggcactcaatattgaacacgtaactcgaaaaaaacagatattatcttcgtcaccgatattcagtcacatttcctcgaggtggttatcattttactcattgcgtttgagtgtgctcatgtcgcgacagattggcttggatttgggcacaaaaaccaacaaaggcaattggcttccactacgcaaaagaattaaattgctattttctcattttatttaaatttttatacatttgttgattttttgttcattcattatattggtaaactaacagaaaaaagaataagttggtatgaggcttatcattttactttgctattgtattttatgacgaagatcaatttgttcttctcgtatttgacaccattcgtttattggcttgaaacatgaaaatcgagttaaaaatttaatttaataaaatgaatttaagaaatattttcagaagcattaaaacgcataaaaagcacttaattcatgtcttttagaaggaaaaggataaataaatcaatgctaaacggacaaaatgttttggtgagcgatgtccattatccattccctaatgggaatgatgtgatgtatgttgatgaggaagaagaggcggaacatttcgcagaaggcacaagcacgcagcaccaaccaaatttgagaagcgatcaacaacgacgactctcatttattcaaacgactgcactaatcaaaggcaagcgaaatggccaattgtttttaaaagccaattagtaatggcacggacaatggtgaaattttgaatagtttttgccttgtgatttctaagtacgtagtaatgtaaagtgtcgtatgcctttcctttttcgtgagcttattttcggaagttttaagatgaacttcgcaaggcggagcaaggccaggcttccgggaacgccatcgaaatactgttcgaacaagtgcatcggagtaatgttgagattgacaatgtacgaccacgaaaccagagaaaatactaaatttatttggctgcccatttaggtggacaatttgcggacgttgtgcaggggaggtgagacgttggatcagctcatccaactttcggtcactcaggtggaggggatgaaggatgagacggcgcactgtctcgaccctgggaagcttgttgcgcgattggtcaacatcatttctaccattccccatttaaaagcgttaattaacagaaatcttttgcaatttctcatcggaagacgggcgatagcgatcacttcgccaccattggaagacattttaattttttgttgcggaagacgcccaatttttattatttgttagcatttattacttaaagttgattggctgttcccatttctctttcaggcgtccttgctacgagttaaaatcggatggtccgtttctccgtgagaaaacgcagcgaaaacggaccaatcaaaaaatgaaggaagaagcgcaagtggtgaagggaaaaacggttggtttgcccgatataattttataatgtttccttaaattttgtccttggcctcgtaaccatgaggggaattcctcccctttcttttgattcatttctataattttgtttgctttgtcattttcccttgccatttttcctatttgtttttctgccccatttcagttgtctcaaatgagtgaggccacttctgccactgcttctgaggatggcactggtgctggttcgtctacagctgtcaataaagagttggacaatgttcgtcgtcatttgaaacgcgtctacaagcagaacggcacggactctgtggactattaccgcttcgtgctccaccctgacagtttcggagagaccgtggagaacatgtttttcgtctcttttctgatccgtgacggccaagtgcggctcagagtcgacccaaacagcggactcgcctcaattggttagcattgtaaaaaattagtagtaattgcccttaatgaagcataaaatactaagtctatcggtcttcattattccatttcagttaaactgagccgtgaagaacgggaggaacgctgctctgcccgagagcgtccaaagacacagacagtgccgagattggactacacaacatggcatcggatggtgcaagagttgaacatcactgtatactccaatgttaattccgagaattgcataaataaatgtacactttgcagaagccatacattacgcgccgagcacaataatttcaacaaggacagaaatcaccgcaattttcgtgaagagaatgaatttttcgtatataatttttgacagcatgtccacgaataaaaacaaagcattcacctcgtttcgttctggcgttaatcgctgctttgtcctctccttaccttcaactgtttgattactttgaacctcaatgtttttgttgatttgccaatgttaaaacgaatatccgccccattgtttatctcatcaattcttcccttttcatgtctcatcactcacttttttgataacaaatgtttagccttcgttttcattacatattctgaccaaaagagaaatttcctgtcaattactgcgatttttgtgaaaatgagcaatgagataaattaaaaaatcaatgaatttccctcgatga

SEQ ID NO: 12788 - DNA, 1244 bp, Heterodera glycines
  unsure (1)..(1244): unsure at all n locations
ttaattgcatgctcgttttgtttgttctgccagccccatccgatataccagctgatctcgcttttgtgcttctgcgcttgggtctctttgttgtcgccgctcccatttaccgtttgggttaagcattcaattttaaattaaatcctaaaaataatttattccaattagtattatgtgcttggcgatggccttcgtcaaatgaaccaatcggtggccatgtgccatttgtaccgcacctcaatggaagtgcttaattaaccttaattgatgttatgaaaaacacaccctgattgttcaggttatccctcatacaatggacactctcgtcacacttttctcggttttaatttattattttaattttaaaatatttatttagcaattcataattaatttatcgctacaaattaaaaataaaaatataatttttaaatttgaaaagtttatttcttaggttttgctcgctgttgcaaggttttccttaaattcaagaaaccaattttcactaaaaattctaagatttctcacgcaataccaccgaagcacattaaaacttcggacggtaacactctttcattttttcgttttcactttttttcaagattgagcgtttctcccgtgccattttgttcatcatcataattagcgttctcctcggcattttgcgcttctttgagcacgatgccgcactatacaggtgattttctttcaaaaataagcaagtataccaagtcaaatatgaattttcggattaattatcacctgactaattttgaaagggtttgtgatattttcatttttaactcaaaaatagtttttatttttgaaaaattaaagtttctgcatggacacggagccgggccctttctgggcccaacgctgtatgctaacggacgggtgggtgcgctgggtcagaaaatatgttaaaagcatcccctgctggcctcagcccactgatcagctttctccggctcggccgtcccttttggaaagtgttccttcccctggccgatctgttcgcgcagttccttttgcctggctcctgtctgatccttctccacatcggcttcaaccgagagcccgtgatcgaaatcggcaacgaaaatagtcacaaccgatttggacgatcattgcgtgaccaaacaaagtgagaaggaaagaccaaacgataaaacagcgnggaaacagacttttgggaagaaaaaactaaactttttttttgggggaaacgggtaattttttcc

SEQ ID NO: 12789 - DNA, 3355 bp, Heterodera glycines
tgctttctcatagttctgatctacgccatcagctgcgtctttttcgacgtgcagctgcccaccggggccgtcagctttatctgtttgaccgggactcacttcggcaccgaccgcgtgctgacactgctcgcccttctgttcggccatttgcagccgttgttctgccggttccacaatcacagcaaattggggctgcttgttgaccgcttattatgtgattgcgaaggacgacaatttgtgatatccataacaaaagcgaatgaccaacaaaagaaagagagggcacaatcattttacagatgttgaccagatgcatcggcgtcaagcacagagaacgaaggcattaacagccatttgctcagggaacagcgccaacagaggaggcccagtgcgtacaggtacgatcagagacacagcagtggaagggcaaaaaaacaaccggaaaaatgagcataagtggtcagagatgcaaaaatagtgatcagcagcagcagaagggcaaaaaagtgattggagaaagggggcaaaaggcagagagatcgggaaaaaatgggcaaaagtaaagtgatcagagacgcaaaaaaaagagtgatcacaagcaactgatttagtgaaaagcagagcgataggagaaaaatgactaaaagtgataagagaaaaattgaaacaagaaaaattgcaaaaaatgatcaaaaaagtgatcagaacccagaacagaaaggcaaaaagcagagtgaccaaggaaaatgagcaaaatcaaatgttacaagagaatggcatcagagaaaaatgaaaattatcagaatgctatatactcagaaacaaaagagtaccgggtaaattcagtgtttcaaaaacccacgcgcccatttaggaattatctgtcgacttctcggagcttcgacactgcttcgatgtccttttcccggcggggcagtgaatatccggagccgcttattcaccattgggtcactctttcgcctgtgccatcgccgatccgcggtgagccgtcatcttcctcataattgccattataaaacttcgctttttgtgtattttgttcgttaattgaacgtttaatatttatgtatattaattttaaataaacaaaataatcaaatgtttgtttttataagtaaatcctcacatggaaacaatggcacggaaaaaaggtgcaaaaataaacaagcaaatttaaataggtatttgtttttctcgtgcctttggggaataggcaattttcagtcattagcattaattaaacatcggatttttagtgatgaaagaggcggaaaatgagttttgtacaaggagggaaaggggagaatgataatggtggtcgggttttgcagatcaaacaatttcccgttgtgctgataaactttttcctagtcagaggatgaacagaataaggacattaacaaaagtcatttgcagggaaagaaccgacaaacgagcattaattatcaattgttaattggagatttaccaaattaaagggcagaaaaacaggggacctaatttgtaagtacaatgttgtctcagttgcgttcattttcggaggacaacttttgtgtatattaatcccacccaattaatgattcgccattatattttcatttgttaggaaaaaatgttaaattttacaatatatatatatagtcctattatggaatttaattcaattttcttcggtccaccagccgagcaccgcctgcacattggccatattttgagtccgcagccgatttggtgcggacaatgaaacggacaacggacctttaaatgggaggacaacagtttagggaatgattcgaatttttcagaacctttcgcgaaaaagccaggaaaagtgtggtcaaactgcggcgttctcctcatcagttcgtcttcgtcgttgcgctgctgttggaccacgaaaacggaggtgggcgacaggcgctgctgctgctggacgctgagcggactcgtcggagacaattcgaactttggggaattagcaaaagatgaggaacaataaagaaactaagccgagaaagattgtccccatatccccgctttgccatgggttggtcaccttggcattaccttctcctcaatgccgggatggttccgtatggtcacactttggcacttttccaccgacgcgtgcttggccaaggccagcattgtgcccgacagttccgacacaatggcaatggtcggtctgtccgttgtgctttgctgcttcggcttctgttgcgttttttggccctccgccgtccatccgcccgcggcaccgtcgctgctcaccttttccttgtcgccgttctcctcgttgattattgcgcttccgccgcctccattacgcgtgcgggaaccgcgtggaagcgattttagacgagagccccatacaaaacgttttgcctccttttttcaaatcatttataaagcaattaggcacttcctctgttattaattggttattttgcaagtgcttttcacctcgacaagctccgggatgctgctgctccgtcgtcgtttgtttgcttttctcgtcacttccgcaagtgaaagctgttagcaaataattccattaggactttgtgttttattttcatttccccgatttttccacttttatgatatcattttccattttgcttttaattttgtttctgtttttccgttttgctcttcacttgtggcattggcatgtgctgcttcttcgtctgttgcttcgcattgtttgccattccctccgccgcttagcttccgcttcggtctttccgtcttttcggcacggcccccagcttaatcggagtgcacacggcagacgatgccacggcggtggcggcggcgttggtcgcgcgaatttgggagaacaaatcggcaatatggggcatttcattgtcatgggcagtgttttgttgttgttttatgcgcctcaagcaactctccagccaagagcgaattgtctggcaattatcgaattaatcagccctttcaattggttaataaccaaaattgattacatgtttggctacttcctcctcaattaaatactccaattcctcacgctgcaccaattcttcaagttgaagcgacttgcgaatgtagacactacggtaggaaagcatactgtaaaagcacaattaattatctattccgagtttaaatgcaccaataaatattaaacaattaattaacaattccgaaatatttagattttaagctggagcattttttgaagcgataatctaagcaaattgacctgagaatgtcgtggaacgacacatcttcaccattgtttatccgttccatttcatggcactaaaaggcgaaatgaattaaatttgaagtcccgcccactcac

SEQ ID NO: 12790 - DNA, 6008 bp, Heterodera glycines
tgaattcagacgcaataaacatgcacacggccagacattccgtgcccaacggcgtctcggggctctcagtgaacgcaatcaaatctctgaattggcggatgaacttttcttatgtttacacgaagaaaaaaacaaatggtaacgccaaattacttgagtaagacggggttcgcaaatgttagcaaatcggagaagcatttcatgatcatggcggtgatgatgttccaacggaatagcaggaccagacgccagatcagtgagggaggcgacgtctttcgttttgaggaggacgacgagtggtcggattgagtggacccgtaattggccatcacctgctgaaattaaactgcattcaattaagaatctttttatccaaattcagacatcatgggtggttaaatcatcgccatgacgaatcagaggtgctaaatccgactcgggctcctgttgatgctgcacattcacatccccgtccgttacatttatgacggattcttttggtggttggcacagttcatcaggagattgcagtgagttcttcgagttatagtctaaaggaaacgtaagcactaggtccagcaattttgaaatgggcaggggccggggcgggatcccgagacctaaacgcccggtgcttttgtccaaaaaaaaattgggcttggagtcatggcaaaatcccagcgattcccaggtcccgcctagctctagtaaacaccattttttgaaaaaacaaattaatcttaattttaaataattcggaccagtaatagcgcgtttccatagtctttcccactgaggaacgagttcattgcaagtgtcatttggatttagtgcataaaggtcggacaattctaaaggtttccgacttcccaatgcacaaacggagttaaaccaccaaaagaattggcgattgacaaaggatgacaatttttctggagattttaacggccggaatgaatccatgccgaaatcttaattcaacatttacattattatcattaccaggcacaagcagttatatacatacataacttcaccttcttttttagcaaccaaacaggttcaacctcaaaaagctagtttttggcaattttcgaagttaaataaaaaaacaaaacaaaaatattgggtatgtaccataaacatatcaatcaaagataaaaattccaaatttcataaaatcaattttctaggtaaagtaaataaattagacaagtaaaaaattaacaaatttcaacgtaagctcaatgattaattgattaatcggttgtaatgggaagaaaaagaaaaattattttgcagctaagaaattgataagaaaacgacataataaacgaataaagattagtattattaattacacattatcggcaattttaatgagttagaaagaattaaatgtgaagagtggagaaaaataaataggacaaaaattaatgaactgattatttttccgcctaaaattttctactcggcgcctatcggccggtagaagtcagttctgtctgattcgctgacccacaaaatgtccaggccacgaaatgtccaagtctcgaaattgagttttttattattcggatgggcctaaggttaggcaaggggtaatataaaggctatattcgtattcagcgaccccgaaacccctaaaaaccccaaattagactcattttgtttttataaattttgaaaattttggacatttcgtgggtttttactcttttggacatttcgtggcttggacattttgtgggggcgccgtctgattgtgagccagttttatctagccagttccgtcttgggccagttcagtctcaatattctttgacctcatttctcaaatttacaaaaaaaaatggaaaaatttttttttatcctatacagtatataacaaaacaataagggtgcttttttaaattttattgcattttgttaaagcttttttgaaaatgccaaaatatacgaataaaaatttcgaaataatttctctcactccttttgctcattcatcccttcctctcatcatcttcctttctctcatcttcctcttcctttctctcatcctctccctccttttgctcataatagcctttctccttttcctccctttcttcctcttccttttgctcttcctgcatgcctttcttttcttcctcttccttttgctcttcctctatgcctcccttttctttctcttcctcgccctcctccttttcggcgtttggttcccttgtcacttccactcgtctcttcaccattcctcccatttcgatgctctctctcgcccccttcttccatgtctccagtccaatttcctgcatttgtcagtttggtttttttcttgttttgatcacttgcctcgttatttcgcggatcaaccacgcgcacggaaaagaatttctcttcggcggccatcggatcaagcattgaaactcgggtacccccaacattcaccgagtttttgtggtattcgaattttattggcaatgtcgcactgatttccttgaataagtgcatgtgaatctttgctcatcctttcgtcttacgttgatcagatcctgaccaattagcatatcggcaggacaatcgtaagcgattaaaagcggtgtaaagccatcgctgtgccacgggccgaactccaattggacgagagcctggccaaggaattcaatcggtgtcccttcactcgttgtgaccgttggtgcgtcgtttaagtcaatcacctgcggtttgatcgaattgtaaagaaagggaagcaaaatttgctgtagtcgttttggtcaaaatatgcaaagattggcaaaaactgacgtttagtttcagcgaattgacgatgcccgacccgcaaaatgaatgagtgaaatttgtggcaatcaccgctcgacaaggctgatcatttatcttgaccacaaccaaggacattttttagagactcggaaaaattgagaccgaaagggactcgaagtgatcgcttaaaacgattggctcagagggaatgttcgccatcaccacgctttggccatatgtttttttttgttcttttttcaaatattttatcctttttccttccttttcctccacagcatctgtcattggggaggatgaacacttggcgtaagaagcaaaaaagtgaattgaggtgacacaagcgaatgacgaaggaacacagagcaaagggaacaaatggggaggactgatcagtgcattaatggcaatgagagagaaagaactgatcagcccatccatggggacggactgatcagtgcattaatggcaatgtgagagagagaacagactgatctgacggactgaacagtcatttattggaaacgagagagaacgcagtgatcatcccacacatggggatgaattgatcagcgcattcattggcatagaaagagaaggatcgcaattcgtactgtaatttcctacgattttcgcttttttcaattctttcattgggattttttatctacttgtggtaaaaaaaagagagaagaaaatcattgctaaactgttactgctaattattcacagttacccatttccattcgtaaaagcaaaaactgtcgaaggaaagggtaaaaaagcgattggacttttgcgatggctttgccccccccccctataatggacatggctaacccaacagctcattgatattcaaccgatgcttccattcactccctttccgttctcctccaattactcctctccccccattctctgctcactttcattccagaaaatttctgttttcttgtcaattttccaatcactttggtctaatctaatcaattcaaaaaaagtccaatcaatcctacaaagtattcgggcattctgaagtgtttttcatgttggttgatgagtcatcgatgagacaatcaatatgtcagacacctcagagggcaaaagacactgaacaaatgtcgagattgaaagccacggtccaacatacgtaattagctcgaaatgatatgtattgcaagccaattattcaccaaaacatcgccacttttgttgttatgcgttgccgctgaacaaacatttgctcatttccaaaagtcgacatttccaatccttcagctttaaatttcggtgcatctgaaagtggtaaaagccatggaaaagccaagccaatctttttctaagctgagtaaatttattaaaccgtgaaaagtgatgacgaatgggcacataaaaatggaatggttaaaagtttccgatgaatcatttgaatctctcaaatgttcaaactgatgttttttttgcatctaatctcgacattccttctcttttcgcttatttctttgcctcgggggatgtcttcgtcccgtataaacttctttttccggaaatcctttccaaaatggccccactttttcgcctcctcttcgtccgattctccgctcgactcctcctcttcctcctccttttcctcctcttccccttcttcctcttcatcgtcaagcttcgaccaattagggcagaacgacttggacttaatcaagcagaaaaggcacatcggagacattcagcaattgtgggatgaggacgaaatgaacgggtgggggaggagaaagccgaacccaaaaaggaaaagcatttagtaaaatgcgaaatgccctcaagccgacctcatccaatcggtggacccaaattcgaagccatgatggcaaatttgtgatccctttcataatcagcggacagttcagtcagtttcacagtttcataacgtttttgctattgtgttcctcgaatttagcgatggaagaacgacagaaaatccaaaaagcaatggctgcgattgccaacaattcatgcgttgaatttcggccaaggaaattcaacgagttcgattatgtggacattcaaaaccgaaaagacgaggggtacctttaaagataaaatcgaattcgagatccaatttctggattgggctgtctgattttaaatgcagttgctacacgcaagttggccgagtgcggggccgccaagtgctaatgttggagtcggggtggagcaagccgtgcgggtccggctgcattcagagtgagttcatctcacatttgcgaggctccttccgatcggtccgtttcgttcagcgttccccggctgtgtcaaacacgcgacaattgtccacgaattgctgcacaaagtcggcctttggcatgagcacatgcgcttcgaccgcgacgatcacatcaaagtgcattttgagaacattccgccaggtcaaagcggcaaaaataaataaaaaccagcacattttctttcagatttccacgctcagtttcgcaaaattggccaatatgagagtacaacatacaacgtaccgtacgactacctcagcgtaatgcattacggtaaggagtccggtgcgcggaggaacggtttgacaacaatggagactatggacaaaagataccaggcaactgtttactcatgaatgcctgataactattttcaaaattgaaacccacagaatttgattggcactgtcaaagacgcttctccaagtgattaccgtaagatctgcgcaatttataagtgcacaaaatgcatggggagagaatttaagtacggcaatgcataaatcaaatactactttttcttagacttgaaaattacttttcaataataaattgaaaatgcttctttgttttaaaccgaaatattcgaattaatgggataattatttcgttttgtcagtgcgacctctgcaaattgggagtcgacctctgctggaaagaaaaggaaggagaacgaagacaacagcaaaaatagtagggagaaaaaacggcggagaatgccgtggccaccgaggggaaacgaccggcggaagaagtcaaaggccaactgcgaagaaagcgacttcctccgaccgagcaaaatgtgatcaaaaagacaaaggagcaccaaaaccaaacattccctcttaggtgttgctctttgattgatgcgaatgaattgcccaatctagggggattctttgctgctgaagcgatcat

SEQ ID NO: 12791 - DNA, 1707 bp, Heterodera glycines
cccgtaccaaaagaacgaggtaatgttacccgggtagacttacccgggtaacttaacccggttaactcacccccagcagctgcgggttaacccgtactaaatgaatgttaccgggctcgctgggctcacccgcagctgtgggtttggctacccgttacccgtttcttttagtatcactaccgatcttggtgaccaactctactttaatcacttaaaagaccagcattgcattttgaccagtgaaattaattttttagaagtgtaaaaatgagatattaggctttaaaaccaaaaaacaaattttatttgttttgaagtctccattccctattttcagaaattttttttttaatttttgcccgaaattgtccgcaaatgtccgtccgcaacaaattgtccgtccgcaaatgtccgtaaggcgttcgattatttactcattttttcccaatttttcttctgaatcaaataaatctacaatttgatgaatcataggcattttggctgatcagcaataactaccaatcaatcgatcattttgatcaaaatgtttcgaatcggtgcacaaatgacggcgcgttccggaaccgatttgcctcagtgcaggcgcgtctaatttgtttgttgacctgggccggcccgcagctgaacacgccgatctcggcaacttccgggtgccgactttgctgcaaaaatttgaagaacgagtcgaagttgggccgcccgaaatggttggtggcacgcagaccggtgaacatgctgatgccgctgttgtcaccgcggaagtgcttttcgcagatatactgttgaaaatgtgataaatatatacgttcaacaaattagagactaatgagcataattagcttagtgaatattacatctaaataatatattatattcgatcagtgatttattgtattgtaaaaggtgaagttgtttagtaaattggcactaaagttgttaatgaattcaaacttttggaaaacatattagccttgataaaattgtgaaaactgataaaatcaggtttctgtccctataattcaggcaaaagtgtggattatcgtattattttttcaaaaatgtatatgtatcagtgacgaattctccgatgactaattagggtgttgataaataagttcaaaatcggaattaagctgattctttttaatcaaatctgtcaaacaaagacaatctgcttaccaatacagttgttcgaagatcaaatttatggaagaattgtgtgacaaaaatgtgtatctcaaggatgccgtcctggtcatgccgttccacttgcttcagcacgtcgacaaaccattcaaaattcttatgcgtcggacaaatccacaggaaataaacctttaaaataaaataattatttaaaagtgccgaaaaataaaaataattcaattaatttcaaaataatgattaaaaagtgaattatgtaaaaaatggaattgattttgaataaaaataaattttctatcacacctttcggcactttatgccactatggttgcccgacgccctctccaacaccaaatccatcagcgtggaggcgtacggcgttatgccaatgccaccaccaacaaacacaacgacctgcaattgaaagatttcaaattaaatcaaggattaccctctctatcattatcaccctcctggtgtgccattcttgggtgccgtccccgaacggcccgctgagggtga

SEQ ID NO: 12792 - DNA, 1819 bp, Heterodera glycines
tttaaaattaccaaagtttgaaaatttctcaaagattctaaaatttgaaaaacacttttctgagtgttttcattttgggataaattttttattctttaaaaaaatggcgcttttatttttttcaaatttaattttaacatttcttttcaccttaatgaataactcaagagttggcgattgtggcgcggatgccaatgaaaaagcatgggactcgttgaaagtgcaggagaaggcggggcacgagatgcgcacccattggccagaacgaaatttgaacgaatgaggacgcttgaattggatgtagatgatatctgaacgggggcagataacgaaaagaaattggaaaataaattagacaaaacttaattataatcaattaaaaattaaatttgttgtagaaaattcgacctgatggtaaaatggcggcatcaacgattctcaactgtttgtagtgtttgcgcatgccaataatacgatcaataataaaaataatcaccgggccaagcacaatgtaccaaaatttgggtgactgaaaaccagaattttaattattatgtttttattcattaccgtatttattgtaatagagcccttggtggctctatttttcacaaaaggagggctttatttcagagggggggctctaattcaaggggggctcctgtatttgactctgtcaactcacgtccaacagtttgggaagcccgtggagtatggtaagagcatacagtaacacattgagcagatgcgttatgcgaaatgcatgataggctcgcttcatcacagcaggcgcagagaaaacgtaaattctaaaatttaatttataataataattttaatacattattaacaaaaacaatttcaataaaaatcacatcatacatggacatgacagcgacaagcaaaatgccggtgattccggtcaatgtgccgaagaaccaatatgagatggatggcaaaaagttggagccgaacaccgcctgggggggggggggggggggggataaggatggtaggtggatgagaactaattgatgagtaaaaattcaatttttaactcggtaaaaccctgtcggcatcccggacccccgaaaacacagttaaatcccacaaaattggtcatttttggagcatgattttcgccctccccatcgcaacattttggacatttatggtttcaaagtttttaatcttaattaaataatttgtgtacttcctgaaagaggcacgcgatgccctcctgactttgggtggccacatggtaaaagttgacgcaatgtccaattgtgtgaatggcagcgaaagtgccggcggtgatggccacaattttgtggaaagtaattgccgagtcgagcggtaaatactgtataaataaagcaaaaaccaaaataatttaaatttccgaattttcacttcgccaacaaatgtctcgcgaagcattgtcagcagatttcggcacacggtcagcaaaattaatgccagatcaacagacaatgccgcagccgcccctcgagtgatcgcaatgccaacgcccatcacgcggcgcaagtcgcggtgctcattttcgtagcgataatctgcaaaaagcattaatcggttctttatgtgtaaagtcttaagactcaaagcatttaaattatggacaaatatgaaatttaaaaatatcgtaataaaaataaatcaatacacccaaaaagcatcaaattaccgtgtttacggtatttgagcccctcggcgggggttctatttttcaacctcgaaggaaagggggttcgaattcgggggggggggggttcaaaggaggcaaatacggcaagct

SEQ ID NO: 12793 - DNA, 4602 bp, Heterodera glycines
  unsure (1)..(4602): unsure at all n locations
tgaaaaaaaattggcggtgatttctaaaaaaaggaggataacaaaaggagggaggaggtgggatttctggataaagagagatgaaaatgagagagagagagaggagcgagaaaggaagagagggacaggaaagtgagaaagggggagagagacaagaaagtgagagggagaggggaaagagagagaggaggaaaaggagagaaagggtgatgaagttggagagaggagagagagagagagaaagagaaaccagcctgccttggtggttgtggtaattgatgtgattaatgatggaacgaacgacggatgcgacacgggacggagaaagagaagagctgcaacagcagcagcctatttggtggaacattctatcggcaacttattgcgtcgccttataaatcattcagcaaaagaattcttagccgaaatcaattaaatttcaaaaatcgaatttcagaaaattaaaatgttcaaagatctgttcccctcgctaggcttctgtcccttccatgcccttttgtgggtgctcaaaggctatttaatattccgttccatcaaattcttcgaaatctttgtgaggagtgtttggggtcattttttcacaagccctctaaatttggccccctacaaaaaaagttggacaggtataattaattaattaatcatcatttggacgttccttcgacaaattcacactttcagtggtgacgggctgcacggatggcattggcagggcgtatttggaggaattggtggccacaaaaggaattcgaaaattgtatctgatcgcgcgcaactcaactaaattggaagctttgtgctcatatcttcgtaaacaaatataaaaattccgattaattttggactttaagaggaaaattacgagggatgcgaaatcaaaagagcgatttttgattttgagaaggatgattttgaaaaattgccaaccgagctgcagtcattggaagtcggcattctgagtattcgcttttgctattgtttggcatttccatttgattgccttttgtcctcagttaattgtgccgggacgggccccgaccaagtggccaacttcgctaatttgccccccgggctttcgtctgtcattctgcgcgtgaaccttctctcttgtgttaaggtgggtatgcttttgccatttgataatcactaatcacttgtgtcctccccccacccaaatttccctctcatttctaatcaaaagatgatcgaactgatccttccgggaatgctgcaacgcgaccgaggcatcgtcgtcaacttctcctccattacggtgttttcccatcgctgagattcgaataatcagctgaccattaatccgttcagggatggcgtcccctcccttatatgtccacttatccggccaggtgaccgcgtaaatccgatcaaaaaaggcaatggcaaatcctttcaagcaaagcagcgatcagcttcttcaccgactctctgggagatgaatttgcccacaccaacgtcaaaattcaagtgcgtcgtttcttctcctaatttggccctttctctatttttgctcttttttcagtgtcttttcccacttttggtcgcaacgaaattaactcaatacgctgcagaagatgcaaatctgttagtgcttgatgccaaaagctacgcacgacaagcagtgaatataattggcaattatcgaatttccacgggatgttttatgcacgacatgcaggtgaaaatagagactgggtgagaagggaggtcgagaaaaagagagtagaaaaagagtgggagaaagagggaggatgagaatgtcatagagagagatagagataagtgaggaagagaaagagggagataagggagagagaggatgagatattaattaagatgacgagaggtcattagctaattataaattcagtaattcccaaacaaatttgtttttcttttttcagatagcatttggcagttttattgggttcaatttgttcaaacttttttacgttcccttcggcattctcggaattcacaaaagaagaatcgatgcatacaacagaaagaaattggcaaacgaaagaaaaagcggaggaaaaggagaaggaataaagtcggaatgaggacaaatggacaaagaaaagagccaacaaaagttaaaaagagaaagtgaaggcaaagaaaggcatttgctaaagcaattcaaatggaaatggaaatgatcattgaattgtgattgattgcttaacaaagcaaagggatttgaatggttttcatgacaaatttttgcttacttccaattagattggaaggttttcaaggccatcccactggtttttggaagagagatttgggcgatctccgacaaatcacccgaggcatcatccaaccactgttttatttgaattcttcaaattgccacgggcaatgtctcccccccccccctccacggcccctccccttcgaattccgcccgtttcccatttaaaccggggcatctcagctgcacagctcatttctcgtccaactttttcatcgttttgccttcaaatggtaagtcaccccttcttgttctgttgcatcagtcgctttgcctctcagttgaaacatttgctgcttttgtgccttttccccgtgctcactttgggctgtttcggcggcgcttctcttcccggccaattccccggccaagtgaactttgacagttacgcagcaccaccgagttacaaaagtgagaagagttcgctcaaaaaatgatcaaaatgaatgtttaagcagcaccaccagcagcagttgcgagtcccctttctgctccaacaattactttggaggctccgccccctcctcccgctcctattttccctcttcctgctcctcttcctcctccttccgctcctctcttccctcctcttcctcctcctcccgctcctctcttccctcctcttccccctcctcccgctcctcttttccctcctccccaattaccgcaactctttcaatcgcctctcaaatactcccagccctcttcctattcaagtaatgtttaagcattggcttttttgctatctcttctcccttcagttgctcctcctccgtcttatagcgtttcgcccccctcttctcnccagtacgggtncgtgatgttatgtttggctatgcaaattgttgtgctttagaggccacttacgcaactccgtccaccgttccccccacaattccccaattgtattcagtcgttcctccgcagtacaaagtaagtcccgaaaaacctttctccccaaaagctttgccttgtcaaggttgaagcccctcagcttcccgctttcccaactcttccgccagtcgttttccccgcattgccaaatctgtccccgccgcctcctcccgagccaattttcttcgctgggcccccgccaccaccgcccgtgaaagtctcaagctattgttcgtagtcacgtatccctttcgaattgatccgaatgtttcagctgttgggccacagcctccgccgccgccaccccccgccccgtcctattccatgtcgccctacgaagtgcctccccctggtaataaaaacgcaaattttaattccaatagaccaatgaatcatcgttttatatgccttcagcttataacccggctttcaaagtggcgaatccgacaaattctgtcgaattgactggaaatgagcagcaacaactttcacagaaccaaggacagatgcaatcagcagatgaacagcaaagcaaccgctcaaagcaagacgcaagtcaaagggacgaaaaggggacggacgacgcccgaggggaggcagcggaaaagcccaagcagttcggagttacccagcaacaggtgaggatggtggactaaggccatgaatggtcatattgtgtggattaaggcccagaagttggaccaaccatcggtgatcggaatgaatccactgcagatgagggaccacctgcggacacagctgaagaagaacagaaagccgtggaaccaaccttaggaagaaaaccattggaaacggagggaatggacaattttaaactctcagggaacgatgcgatgatacctcattaattacgaatgaaagcctttttttgcagaatttgagaagtgaataaacttagagacagataaatgaatacaacaagagctcagttccacaaaaatattcaatttggcaacctccccacaacagggaaagggatggcgctacttgcaaagagccctcttttgaattttatcaaaaactaggggggacccttttgttttgcaaaaaattttttgatagaaaaccatgaaaatttgttctacggagttttagtcgtcgctgatcacgaatctgacatttagattttttgttcaaatttaggtcaagaaataggaattggtcaaaaaactatatcaatttatctcttcgaacaatcgcctgaacaatgtgaaacataaaatttgtcacgaccaattttaaaattaaaaaatgtaatattaactcaattaggaggctaaaaattcccaacagtcataattgttaaattactcattgattgcccattgttttattgccgtttcttcgtgtaccagtcacaaagtattgaatgaaataaagtgaaa

SEQ ID NO: 12794 - DNA, 3019 bp, Heterodera glycines
ctttgtgaagttttcaaatgacacaaagattgttgctccacgggggacaattaaaaaagttataataaaaaaactagacctggcgacgcgcggaagagacacattcattccatcaatggcactaggcactagacagccggagaacaagatgaatttttaaaataaattttcgtattcagcttttttttattacctatgtaatatgaaaaattcggattacgattgctctcacaatcaaagggtcggagtcatttcggcggtggccaaaaagttattgagtgcaggtgtcatgacactcgtaaaaattcgttgtagccaactcgtatacaaattttaatcattgaaatttaagtttgtgttctatgtctaggattcgttttctcaaaactcattttggtacgagttggcattttgactcaaaaagtcagataaagtcaattttttgttttggccataaatctttcacactaatgaaacagtccgttttaccttaattaaaaacattttattagtgaagataaaagatgaaatgatttgttgtttcagctgcaaattgcaatgaaaaccaaaaacataaatttagcgagtaaattgctattatttaggcgaaaaattggggtagacgctcggggccccttacgtggatccgttgtcttagccactagaccacatccaccactggagggatgactgttgttatggggccatctttccttcattttggcccctgtcttttttgctcgcacagcaatttgagctcccacagctattttcgatcagccattacaaggggtaatgggggggggggaaggtatggagtgaatgatggcggcggtgtagacagagagagagtttaagcttaatgggggcggagaggaagctggcttgatcagcagtgtgtaaaagcggaatgatgatacgaaatttggaatgccccacccccccccccccgttttgattcggttgatcggttttgaaagcagcagaaggaacggcgccgtgtgcttttttgatcactttttcaaatcgggtgagagggagaaatagcgatgattgatcaagtggaatttttggagaggcaagagaatgggagcagttttgatcagtcgagaagcgaaaatcgaaagctttttgatcagctaagaatgggagttaatggtgattggagaggaagaaagacggagagaataatggtgggaattttggcttaatagtgatcaggggggtaattttgatcagtttgaaagcgggaatgaatcgcccgccaattgctgaagtgaaaacaatatttttattgttgtttgttaattaagggtgggtgatcccacgacaccaccggtgtgtccccgaatgccggagctttttgtggatactttccccgtctgcaattccccgacaattacaccgcgcccccgccctccccggaagggtcagggtgccgccgccgccacccaattgttttggtgttttcgccgcggggaatcgggggaagaggggatggcgttatttgcttcatcttcatcggtcggaggctatgtgagaagcggggaaacggcggcggggaaaatggaatatgccgcccagcaatacgcgatcagcacaggcagcgcgccagattgatgatcaccagcctgttagccgctccgccggtctgcccggtggggcgacgcgccaacacacacacacacacacacacacaccgatcgaccaaccgatcgaaacaaaatttgatcagcgccgtttgcgaatgagtgagtgcgtttttgccaaccgctttcaaccgcccacccccgcgccatgatggaagccgccaaatgcatcacatcaaatcttccactgaccctgctgtgcggagtgggcgaggatgtgtgaaaatgggggcagtgatgagccaggctggcagatcacttacaatttagtcacgcactcatcactctcattcattcactcactctcacacggaggcgcgtcggccggaggcaaacgcaaaaatgggactgacaggaaaagtgcgaggattagggatacagcgcgattttcccttatttttcgatcacttttatttaatgaatatcttggggccacaagcattgattggtgcaatgaatgagtgatcactgatcagtgatcagcagtagtgccagacggacgactgtctgtccatcgtccgatcactttgaagcgcactgtcgcatgagtgctgttgagcttatgtgacttttctgtctgcttctcatgttccctctcgctctctctctctcgttttctttgtctctcttctcgctctctcctctccctcttctccctcgctctctctctctctatcgttttttctctgtctctctctcattcatatgctctctcaccctctcttttttcctcatgcttatatgatctctcaccatctctctcctctctctctctctcccccctccctctctccctcttctctctcgctctctctctctctcatttatatgctctctcacactcttttttcctctcaacttatatgatctctcaccctctctctctctcccccaatttttcgctttgagcttttcaactgttttcagcagttcttttgttacattgttttgtttgcactacttacatatgcaacacattgcacatcataatcaaacaaaacagcagcagaaagcaacaaaaagcattttgggattttgggggatgggactgaattggagggacaggaattttggaaaactcagcaatattttatatccggctggtaatggataattacatttattaattaggtaattaaaatgttgatttgaaaaaaaggtaaggaacagggaaaagagcaaagggaaagtgcgaaagaaaaagggtgagagagagggaagagaagagagagagaagagagagagaagagagagagagagagagtgagagtggtcaaataaactgaagattgaacgccaaaagtgcactatagccagaaaaatggattaattaaagtggacggacaatcaaatcaaccacatcaaatagt

SEQ ID NO: 12795 - DNA, 1063 bp, Heterodera glycines
gaaaataggcaaataaaaaagtgctaatgcagtctcaaacattatttcgttgaaaattagtttgggcttggcattttgtaaatgatggttgcatatttgatgaatataagcgctttttcttgccattccttgcacctaatgccgtcctgtggtttatggcacaatcgatccaatgcggcgatggcattttcttatctttttgtgcatttactgtcggattatccactgtccgattgtccagtcacggtccattcccatttcgtcaagctctcgcggcacgaacagattgttgacgcaacaatatgtggctggtgggcagcattcgttgattgcttaaaaattgaaaattattttattcaaattaagctttttcagtcccagaaatgccattaaaaaatttccagaaaattctttcagatttttattgataatgtttttctgcgttttcgttttccgagagccagcctttcagaaatgggcttgatgatttctttcaacaaaaaaaaattcaaaagaatttttcaatgaattccccgattttaatatcttagttttaaaagttgtaatccaattttttacttgtgttgatcctccatcgctcttccgcatcgcttagctgctcccaccaaaacggcacatgagccatcgaaatggcacaaaaactgaatgcaatggtaatgatgatgaaggaagtcatagtagtgtggtaatgggatttttggacccaaattaatggataaattttggggattacaattgtccaattatgcggttgtcaatggcaccgtttggcacgcctgctggccttccgcccatcggcacttcacgtgatcatctgcacctaattatggcattttggtcaaaaatatggaaaaaagtttgagcttttgatttttggcaaaatttatcttaaatgttttttttctcctatttatctttgtaatgatcttgatgaaattgtttagagcccggaattttgaaatggccgggaccgggatcgggacttggaaaatggacccgggcgggatcccggcaccgggactcccggtcccggcggtttgcc

SEQ ID NO: 12796 - DNA, 4118 bp, Heterodera glycines
  unsure (1)..(4118): unsure at all n locations
aacccggcatttgccgggttttgggggtccgtgccgggtttttgaaattgccgggtttttgccgggtttttgggttttttgccgggtttcctgtttccactcatttatttgaattttattaaacatttcgccaaaattaagaagcaaatatagtttttgttaattgttcaggtttattttattcatttttgatcttcattttctagtccgcagaatgtcccaaaaatctatttctgatttcatttccaaagttacatttcaacaatcatcttcaactcaaataatgggcggctattttcaaaaatcctaattttgtcctgctcaaatcactagtctctgcaattctgtcgatattcccttctaatgcattttgtgaatcagtcttttctgttctgaagaacatcaaaacggacgagagaaacagtattggcatgcctttgttaaactcgctaatttcaatcaaattcaatgcaaatatttcatgtcccaatgctcacaattactttctttcattgccaaattttgccgggttttcgagttttcgcgatggcacccctgtttgggaggtctgaaacgcacgaaaaacattttttagcttggtttgaagctgctaaattggcctttttggccccaaagaccggaaaatgtttccaaaaaaaaatcattttttagcaaaattttctcaaaaattgaatgaatttaaattatactccagctcactttacaaagtctaaaaatcaaatttcttgtcatttcttacaaatttgcaaaatttcttaatttatttcgaatgccgaaaatatccaaatcgaattcttaatcggtcattggatttcgaagttctctgctggattaaaagattaattttactttcaaacacatgaaatgtatttgatttgcgattatgcgtgaaaaaatgataaagaatgagattttgtggaatttttatgcaaaaatacccttgatttttccaattttatcacatacctattttggcatttttggggggtttttatcacataaaaatcccagctctagctatatgtatggcgaagcaaatgttcctaataaagaaaatattagattgtacgcaaaaaaaagagaaaaatagagaaaaaagggatttttgttttttttctctgcactctctttttattggtcatctctcattttgttcagactgtggaatgaaaagaagaatggtctttgttgtacatgtgaatgaattcaaatgtgtaggtgagggataaagagaagtaattgatttatttgctgatttttgtgtaacaaaacacttaccaaaggccattctttccattcattcccatcattttttaaaatcgttttactctactcattactaaaaccaaaccccgactttataaaaatccgaatccggattagggaatttgacccggaacggaattcaggattaaaaatccttttcaggagacctgatccggtaacaaaattagacatgaacactgactgacccggatcaggatttttccagaaaacaaatcttttttggtacttgtggtgtatcggtggttaattatgaaaatactacaaattttgctgtgtaatttttaatgaacttttgttaagatttgtttgaaagttagtaatttttatctccccattcgctggtgactcctaactccgctctggggtggctcttttggttttcccaagagcgccacatttcgcaccaatttggacgtgttttgcggcgtcagtccatcgccgccgccccggggcgctggcgacgggaccgctgctggcaaaacgacgggctacggcggctgcaaaaaacgaatatgtgacggcatcagcgtttacagtgccgacggcgattcggcacaaccactgcagaaatagcggaaaatgggacgaaaaacgatgacattgacggccgtagtggtgatggtgaaatctgcaaatataacgcactcggagtttggctcgagaaccgagcaagcttttcatttatcgtttaatgtatcatttttgttgctaggacccgcaaaatcttacaaaataatgcccagccctagtaatgattggagttttattgtaaaaaaattttcgctttttcacctccaccacttaattcatgaaaatttttttttcattcaggttccgccgacaattttttccaaattgctcgctgttccgacaagatcgtaaatcagaattaattcatgatttaacagtacttgaaaacttttcaacatccgatcacaaaatggtcggatttaaaataaaagaaaaattcagtaataaaaatcccagagtttatagaagagattttaaaaatattaattttgcaaaattaagtcgagcgatacttgaaaatagatttgatgtttctataaattcggtgtataccgttgaacaaaaatataacgaattcttaaataaagtactgaaattatatgatacttttatacccaacagacctctaaaatcgataataaaacaatcgtaccctcaaaaaataagagacttattttcagagaaattacggttacataagcttgtaaaaaaattcccggaaaaaagtgatctcatcttaaattacaaaattatttcaagggaaatgaagaaacaattaaaacaattcagaaatgaaaaagagtcaaaaattatttcccaggggcaaaattcagttaacaaatttatccgaaataagttatcaaaattttttgagattcctactctaattgataatgctggaaatatgttttccagcaatgtacaaaaatgtaaaatattagcagaaatatttcaaaagtcttttttaagaaaatcaattgttaatggtccacaaactcagtcaacacagaataagaccaagctttttgacattgaattgaacgctggcataatttggaacatattaagaagacttccccggcgtaattccacttcacctgataatatcccttatattttattaaaaaattgcgcagatccaatcacaaaaatattagcagatatatttaggctaattttggattccggtcaaattccggaaatatggcgaacatctttggtagtatcaattttcaaaagaggcgaaaaaactgatccattaaattacaggccggtttcattaaccagcactgtctgtagagcttttgaacgaattttgagtagtaaaattttagaatttctgaacagtacaagattctttgataaagaacaatttgggttcttaaaaaatagatcgactacaactcaaatattaaaaacgatggacgatatatataattctatacaaaagaatcaacaaattgacataaataatctatattgattttgtcaaggcgtttgattctgttccaattgatttattacttcaaaaaatcaaaaagattggaattgaaggaaaaatttataattttttaactaactttttaaaaaatcggagttttaaggttaaaatcggcgatcaattgtcagaaagtttcaaaatatttacgggagtgccccagggaagtgtcttagggccattactctttttaatttttataaatgatctgccgtcctttatttcaaataaagcatcatcagttggcataaaaatgtatgctgacgatgttaaattatattatgcccatgaaaacgatgaccattcaaatcagttggataaagcggttgaggctttggaaaaatggtcaaaaataaatgggttagaaatttcaactgaaaaatgttttgttctttatttagggaaaaataacaagaaaaaagaatattttattaactcaaaaaagatttcagaatcggaaagtgtacgtgacttgggaattataattgactcgaaacttaatttttcagaacatattagcaaaattatacgaaacgcatatcttagaattttccaaattttgagagtgttgaaaagcagggaaataaaaactctaacagcagcctataaaacttttgtacgacctcaattagaatacgctaccaaagtttggaaccctaatttaaaaaaagatatagataaaattgagcgtgttcanaaaatttttcacaagaaaagcacttagaaaatgtggttttgtgtacaaaaaatatggggaaagactaaaaatcacgggtttaca

SEQ ID NO: 12797 - DNA, 1114 bp, Heterodera glycines
attttgcaaagcatttgttcataaaagcattccacgtcaggtacattgaccactccgtcatcgcattttttcgttccaatcagccaatcttcgacaaaagaggcaccaatttgcgtctgtcgatttattcaccgtccaagtacttgcgcagtttacggaaccaaaattcacacaatatgtttaaaacccctcaattgcagcaaagctgaagtccagcggatttgggatgtttttgtcgatggaatttggcccatttttgcgccaaacattcgccatttgagccttgccagctatgaaattcattacgatatttatgagcataagccaacgccaattgagccatttgaattggtgaacgaacggaccaacgagaagctgacattgaaaaaagaagtcgcttccttttttgcaattagtcattgggtgttgaagcgatgtccaattcttggggagacggcggcggttcagcagcagcagcagaagaaagacgaaaatttgtgccgtttgaacaatgtctccgtttttatgctttgtaacactaattgcattgggtgaggagcaacaattttcctttttttttttgttgaaaacattcaaattgccttcaatttttaggcctttgtctccaccggcagaagcagcagcagaaagaacgggccaaagcagcgaaaagggcgccgtctgattatgtggaaatgaatttttggcacttgatagaaaacttacaaattaggtcgatcattttttgtatgaaattattgatttgccatattttaaagtttaaactcatatttatttttaaataaatacaataaaaattagtagattataaatgtttggcacacaaatgggcatcgctcaaatggctgggcgaaagaaattcaagtgccaattcattgacggaacattgcacttattcatcgccaaattagggtgatgctgagcaaccccagttctgagcgataaatccgcgactcctccccctctcctcgatcatttgaaataataaattctaagattttgtccaggaaatccacgttttttcgtgtttaacctgtacctgggttttaaaaactgggaaattttagcgaaaaaaaaacggaaaaagatactt

SEQ ID NO: 12798 - DNA, 2914 bp, Heterodera glycines
ttcactggtttacataaaattaaaacggggtgccccaccgtctggctttgattagccataaaaaagccaagcgggtttttcgtttgttgttttcagttacgggtgtaataaatcaacgcccaccctgcggcaagtcctgcttgttggcgaagatgaggatgagcgcgtcgcgcatctcccggtcgttgatgattttgtgcaactcctggcgtgcctcgtcaatcctggcccaattaataaaatgcattagcaaaattcaaaaaaaaaatgtttttttttggaaattttgacccatttaatttctttgtacagcaaatggccccaaatgtgagaacttagcacaaaatttttataaaaatgagaaaaatcgaggtgtttttgtgtcgggaaaacctgtctctgtcggccgaatcgacaacaaaaatcagtgcttgtgtgccgacgtaataatgccgccacagcggacgaattttctcctgaccgccgacatcctaaaaaggggaagcgaaatgaaccaaaagaaattcgaatttatggaagagatgggaaaactttatacaattgaggagttaaacgtaagtaaacaacttaaaatatgaacccgtggaagtaaacaatataaaacatgaacccgcgggtggttttagggtcccaaatcaccgcatggcatttatttctgctaaatcccgggttttttttcgactcggggctcagaaattaagcacgaaaatcactggatttggcgtgtctctgacatttttttgctgaaattcctctctcaaatccataaatttcttttctttttttttgctttactttttttcttacccaaacactgaatttgatattcctgtacacaaccgtctcgacattgaacccaacggttggaatggatttgatggactggcccaatttgagcctgtagagaatacctgtaaattttttggaatttttaatagcaaattagaacaaaaaggcaccaatttctttttagttgaccagacaggaaatgttatttttgatttgataaaataccagtccaaaaatgaaatttcaacaattaataagaggaaaattaaaaaatgtgaagtgccacaaacttgtctttccagccgcgtccaatccgagcattaatattcgaatttcctttttgccaaatagtttcgataggattttgcccatttaaattaatctataaatgacaaaacaaaataggtggcatttccaactgatgttttccaattgatgtctcgagcgttatttgcatttttctgcatttttgctatatgtaaaagaaactcaaaaatagaattttttgtgttacaatttttgtttgttttggttaaggccgtttattatgagaaaaataagtccagaaatgggaaatttcatttttctactactcatttcttcaaaattaatattagttttattttgaatttttttttctaaatttatttcataccatatttaatgcttaaatttaacgaattgaagaaattttgaaaatttgaagaacgctcgcaattgaacccgaatatgatgtccgtttcgacccatttcgaactccgaacccggattcgaacaattatcaaaattcaattttttttctttcaaaaatgctttcccacttcattgccgactaatttccttatcagcaaattgcttcctacctacgcccacacccttttccctcatttatttggtcaagagttgcaggtcatttttttgcgttatcaatgcgagaacaaacaaagtgggcatgcagaacgacaacggcaatataaatatgatttcttgcgatgataataatttttaggagaaaaaatgaaaaaaaaaattgaattttgataattgttcgaatccgggttcggagttcgaaatgggtcgaaacggacatcatattcgggttctacgaccccgaaaacccatggaaacgactttttaatttaaaatcaatttaacaaagagaaaaattttgttgacacaaaacccgaaagtaccccaaaacgacttgaatctaaggaccctgctctgcaaattattacggacactatgggcgagagcgcctctttcaaaggcattcccggtgggcggagttcggtgaaagctgacgaagcatacagcgatgttagtactccaacatcaatagagaaagaatgtgttactattgtcttactattagtactaagaaatataacgatttttaggaagacaaagatgtcaacaccaaaagcgaaaataattccacgttgggaaaaaagcgggtactgttgcagaattgcaaagaaatgttctggaactctcaatcgaaaatcagaaaaaaatgtcagatctcttgacaatttcaattcatttgtcatttattttgatcaattttagcatggatcaacatgtgatcaatggttaacgaagccagcagcttccgttgccgacaagatttttgacgaagatgatccgacttttattgttggtgataaaacatttcgaacattgtaataacagtgccgttttaacaaattaatgttatacattttggacatttatcacaatttatttttgaaattattcaaataaatgttaaacatttcttatgaagcatatgattaagttgttaaacccaatattttaacaagcatttcataatatttttgaaattatagccaatggcagaatttatggaaaacttagaacagaagaatagaaggggtgccaaaggattttacgttgaccctgtccttgaattacggtttttatctgcgggcgatcgaaacttcgaactgatcagacgataccgctttcctgatgaaggaattgatttcatttcaagtcttgtaaaggatgaccttcagccaaaacgatggcaataaaggaaatccaattcctgttaaactacaggtttaagttggttaaa

SEQ ID NO: 12799 - DNA, 1390 bp, Heterodera glycines
  unsure (1)..(1390): unsure at all n locations
cgcgtgcggtgcggaaaacgatgggtggccgagtccttctaaggcgccgngcaatttgcccgcggcgtccttgacaacttctggaaaaatggaaattaaatttaaaaaattctttttttgttcaccaaaaaaatcatggccattttctaaataaattttttatgtagcagaaaatttgacattttttttactgttaaaaaagtaggtaatcaataaatttcagcaattaaaaaactgttattcgtagaaatcgaaaatttacaaaaattttcttccatttttaaagcggattaatttcaagaaattatatagaatttgtatgcaaaaaatagaaaatttctcagtttgctgaccgtccaattcgtcgtccgacacggtcgggtcaaagtcggcggtgtaatggcgcgcccggtcgcccgactccgctttggccaacacttcctcgtccagcgagaagacggggtctaaaaaacgaaaacataacaattaaaagacccatctatttgaaaatccccccaaaaatttcggggagggcacccgaagagcttcatttttttttgctcttcgggtcaaccatttgtttctccattgtttttattttctattttcagcgcaggggcgaaaaagcaggaatttttagcgatttgcgccaaaaataacaaatttttatcgtttaggggtcacatttcaaaaaaataatggtccaatggggtccggcggtgccgctaggcactgccgggaaacatttttggaaatttaatggcatacgataagaaaatgcacaaaatttcaaaaattttgcccattttttctggaatttatttttccggtggggtccggaattataaggtgctcctttctgcacaaaataaagaagaatttgatagacttttgtattatgcccaatcgctttgtgatcaaatcgccaatgaattcaaaaacgaaattttttcggcagaaaaacaattaagcaaaactgttgaaccaaataatgcagttgtctttctcatttgctgcacggattcttttaagtttttggtcggtatttattcaaatatataaataatagttattataaattattaaataaccttatttttcaattacatacaaattcatttttgcttattccatatcgggacagagcatcaatcgcataattaagaaggagaaactcgaaattcaacctgtaccaaatgctgggcagcccttggcaatctttgaatatttttgaaagttgaataatttaaaaataaataatattaattacttaattttacccagaaggtatgctcttggccatgctggaagaccccctttgtttccgattaacacatggaatcatcatgaaagcgttcttaatgacatgggacgtacaaacaacgttcca

SEQ ID NO: 12800 - DNA, 4239 bp, Heterodera glycines
  unsure (1)..(4239): unsure at all n locations
aaatcacgcaaaaaattttgacaaattattaagtttggggtggaaaattttatggtcgtgtctttttcttaggtcgtgtgaactgcaatcgagccgtcaatggtcatgatttagataagccgatttttttttttgaaaactcattggaggtaccattaaaaaaaccgcccgtttcctcattccgcaatttaaagcgcttttaaaattagttgggtaattttttagtaaatgtttgaaaattgtcactgcccgacccctggaccaagccctccctctaaccctagaaaaataattttgaaaaaaaaacctgcaatttgtgctgctccgtcattttcgtgtcgtcgccgccgccaccgccgccggcgcctccgacagtgtttgaggtggtgctgctgttgttctcctcactttcgctgctcatcatcatcagcatggtctgctgggcggccaacgatggcaaaaatggatgatggttgaagcgatatctgaaaaagggatggatcaatggatcaaaggtaaataaatttcaaaaaatttgagggtatgcaagaattggaagcgggtgggggtgtgtgtatccgggaaatgccggcggaacccgatttccgatatttttgggctcgaaattccgatttccgacgttttggggctcgaaattccgatttccgacattttggggctcggacttccgatgccaaaaatttttgagccgttggtgccaatttccgattttttattttttgtgtgcattggcatatattcctaatgtgcatgccattttttgcacactgaacattagctgaatttcgtgaaaaagtaaattttggaccccaatttccagtccttcacctccgggcgaataaaactaaaatttcttcaaaaaattgaaatccgcccaaatatccaatgtatgaatttaaatttagcctaaaagtaaacaaaaacgccttttcctcccacatctgtttcttagttttttgaatttttttgaaaagcgttaatttttaaaatggcacggcattcattcaacaacactgtcctccctatcttcccctcccccctctcaatctcggcattttttttttggaattttcattttcatttttttgtgtgtgcctgctgaggttgttgtgcatttgaatgtgctgttgctgatgttgttgttgaccattgccgatgataatactgttgctgctactgtcactgcaattttctttgccaccgccgccgccggtggttttttggttgttgttgtccatgaatggcagtgaaaaattaagcggatgggaagagaaatgcggggggcggaagacaaaaatgaagatgaagaatgaatgaatgcactggatgaaatggcacactgtgtggtgatgatgatgatgaagatgatgcccttttacggagcgctgcccgttgcgaaaaaaaatgtggcgggtgaaaaagaagccagagaagaagggacgactaacacaaatgaactgctgaaaaatggggagaaatcaatttcggaaaaaactgaaaatcgaaattttccctcagtgngagcaaaagggatgacaattaaaaaacgattaattaagagaaagtgccatcagaatcatgtggcacaaaaaaacgtacttgtacatctttaaggctgtccttaatttgagacatgatttttgaaaaatttaaaaattcattttgaggttagaaaaattttgaatgttggatggcattatgcccattattgttattttcgcgtcactttaacttaatcaaatttttaaggagttaattattttttatggttaggtaggtatttgtaaaaataattgtatgaattttgtgatttggttcactttttcctgaaaaaagtgaattgaagggtaaaatgaaaataaaagaaaaaaaattctgaaaagatattttgcttttattaagaaaaatttaaaaaatgacaccaattcattcattttgcccgtggcctacgaggaaaacataaaattggtggtggaaaaaaagacatttacaggggcagtggtacgtacaacttcaattctttcctacaatatcatctcctatctccacttgcccatcatcaaagcaaatcaaaatcatcatcaaattttcgtagtaatattggaaaggtgtcgaaaggggtggaagaaaaatgatcaattttcttctaatcgcatcatcaatcagcagcagtaattgtgcaaaatgcttcaaaacaaaatcaaatcgatcgggcgtagcttaatactgatgctggtggataagtaagggggggggggggggggtaaatgaataatgcaattttcatactaaatgatggagatacctaacacaaacgaaaaattggcggaaagttgtgtggtgaaaaatgaaaaattgtataatacggtcgagaaattttcagggttttcatcaaacattttttcagtgttttcggttttcgccgataaaaaataatgatttgaatttgcacaaaggtagggacatatgccaaagtaggaatttccagcaaaatcattctctgaggacatgaaaccgagttgcaaaaatcaaattggtgtgtttgtacatgttttttcttgtcaactaaaatcctatttctctatttatgtatttaaaaaatggattggttattcatttttttagtgctgctcgagagtgtcggtcctcgcctcgagaaaagtctcgcgtttttgtgtctcgggaaatgttactgttatttttactaagcgttggcaaaacgaaaatttgtaaaattccctcccccctttcagccatcagcagagttgtataaaaataaaaagatgaaatttgttgccccatttataaacaaaaaaaaatttattattacaaatcgtaaatttattgttgagtctgctcattcattcctttcatcaccaccaaaatgcctctcaattttttttaaccaaacttttttgttagtctaaaaacattcaaaagatttttactcaaagtcgtaaaatcagacggagagttcgcccgcggcgcccataaatattttttttattttcaatattacatataaattcggctgaggtcgcctcaatcatcaagcaatgcaaataaaactgttttggaacataaaatttccaaaattgggagtccctaatgttgcgctgccacctgtcgtaaaatggcaatttcaaccaaaactctcgaggttggttggttgctccattgtatgtatttatgtaaccaatttctcgaaaatatgtaataatttttgttgaccataataaaactgcgagagttttctctccccccaagcagctcaagcgtggcttttgagttgtttggggcataaaacaaaatgtaacaataaacaataaataaggtacaaataatacatcattttctttcttctcaagatcaaatcccgtcaccccccgggggccaatgacaacagaaaacaaaaagaaaaatggtaaataaaaattaaaaatttgttgttgtgcactattttatggatggggtcacgtgcccaaatggataatttggagaagaaaatgagaaaattgtacacaccccaactcaatttttgggctcacagttcaaaaaatatttgtatgtatggcgaagtggtttttgtaaactagtaaagggacaaagggcggaggttcgagtccgttgtgctacatgaatatttatttttctccaacaattttcggaattttgaaggtttttgacaacaaaatttgacaatcttggtatcactcgaaagctttgataaggagaatctttttctaagcaaatgctaagcaatctgaaaagtttgaaaaaaatgagcgttcgaaattttgttctctgaacaattcataaaccatttgaaaagtcaattaaatcttaatattcatttcaaaataatagtttgaaatagaaagttaattttgccaaacccaaaaaattccaaaaattttttgcatttttaaattagatatttttttatctcctgaagggatgttctcgactggagaaaaatggaaattttcatattttctaatgaattaataacgaaagcagcttgacatagggtcccaaacgtgaatatttcatgaaaaatcagaacatacatatggcatccgtggcataaaaaaaaagattaaaaaaatttccattttacaaaacgccaaaatttctcaatgaaagcgcccgccaactttaaaaagcgaacaaacgcctaaatgctaaaaagaacttttcccgtcgggagagagagca

SEQ ID NO: 12801 - DNA, 1542 bp, Heterodera glycines
cctttgacttcatgatgggcctcagcgcccttggccattgacttcacgatggaccccagcgcccatggcctttgacttcacaatgggccccagcgcccttggcctttgacttcatgatgggccccagcgcccttggccattgacttcacgattggccccagcgcccatggcccttgacttcacgatgggccccagcgcccatggcctttgacttcacaatgggccccagcgcccttggcctttgacttcatgatgggccccagcgcccttggccattgacttcacgatgggccccagcgcccatggcctttgacttcacagatggcctcagccaggctcgtagtgtagaacataaagatttcgcccggtgggactcgaacccccgacctctccaaagcatgaagtgctctgtccaactgagctacgggcgccacttagtggttctccagtattgcgcctgtggtcgtctcagtttgcgccatcgttctgtttacgcttgtgttcaatctcagtctgcgccctcgctcagactcagtttgcgcctgcaattgatttgcgttcccatttgcgttcctcaatgtgcgttccaatttcgcctcaatttgcgcgctgtctttttgttcctgctcagacagtttgctcttccctttcgcctcgttttgagcttcctcaatttgcgcttcctctgataattttccattccgcctcggtctgcgcttcctcaatttgcgcttctcatttgcgcttctccaatttgcgcatctccaattgcgcttcaacaatttgcgctgctccaatgcgcttctccaatgcgctttctccaatttgcgcttcaacatgcgctgctccaatgcgcttcaacaatttgcgcagattaggctcactgccctctttgtgagctcggcacaatgccgccaatgagtgcgagataggctcgctgcctaagcgcatgaccattctttcctgaggggctgtggtgcggaaggcgaggcgccacgggccaaaaagagacccgaggggccgtatggcgcggaatggaaggcgccccgggtcacaaaagacccaagggaccatatggtgcggaatggaggcgccccgggttacaaaaaacccgggaggccaaacggtgcggaatgcaaggcgcgaaaaggcgaggtgctacgggtcacaaaagacccgaggggccctatggcgcggaatgcaggcgccttgggttacaaaaaacccaaggggccagaaacgcggaacgcaaaatggaatggcgctaatgccagacgccacaggttacgaaaaacctgtggggccggcatgctccccctacccctgctcacaaaccccaaaaccccaccaaaatccctgccagggtcgccacttgttgcggctcggcccacaagccgcaacgggacggttcgtcgtccattgttcggggtggggtgaaagcggagggagagggagaggggctgcccagactacccaagaaccccccaaaatggacggggtttttagtctttattttgtcgcaaagccatacgaaatgtacaa

SEQ ID NO: 12802 - DNA, 2022 bp, Heterodera glycines
  unsure (1)..(2022): unsure at all n locations
ctgaatcagtgtttgcggaatgaccgagctgataatcgccaataatcttcgattacatttttcttggtcacctttttgaaattccaccatttcaactccttatcatctaaatataaactgaatcagtgtttgcggaggaccgagctgataagtcccaataatctccaatttacaattttcatgatcacttttgtgatattctcaatatttcaatttcttatatccaaatgtaatctgtataagtttacagtaggaaattgtaatttgggggttattggcgatttcaaaccgatccttccggaacactgatgctgtttatatttagagcgtaatgagctgaaaatgtcagaattcaaaaagtggggtcgcgaaaatagtaaatctgaggttattgacgcttatcaacctgatccgtctgcaacacttaaacagtttatatttaaagcctaattagcagaaattccaccatttcaactccttatcctctaaatataaactgaatcagtgtttgcggaggaccgagctgataagtcccaataatctccaatttacaattttcatgatcacttttgtgatattctcaatatttcaatttcttatatccaaatgtaatctgtataagtttacagtaggaaattgtaatttgggggttattggcgatttcaaatcgatccttccggaacactgatgctgtttatatttagagcgtaatgagctgaaaatgtcagaattcaaaaagtggggtcgcgaaaatagtaaatctgaggttattggcgcttatcaacctgatccgtctgcaacacttatgaagcggatcgcttcgggacgctttgcgtccattggttcgggggtgggtgaaagcggagggagagggagaggggctgcccagactacccaaccaagaaacccccaaaatggacgggtttttagtctttatttgtcgcaagccatcgaaatgtacaatttgtgttgcttatataggatcagaaaatgggcgggtacaataaaaatgatggggtgatcatttgggttgattggtcgttcttcttcttcgtcgtcgttgatcgctcgatcggctttttctgcccttaggcaccattcacatgcgcggcgggggctggtccgctttttcacttcttctttcttcccattcacatgcaaaagcccctcttgcggtcccccttttttctcattcttcgcccaatttcccgttctcctgttttttcctccttctccccccgcatttctttccattcgacaactgtccgatcatcggacagtcgcggctaaattcgagccgcgacattcccacgcttgaccaacgtgtgcacgtaatcgcccttggcctctgacttctgctgggcactctgccccttggcctttgacttcacgatgggccccagcgcccttggccattgacttcacgatgggccccagcgcccatggcctttgacttcatgatgggccccagcgcccttggcctttgacttcatgatgggccccagcgcccttggcctttgacttcacgattggccccagcgcccatggcccttgacttcacgatgggccccagcgcccatggcctttgacttcatgatgggccccagcgcccttggcctttgacttcatgatgggcctcagcgcccttggccattgacttcatgatgggccccagcgcccttggccattgacttcacgatgggccccagcgcccatggcctttgacttcacaatgggccccagcgcccttggcctttgacttcatgatgggccccagcgcccttggccattgacttcacgatgggccccagcgcccatggcctttgacttcatgatgggccccagcgcccttggccattgacttcacgattggccccagcgcccatggcccttgacttcacgatgggccccagcgcccatggcctttgacttcatgatgggccccagcgcccttggcctttgacttcatgatgggcctcagcgcccttggccattgacttcacgatggaccccgnagcgccc

SEQ ID NO: 12803 - DNA, 1196 bp, Heterodera glycines
tttgaacaaacgtttatcgacaactgttgcatgcaattggtggcccgtcctgaacagtttgacgtcatggtaatgcccaatttgtacggcagcattgtggacaatttggcggccgggttggtcggcggtgcgggcgtggtcaacggcgagtcggtgggctccgactacgtgatctttcagcctggcgcacggcacacattcaaagaggcgtttggaaagtcggagcaaacaaaaaattattattttttttacaaatttgaatttttatttatttccagacaaattgccaacccaaccgcgatgattttgtgctgtgccaacatgctcaaccatctccatttgaacagttacggcacggcactgcgacacgctgtggagaaagtgctcaaagagggaaaagtgcgcacccgcgacttgggaggtgtgtgtgccgtgccattcattcattactcaatcaaaatttcataaaatggcaccaaatttgtactacaatataatgttttttccaggctttgccaacaccagcgattttgccagtgaggtcattgccaatttccaaatgtgaaacgaatgatgttgcgcgacagaaatgtgaatgatggcacaacatgccgaaaaacaaaataattattagaaaagatttttattggtttgtttttttcttgttattctgatctcattatcatcatcatcattctgttgttgttgttaattttgttattgttgttgttgttgttgtcgtaagaatataataggcataattatttatagttttttctatttgttttttgtctcacataaataattcgtattgttgtattttatggtagagactatcatttgttttttcaatctcatccgacatgattgatatgcaatgaaaatttgctgaaattttatgaaattggcaaaaaattttctagaatttgccatttccaagtcatggtaacccctcggaaagttggggtcaattagtcaatttttaagtattggttgggttatctttccgcctcctcccattataattccgccgttttagccaaccactcataatttgcctcgaggggacacttccattggcacaacatcactcctcccccccggggggaaatgaatttgcacggcacaaccaaacacacacatctgtcatccgcgcagaggaggtcaaccgaacccaaaattatcattcatccttt

SEQ ID NO: 12804 - DNA, 2281 bp, Heterodera glycines
tttttaggattagttccagtagcatattattgtacctacattaagcagcagcagcagacagtcgagaaagggccacccccccccccccccccccaattttgggcgttttgcggggcgcctggcagtgtctgtccccgggggcggcggacattgcccccgcccctgccggggatgggttgggttggcatatggggaagagccatctcggcccggcggcggcgtctcccccccccccccccgcgggtcaatttgcccccgtcaattgggccgggggcggcaaaggcactgaaaatgatttattacttgaggggcgagaaacaaatcaaaggaggaagacggcaaaatgttcattctcattagcttgcctcccgcctcgtccccactcatttcggcacccattaaaaaaaaaattaaatttttcaaaaaatttgcatatttttcccctcggggccaattgtttaaagcgaaaacgcgcagcagaggacagcagcgggacggaaagcgccgcaccaactgttttagtttttgatgagaaaaaggaacattagcagcagcagaggacaaaacaaatgcccgccggggataacggtgggaggaagaagaaaagaaacggaggcttaaacaccctcccccctcgggatggacatttttacgacggacgacaattcaatcccttgcccccccccgctctttcactttgactaaaaattgatgggccaaaaggtcgtcgccagaagagggagggacatcacgacacgacgacaaccaccaactcatcagcagcagcagcggtcgtcccggcccggccgtcccccgaggcgcaaggggcaacggggggcggcaggtgtcctctatcctcgactgctgctgacccgcccccgggggattggcaagatcagtccccctcccctccatagcccacaagtccaaggcagggcagcagttgtctccaatgccctccctctgcctgcttgcccgtccgtccatgtgttgtcccccctcaatgcccttcccccccgcccatttcccccgccgctccctatggactttaaaattgtaacaaattactatttatttatgtgtgtaagtttaaattgggtaaaatgggatggatagaaaaaagaagcagcaatttacattttgaaaagcacaacaattgcatccgccctgctctaatttgtcaatggctttttggcacttttctaaaaacatttcgcgacataaaatgccgaagtgcataaaccaattaaacggggcggattttttgatttttttatgcccctcgcgctatttttgtttttaaatttcgcgcctcatttttcaatttttattaaattttactggccccaaaaattaaattttttatttcactctaattgtacgtttttcatcttcctttgccgtctctgttttccatttttttcctttttttccattttttcccctctctctccaaggaattgtcattcaaaattcgtcccattccattcacattttctcgcccaatcgccataatggtgctatgacgaagcgacaaaaatatgggtgtttgtaataattaaatttaattattattttaattttattttccaagtaattaatatcataacttagcttaagcttagtctaattaataaaatttagtctttagcgacagctcgaagcatcctctactacttatgaaattttcaaaaaattagtaaaaatttacaaaaagttgtgactaaaaaagtgcgaaaaattttgactcaacaattttgaccctagctttcttgaaattcaataaaattttttgaaatttagcagaacaatagagtaatctttaggctatctaattatataaacaaaattaaaattgattgttttagaaaaaagttatgaaagaattaatagggtcatatttttatggacatccaaaatgatgtaccgccattcatgtgcatatctattccccgaaataaaataacatcgctagcagaagacgaattgacttccccaccaagatttgacgaggatataaaggttataatctccgccaaggtaccacgagacaaagagaccgaatttggatgatgacaaatctcccccccctccggttaaaccagcctctccacctaaaccaataacaccgtctcctccagctacaccattaaaaccaccccctccagctaaacaaataacaaaaccccctcccgctatacctttctgcacaaccccctcccgctaaaccagcaacaccactgcctgttgccaaaccaaccacacaaccccgtctacctaa

SEQ ID NO: 12805 - DNA, 701 bp, Heterodera glycines
  unsure (1)..(701): unsure at all n locations
caccccctcccccccgtccattcacttttctgtatggtctccccccccccctctcccgcctcatttcgtctctaatgagtgcgggcgcggcactcccggccccggccaattcccaacaagaaatgacaagagtggaggggaaagcttaagacgaagtgctactagctaggctcgtcgataaactcactccccccccnccttcactctcgagtttttctgttccgcgcgcaattgggcaggcagcacacattttggcgcattgccccatggcacaaatttaaaataaaaaccccaaaaaacggaatgccaacggagtgaaattttcccaattttttttaattcttaggccgcctaaaatagctttggcaacatcggaaatgagctgtatccatggggacattagcagaagaagacctaatcagcagcagagggccaagggacaacagcagcctttctccctcctaattaaattggaaaaaatcaaaaaacaaaatccttattaaaattattttaaaaatttgttggcatccggggtaccgcgcgaccgcgcaattttttaaccgcgatgcgcgacagccgtgatttttctgtccgtgctctccacccacctctggcggacatcatcctattgcccctaagggatggatggatatattttttggaaatggcacatttaaacattataaaaaattttaaacaaa

SEQ ID NO: 12806 - DNA, 1248 bp, Heterodera glycines
taattgttcattttctttatttattttcttattttccttctctgcccatttctcttcaaaatttatttttgaatgccaatatttgatgcaaattttgtcaaaatgtctctctgccaaaattcggtgccaaatttcatttgaataaatgcctaactcgagcaaatttcgcggcatctcaatgctaaactctttcgaatttgaaagaatattttgaaaatggcccagaagaaaaacatcctctttgatatctaaaatgttataaatgtcataaattttgaaaatttttttatttttttaatataaaattgatatttttattctttctttcgaaatacactaagaaaatcattttgctaaatttaaatttaaaaattttaagtttaataacaacattttaccctcttttccaagaaaaagattaaagtcaaaataagaaattttatttgaaatatgattcaacttttttttcatttattgtttttacttagtttttttaatatattgataagttttttaatttaaatatttttatattttctaataaaagtaaccgtttatttttaattattataaatattctttcatttaaaatacctgcaattctataggcttttttggttttggcatttgtaacagcggcttctttttttgcaacagttccttcaccattagtaccagaatctttatgctttgttttttcttcttcattaattttgttttccttttccttattttgtgttttgtcaaccttttcttttccttccaaattttttgtcagcgctttgtcatcattatcatcagtcttttcatatggtgatactttgtcagtttggcaatttcccttggcatcattttttggcattttctctgatacagcgaacgacactgtatcgtaaaatttttttgtcgactctttttcctctgacaattgatcctcccaattttttgtaaacattttgtcacctttaacattttcattcgtatcatcaaatgttgacactttgtcttgtgacattttgtcctcaaaagtgtttttcatgtctttgccattttctttctccccgtttttttccttttttgtctttttcgccttcttctttttcttcgttttgtttttgctactttctccggtattcgtcccattttctttgcctaataatgcgtcatttaaatcatcaaatttggactcaatcccaacaatttttaaaatattgtcaacttcctttatgccaacaaagtcggaaagca

SEQ ID NO: 12807 - DNA, 1756 bp, Heterodera glycines
  unsure (1)..(1756): unsure at all n locations
attgttaaaatcaaaccctttttcattcgcgcagcaaactctgtgattgggtcatatttttcctcagttttaccatgttcttccccattggtctttaccatcggctcttggttcaaaaagatacgtttaagctgattagcatgcaattggtttagccattctcgtactacggtgcccattggattgtgccgttgttgttcctgcttttccttaccaccggcactgtaaagtcgctccgattccgtttcaagttgcttgaccagtttttgccatacaaccttcaacacttggggctgatcacaatgccgatgggtgatcagaaagtgtttcagttcgccgcttgttagttcaaaaatggcaatgtcacggcctataccataattatcagtcaaattctcgtcaaaaacattgtcgtataagatctttaattcttcccgttgtttgtgccaatattcgcaaatatattgcccctttggctcggcatcaaaccagcgcacaaacacaatgatattggctgccaatttggcacttattcgttcgatttcgggaaaactgttggcatttaaaattgcatttgtataaaaagacgtcaaaattttgtcgtcctcaaaaactaaagtatgcgcaattttttattgtctaatataaaaacaatttcgcacattatataaattatacaaatttaaaaaattccgtgctcggccattactgccaaatgggcgtttctctaattgcctccccccgcccctcactcatttcaacttcccaaaattcaaaaaagacgagatttagagaaaatcaaagtttaacttttaaaagaaaactaaaaacaatttctaagaaatttttttttagaattttccaaatcttttattatattcattttttcttaaaaacataattaaattattccaaatgctctttttccacccaccatcgccaggatattggcacatttgaggatatttggcacaaagtttgtcgaacaattttttgccaagcaatcgcttcagtcgtgtcactgtccctgccacactgcgcttcgtgaaaacagaaacaaacggaatgccattttctacagatgacaaaaattcgtagtgccatttccgtatcctttcccaaagttgcttaaattgcggcacttgggcatcatttacaacgcaatccaaaattaacggttcgggtggcagaataaagctgccgccgccatccacgaatttcaccaaatgcatcatccaacaaagtccctccgcattgtcaatttgattgtacacctaaaaagggttactgtaaccagagttgggttggatgatagagaaatgtcatttagtcttggcatttagcacgatggtcccattttagaggatttgacacgccaagaagggtgtggccattgggtctatagcccacaccaaaaaaaccgtggaattttataaagtttcaattaggtaaaagcttttttaaatctgcattttttctaaaacaaaaaaaaaatcagtaaatttttaagtgaaattttcagtttaaaaaccatgcggagcacctgactgcgcataatgccaagtgccattcgtgtgtcggtcgcttgagtcgtgccaacactcagcttaacggccaaacgcaatttgaaataactaagaagaagtgatatggcgaaacgatgttcagctttctgtgccatttcagtcccactacggttcaacaacacacgcgcgtacagtgactcacgatgactgnggcaaagcacttctgtgga

SEQ ID NO: 12808 - DNA, 817 bp, Heterodera glycines
atttttctgcgcaatattggacattgtttgcgaatatgggctcttttgttttcgttggtatatattcagatatgattgtctgaagaaattttaatttcaaatagaaaatttaatttgaatttatcatctttataattttaaagtaaatttgctattaatttctcccattaaaatttgaaaatttaaaatctaaaacataccgcaaatacaggaccagtgtttacaattaaaaaaaaaagaaattaatttaaatgaaaaaaagcttggcaaaaattttaattttcgaaatatcttctaacacatttatttcttggtattgttcgaaagcatttgaaaaactctatcaaatgtttaatttgattgacagtgaaaatttatggcccaaaaagtctttcggcgacttttcggccggcgacgttttggggtgcacccactcttcccacactctaataccgtttcttttgatctctcactaattaaaaaatattaaatatgtacggtaattaagcccacaaatcgctttcatatccgaatttttaccatttctgaccaccgttttttgcgcaacatttgccacaattcttctctttgctgttccgtggcattcgtccaaaaaagactgatgctcataattgtgaatttatgaagtgtacaaaatcgttgtgccaaattgtccatttgggcaattgtgttcagtgtgacagtccatgccgaccacaatttattcaatgcctcatttggtattgtaaattgatcactttcaaaaccagtttcaagaaaaagaagcagttcttcgataaaattatttatctgaaca

SEQ ID NO: 12809 - DNA, 2117 bp, Heterodera glycines
  unsure (1)..(2117): unsure at all n locations
tttttgtgtagaatgggaggtctctttttccactccctttttctctctctgctctcattttgtgccatccattttaagcttcccaaatgtgctcattctgtgcacttccaacctgaaacaagcgttggacnccgcctttgtggacagagccgacatcgtccgacgcattggcaatccgacggaggcggcgatttgtgcaattttggagacggcaattgaagaattgcaaagggtaaaatagcacaacaaatcaatgataaataaatagagttttaaaagcgtttttacattctcaagattaatcttgtcgagagtggcaatttgctgagcggacaaaggaaggaaaaattcgaccgattgatcaggtcagtgggacgaagaattgctgaataattgataaaaaagtctttttccattttctctccaaaagagccgcaaaattttacagggacattgtttaaccataattgtcgacattttttgtaaaaggactagcaaataattgcacaatttacacataattagcgtttatttcccatcattttccgagcggttatttcagagagttgggaagtgttcggttctgatcattttctattcttttctcccccttcctttagcatttccgccaaatgcgccagcagtggccgttctcttcgcaaattgcccgtcgtcgcttattccgccgctcgttcagtttcgtcggtagtgttggaattattgtcttctaattaccccttaattattccagaaactccctcccattggtctcgactcgtttttggatgcttttgcgaatatcatcgagaattcatcgcatttacatttgggattttaacacatttctcccttccctttgtccatcgtttcgcttttttcactttgattttttgttttccccatttttaacaaataaaaaattaaattattttggaattcctatccaaaaaggatatttgcacactttttgcgtgaattgtgaaggctttgtctgatttggtaaacacagctgcgttgaaataaaaaaaaggggagggagcattttagactgactttccctctggcataacaatgagttaattaatgcactaattaccccccccccccccttttttcccttttttttgtttggttccatttaaagtcactggttcactacaattttatgccacttttcgaaatttctctaaaaattttcccgaaaactgctaatgaaaggccctttcacattctttttagtcctcctccattgctcctctaatttcgtcttcatccgtgctcaaacatgcaattacgcagctgtgcttggccgtacgtttttactagtaaatcccctactttctcttccgtctgatcattcccttttctctctcttctcttcttttggtcatttcatttccctttctctctttcttcccttttctctctctccccatttctctctgatcactgctttgtttgatcattgttcttccgccgatcaatcaaatcattcgctgtgtctaggacagactttttagggttagaagcttaattaagcctttcgtattttgataatttttgggcctgaaaatccttgcactgatcattcccacttttttaagcttgtttggccaacgaaactccgatagctaatttttatttatttttttgagagtggaaaattggtgcaaaaattgttcaatcgggtggaggaactggcagaacaaccgaattggcttgtgtttttgctgattgacgaggtgaatcggttgcaaaatattgaaaaacaaaaacactcgttttgtttaaatgcatttttcatttgaaaaggtcgaaagtctgaccatgggacggaaggcggccttctccggcgccgatccgtccgattccgtgcgcgttgtcaatgccgtgctcacccaattggacagagtcaaacggtgcgtctttttaggttttttcctttttcgaaaacggttgaccttccctcggtacttttcagttttgaggcctagatttgaatttaaaaaaacaacaaaacacgcgcagaattgcaaatattacgatccaaaattatattgggggcataaatgcaacaagttgagctaaactttcttcaaatggatctgcgccacttt

SEQ ID NO: 12810 - DNA, 998 bp, Heterodera glycines
aagggcaaggatttaatcctcgtttaatggggtatgacgtgtgcggaaaaaaaatgtgatagcggcaggagaagttcaggttgtttgatgtagtaagacttgtgcaatcttggtataggtctgggtttgtccaagaaaaacttgtccaggccgcgctcattctgctgttggatcgatcgagcttcgcgttgttacagcacataaccatttaatcgattcaacgcaacataccgtaattaaaatgataagggtgaattatttggaatcattaggtgcgtgatcgcaaggaacaaatcaagcagagagccgcaaatcatgcagatgctcccagaaatattaattttttaaaatgacgctcgttgggccttgagcaagccattggaaataaaaaatttatttttgtgtattaattgatgtattgaaaaagttaaatattatgatgaagagaataaaatatcttattcttaaattgataaaatctaatagtaatatttattcaaaattacataaaataaatttaaatgaaatgtagggcaaagccgcaaatgtccgattttggcttgggccgcaaaattcagcaaaaaattgggccgcaaatgtccgaaaatggcccttaagaaatgggccgcaaatgtccgaaccgcaaatgtccgggccgcaaatgtcgggccgcaaatgtccgatttggctggggccgcaaatgtccgagccgcaaatgtccgggccgcaaatgtccgggacgcaaaagtggggtaaccatctttgctatacatttttgtagggttcgagccccgcccccgtcacccccgcccccgccgggggcgggacaggttttttggcctcacccccgtccccgcccccgcgactctgacccccgccatcccccgcccccgtgaccttcgcccccgcgggggcgcgcgggggtgaaaatgtacccctaaaattgacttttcgagatgagtgatgtatagttaattggcgatgatacaaaaatttaa

SEQ ID NO: 12811 - DNA, 2595 bp, Heterodera glycines
atttttgcatattaaaattaataaaaacaaaataagtacatcaatttaatttaatttaaattagaatttatttttttatagaagaaaactgcaaacgaaatttatatcgtggcaaaagcaaatacctatggtaaaataaaaaagtgacttttgaaataacacaaaatttttaaatgccgaaacgcgacgcgcaactgcctttgaaaaataaataaataaattaaaaaaatcataataaaaaaatacaattcattctatcatttttcatttatttttgtaacattagaaaaagtattattatattccacataataatgaaagcttttgaacaaaaatatctttcgcaattccattcttttgtgttgtaaatcaaaagctttcaaaaagcgtttagtatataaagcgctaaaattacaccaaaatcaacaaaaagaataaataaataaaatgcttttttcaatttttctaatttgcttaaaaagagaaactattttttatataattaatactagcaaaaaaaaaaatcatttattcgaaattccaaattttgaaatttaagaaaatgccatttaaaattgacattttgtttgcgtgcgcacttttcattgcggcatctgccagcccaattttgccaacttcggcagatgcaaaagatgccattaaaccgtcggatgatcatggagatgaaatttcaacaccaattagacacaaattagtgaaggacacggatggtgaggaaacagccaataaacgggcattccgtaagtaaaacgattaaaaaatttgaagaatttatcacgaatttttgtagtttttgatggacaaacgccattcactcctggagtaatgccctttgttcccggtggaatgccgccgaatgttcctggaacgagcccaatgattcccggaatgatgccgagtgttcctggaatgatgccgagcatgcctggcatgacgccgaatgttccaggaacaagcccaatgattcccggaatgatgcccaacgtgcccgggatggcgccgagcgttcccggcatgccacctaatgttccaggaacaagccccatggttcctggaatgccgccaaatatgcctgtaatgccgcctaatatgcctgggatgatgccgaatatgcctgtaatgccgcctaatatgcctgggatgatgccgaatatgcctggaatgcagccaaatatgcctggaatgcagccaaatatgcctggaatgatgccgaatatgcctggaatgatgccgaatatgcctggaatgatgccgggaatgatgccgaatatgccgggaatgatgccgaatatgcctggaatgatgccgaatatgcctggaatgatgccgggaatgatgccaaatatgccgggaatgatgccgaatatgccgggaatgatgccaaatatgccgggaatgatgccgaatatgccgggaatgatgccgaatatgcctggaatgatgccgaatatgcccgggatgatgccaggattcactccgcagtttccaggtatcaatttcaataataatcttattaatccatcgctcaacccaggaggattcaatcagatgccgaatcaaattggatgaaaaacattttgacaaacttcgatcagtgataacccagcgatataaatttcacttacaattaaagcatttcatttttttttaattttcaaacaaaatgcttataaaaacttataatttttgatttgttatctttcagaatcatatagtaatattttttttgcataccggtaaattgtttaaaaaatacattaaaatggataaaaaacattagaaattattgatgaataaagtttatcaatgcaaatgcaataatatacataatctataactgaattcaaggcatcaaaattcattaaattgaaatctcatctttaagtaattaatctacgtaatataatgctttgataatatggttaattacagttttccactaattaaaatgaattaatgctctaatttgtaagtgattaaatttatcacaccagatttattttgatttctctcacattttcttgttgtttcggtacgccaaatccattaacatttactgctgacaaattttggttttgctgaactgaaagcaccgcttgttgttgttgttgattagctaatggtccgataacatttgctgtagctggtgatggtatcgtacccattgggattacggtacgaattctgtgtaaatggaaaattgactaaatcaatctttttcctattatttacagctaaattccttgtatgctttttgtttatattttaagtatttaacaaatagttttcacataaaaaacagttcgatttttttaccaaatttaatcgaaaaatcaaccaataaatattgtaataatttgagcaccaacaaccgccggctctaaattgagcggttctataaatatttatttttccattacaaaaaaagatactaatggtttggaaaaattcgcaaaaaaagagaaaatgtgaattttccagtttttttttcaagttccggttaggaaagaattggtaaaatagatatcaaattcatgatcaaggacccaaaaaaacccataaactccctaagaa

SEQ ID NO: 12812 - DNA, 896 bp, Heterodera glycines
ttcatgatcaaggaccaaaaaaaacccataaactccctaagaaacaagttttcatgagttcttgtcacaaaaaattttgcaaaaccaaaagggtccgtcccccttttgtatttaaattatattaaaatttaaaagtgaaaatttaaattaaataaaagtaaaaatttagttaattaattgcatttacccatcacatttttccatgcgctgaattccctcattaatttgagtcaaattttccattcgatggctgatgaattcttcgagtggtagttgtccgatcatgtacttttccaccaacattggtaacgtgtcgcgactcttccaaccttttttaaaaattcaaaaaattttataattattgaaaaatatttctaattgattacacctccataaattgcccctttaattgtgcggcccattaaaagcatgtccggtggaattttcagctcctggtcaatgacaccgagcaccactgtttgtccaaaacccttctttgtggactcgaatgcttgtctctgcaacggaacaataaaaaatggggtaaatattaattatagtcccgaaatttcgaaattggccacaaaaaaagattttaattgctgtaataaaaagaaaattaagaacgcgcttgccattttttatttaaataaaatcgacgtgctgagtaatttcttaatttgcgccaaggggtaggaaaacaaacaaaaaaatgtaatcatttattttcataatttgactgaatttcaaccaaattaatttttcatggtaatatttaagagctcattgattattttcaaaattttacgaaagctaataaatgactattaaattttaaaaaatctttagtcagagttttttgtctcataacgtttttgaaacttatatgtattttc

SEQ ID NO: 12813 - DNA, 2896 bp, Heterodera glycines
cgtcgcccaattcattttaattttccaattttgcccaagccaattgatcaaggtcagaaagtgactaactgatcgttgaatgtactgcttgaacttgatcccccgttggttgtagaataatcgtattgttacaaaaatgctttcttcttccgcctgctgtactctgttggccgcgctcatttcggcggcgtttttcgccatggcaaacgcacaaacggtgaagcagtgcctgtgctccgaaattcagccctgttccgaaaagtacatgaacacatggaagacatgtatgcagcagtgtaaggtgagcacaaatcctaggctaaaaatgccggagtttggatcccggggtcaaaatgcccaaattagaatttctggggccaaagtgtcggaatttgtccgtccaattcccgccgtttgggaccaccctaggcttgttatgttcgagaaatctcgattagagcattccacggcttgcaagtgccagagttcgagtcttggggtccgttctcatgtcttttttggtctcgaattgcacaaatgtggtcgggattccgccccaaccactgaacatagatgaactcaaatgccaatgcgtttgtttgtttagggccatttttccagcgtgggcggcgacgtggaaaaattgggccactgtttggacagcaaccaggcactgctccagtcgaccatcagatgcacccaatcgcatggggacgagtcgtaagtttgacgagtcgggcaaattaatgcaatgccattggggctactgtagtcaaaattacggtcggcaattccattctaattagattattttatgccaatgacccgatttaattggaactctttgattaaccaattaacggggttgggaaaatcattaaatgccattgggactactgtgatcaaaaatacgatttgaaattccgttccaactggtcattttatgccagtttggtgtcccgatttaattgggactctttacaattagtgggaggtcccgctctttttgggattgatcagtatttgagtagtgtggaaggggaaataatttggaaattaattgaaatgaaggtgcccaaattggaagtgacagtaaaatcaaataaattgttccctttttccgatgtgccaaatcgccggccgcggttaagcaggtgccaaagcgatacccggaaacgttggaaattgcaacaatcagtgagatcaaccggatgatcaacggcatgtgagcctggggcaaaatccaacagataaaaatggcacatgggaatggctctgatcagcagattgataggcaaaaacaacagccgaacaatcggcggaagaatgggtcattctccgggttgcttgttctgctgatcagtgccaatgaggggattgttggttcatctccgctgatcagtgccggtgtcggcggcagatttggtcaatgatgccaaaacgcaaccgagcgagattgaccaaaaaagccctgattcaaatccattttttgcaggggcctcgaaggcgcaatgaaaggtttgatggatgccggcaagaaagcgttcggctgtacgcgcaaatgcatgaacaccaaggcgggcaactgcgagaagacactcaagtgggacagagatttttttgaaattttagaaccagggaaatttttgaaaaattcattcctcatgggtttgatggcacatttttagccgtacaaattgccggaaaaatgccgtccattttcatcccctcttccattcttcgttaaaatttcgcgccaaatattttgaatttgcccaggtgcggcttggacttcccgccggacaacgtggcggtgcaggaagtgaagaagtgcgccctcaacagcggactgaacaccgccaacgcgcaagcgctgtgcaaatgcgcgtccgccgcgggcgttaagtgagtgatctaaatttgttttgtccattactcgagactctcgagttttcaaacacaaaatttattttgggataagaaacatctctgctggttactattagtcgagttatgcgggaccgggaatctttggaaaagcggggaactggcttttcaaaaattctgggacctgaggaaaccgggaattcccggaccggtcccgcttaattctaattgctagggcttttcgggagtggaattctcgaaattttgggacagagactctcggaaactgtcctaatgatcgatcacctccgtctagagatgatcacataaatagcatcaaattgcatacaaattgattggccaaactaatcgatcatttttccattttcccaggaatttgacgccagccatctgcgcaaaggtcaaagtcacctaaacaagttcatgtcgtccgggcgctgctgatgactgactgatcagtgtagtaacagagagatgagcaattttagtgatcgattgaccgaaatcccccaaaatgttttgacaccggtgattgatcgatagttatcatttatcattttggtggtcccttccaccccatttgtttcccatgacatcacctttttcaatttaacacaaagcatttctctcttttcactggcaaaattgctttttcttatctgtagtaaaaaaagaacatccaatcatatggcacgtgtcataatgccaattataaatgccaaagacaaatggctgcattaaataggggaatggcttggtatgaagcttccaagatggatttctatatccatattttatggccatattttgcgatttttatatccatacatcaaagaagcgaaatttaaaaatagtcataattcaagttaataaattataaatcaatttaaattcggcttttacaaaaattcttaaaagttaagcatcgatttttatatattcttgataaacacaataaaaaattaggcactatcttagctatagggct

SEQ ID NO: 12814 - DNA, 1301 bp, Heterodera glycines
  unsure (1)..(1301): unsure at all n locations
tttgtgcgtggacccgtcaaaatttgccactttctgcctggagaaagccataaatgatatccaaccaaaaaatgccttggccaaagtttatgccctaagcccttggcgttttatatcgcctgaaaaagggattggccattgtgaaaatgccaaccaaaaagccacccgaaccagtttcaccaagactaatgcgaattattttggcaaatgtttgatgatattatataaatacttggcccaatgttcacgcggacatgaagtgacgaggccatttttcgagaagggtttctataaaataacaattgttgatgttttggacagtttggcatgaatttgcaacaaaatgtacaaaaaagccaaggaatggattaaattggaaaaagggcgtgaaaaaggaaaaagtgccgcgagtttttatgacccattttggtcactctggcattttaccttgatgacgtggtgagtgcaataaaaatatttttatttctatttattattaaaaatataaatttttttagcccaaatttatttaaagttaaaaatcataatcttccgattttttgctttagcttttctgatatgctaacaactctattttaaattatcatattttacattcaaaaatatttttatttccctaaaataaacattgtatattttgagctcaatttatgggttattattattttaaggtgaatgatggactacttactgtttattgactttatcaaagataggattaactcttttaattccaaaacagtgaaagacgtcaattttaatgtgtacttagccttttgtatatgatgaaaagcaattggcattgtgccaatgccaaagcaacaaaaagtgccaatgaatgcgctaaacttggccattacttggaaattttgtatgaatatttgttcagaatgcgctttgggttgccagctgtgaagccaatgtttcaaactgtaggaaagatacggtatataatacagtatcaaaatttggcacataaattatatgcacttttaggccgattattctgaatttgagagctcttactaatgaatttgacagattatctgaatcgtattttggcataggcaatgatgagtcatcaccaaataatctccacttaacaaatgaacatgaactgaactacataataacaggtaatgaatgattttgccgaataatttttattgttnaagcgattgctntttcattgctaatacagaaaatttataattcttaaattaaaaaaaacaaaaaaaatttttaaaaataataaaaatttttaatctttttttttaaaa

SEQ ID NO: 12815 - DNA, 2746 bp, Heterodera glycines
ataatatgaaaaataaattcgataatcactgatcatttttaccgtttttttacttttgataaatttaaattattcatatatttcggcaatttttttttcgatgtttcaatttcgataattcattgtcacaattttgataattttttatacaattttaaaataatattatatcataattttcaacagtttgttcgcgattacattaaaatggacggtgtttttatgctacgaatgttgacaattcatgcgggaattttggtgtgtactgaagttgtcgatgcgatgtgggaagactttatcgcgagtaataataaaataaatgaattaaatcataattagctttaaaggcaaattaatacattccaaattttaggcctataaataaaaaaaattttatttgacaaagaaaaacattgaatatctgagactttttgaaaaaaaatcattttagttgttttttatttttatttttaagaaaatgtattaagaaattttatgaaaataaattttgcaaaataacaacctatacaaaattcttttcctattaatttagtttgagattttgaaaattcttttaacaatttaaacatgcattagaaatttcctcactaattttgcgaatttttgtttatggcaaataaatttttttttattttgcccatattttgggtattttattttccagccgtagttggcatttagtcaacataaacactcatcccaatttttatttatgaagataaatttttatttttaattattttgagattatttttttcgtattttgttgatcagatcgtctccaattgcgcaccgcggccaccgaatcgccgccggccgtttcgacgccgcccaaaccgccaccggccgtaatttgttttagcgctcctaaggcgtcttatgctgctactggtggtggtgtcgaatgcgtcaccgcagcaacaaccgcgtccgatccgacaatataccggcgaaagacaagcgtcctggtgccgttgcttagcgctgtgcaagagcagtgccacaaaacggaattcgcacaagatttgccaagacattccgccacatacacagcggcaagcggagcaactttggcagtcgcgtcccggcaaattttggtgccaccgcggaggtagacaacgtaaaatgaacggaatagccagcagggggccgtcctcggcgagttgctctgacgttactcaaaaacctcaaaaaaatgttgattttcttttggccataattttttcaaatttatacgaattttctgaaatttttaaggttcttagaaaaatcattgggctttaagttttatcaaaaattaaaaatataatttttgagcaaggttatgaataattttctgttcaaaaatttcattttgataccagacaatcaattagttcattcctatttttcaaaatttaaattattcagcatatttgaaacctcaaaaagtgataatttagcctaaaatttaaccttttgataatttgaatttttaaacagagaccaatttttgctgaaaactcccaatccgagcgaatatcattcggaacagcgacaagctcttcgccatttaacagtgagcagtgacaacaagccgtcaaatgttgccgccccattagtgccaaaatatcaccaattctcaatgatgtcaaagtgccgacaacgacatttggcgccggcatcgtatggcaaaatcggctgcagaagtcgaagacggacaagcagtagcaatggccaggggggcattgtgccgtcgtggagtgccatgttcggaagcgcattggcaccgttccaaaacagaagtttttcgttgaacagcgccgttgcccaacaactgccatcagaaatccccgaagtctcttcgtgtggagaagaagcatctctagttgaggtgccggctcaatttggcaacatttaattaagcaaaaggggcgtggcgaggccatggcgaaacggacaattagtaccgaaagagcttaagcaagaaaacatctctttttagtctttgtctcttaataggatctattatctatccaaaattcatcaaatttctgatattcaacattgcaaggtttagttttttgtaagttgtttatccccttttaaaacattacattttaaaaactaaaaaacattttatataattttcttattaattaccaatattttttagcattcaaatgttagcagtaaatcaattaaataactcttaatttttctaaatcgttttctaaagttagaagagggagaaagcagcagctgcgtaacaaatcaacgcccaacaaacgatgagaaaaaggaaagtaacgaaactgatggggacgaagaggcaaatgtgccgcgctgttcaacctcaaaatggcacggagaatgtgccaaaaaatgacaaaaccaataacataaaatgccaattcaaattttcaagaaaaatttttagagtgatttattcatgttttttgatgaaaatttattatgcatatgtatagaaatgtaagaaaatgcttatttaataaatttacaaaggctaattgtaaggaccaatagagataaattaatttgaaaaaatgttaaaaagatagtgtaccttaaaaagaaaatttaaaagaaaagccatttttgacatttaattcttgaaaagcaggataacaattctttaaattaagttcttaattatcaaaatcatttaaataattaaacatgtgggggtcaaaaaattcctaaaattagggataaatggaaatca

SEQ ID NO: 12816 - DNA, 1468 bp, Heterodera glycines
actgttttattaaaataattttctttatttgaacccacatgcattgttccggctttgtcgccccacacttttggcacgccttggcacagttttgtgccatccaatgcgggttccgctcacattcgctcgccgtaccagcaaacttttcatggtaatgggcccatcggtggcattccgaataaagatttttacaacctgaaactttttttttatttaaattctgtccacacattattttaccgcgacaggctaaaacagcgccttttttggttggttttcgaaagttgaaaattttgccaccccatgcccctagggagtaacttgtaccccccccccccctcccgaaaaattaaaaaaatttcaaactcagaaatttttcaaaaaagctcttaagaaattttttcataaaaaatttaaagaaaagaaaatttcaaaaggtttttacttttaatcttatgaaaaaatttcctgcgatttttttgacaaatttcagtttaaaaattaaaaaaaaatttagagaaaattatattgatccaggagggggaggggacgtagtgcatccatgctccggctaaggcgttcaagcttgacacaccacttgggcatgcgaatttttgagtgtccatccttggacattcgtcgtgccattctttctcacttgcctgatttgtcctgcttggggtggggtcgacacccattgaaacggcacgttcccgaacaccacgtgttcatgtgccgaggcgcagatgtgcacgcccctttcgcggcccaatgagcacaacactcatggccatcgtggcaaacgcgctttttgggtggaggaggctgaaaaagattaaaaaattcataaaaaatattcaattttattaaaatttactgttggagaaggtgtggtcgtgcccaagtgaccgtcggttgattttgttatttgctgagatgaagaaatggtggttgtgacggcctaacaaataagggattttgtgtatgtaaatcccttataaactaatgccataatttgaaaaattatgtaaaggaattttggcatttaaaaatatcgaactgtaattctttgagatttgttaaatcacttggaattaacaaaacgtaatcagaaacttatcatctattaacggataacgactctaatgatgatcaccaccgcaggaattctacataatatttgtctttacactgtatgcaatcaaaatattattgtctaaattatttcatgtaaattcataaattaggacgacgacatcacagagaattgtcaaagaatattttcatggattttgaaagtaataaaaattttaatgtgaccattcaaaactttagcctccggaggtatgcgcaaaaaatggagtgcgtttgaaggggcgcaacttaatataacaatgtccactgatgtcatccggaaccggcacaacttacacaaattggaaggagtgcaaaaaagcacccatagcta

SEQ ID NO: 12817 - DNA, 1972 bp, Heterodera glycines
  unsure (1)..(1972): unsure at all n locations
gatgattcaaaggggtcaataatgatntttttgagatgatgatttgctgatttttgagaaatttgatgatttatacggatttttggaaaaaatcatcgacaacggccatttttgtgtaaaactgctaccaaaacttccatattttcaaatttatgtcgttaggttgtttttatgtgtgtgacttttattctttttaaatatattgtttatattgtttatcaattaattagttcatccatttttcactacatttatgacttcaaagtgcaaaattttaaaatttggtgatttatgaagactatgaaaaaattccttaaaatagccaaaaaatcaaaaatcgtcaaaaaaagttaagaaaaacgtacaaaaaataaaagttctcggtatagtagccaaagtaaaaaatcaaattaatgtttaaaaatttttcatatttttatttaaaaacaacaacatatttagaagcgggagggggaggggagctggagggcggagaaggggtatctcatcattttccccatagccccccgtccaaatattctctttcttggcgcagtagttcgtcccagttccgagtgtatgtgtccggctcctgtcgtttgttgctgccgcctgcaccttttgattgctccaatctctcctcacagattttcttcatctcatcggtcctcttcttccatgttttggggtcttttttttctgcttcctccctctcccacagaagtcttcgttccttccattggtgccgaaactccttcaacgttgggattttttttgtttttgccgctgcggcatttggtccatttcatcaaaatccggtaccgcccacattggcaaaacatcatcggacccttgattttgctcggacatttctaaaagtggaaaagaaatgttaaatcaaaataaaatagcataaactaatgtttgaaggcaaaattatatatcagtaatgaaaatttagagtttcttaaatagtcgctttttgcattgtaatgctgacgcaaccctaatttagttcaaattcagcaaacgaaattagtaaatgaccttcaaacttgcaaaactttttggtcttttgtgcagtaaggctcaaatattacactaaaaatcatgcgattctattagtaacgaaaatgtttcgtttttttgcaaaaaaagttgcgattttattagatatgccgaaataacgaatagaaaaatttctctatttctttctgtaagaaatggactaaaatatttgttttctcaggcctaaacaaatgacttactgcagttactctaatttcattatacaacattttgatattaaatttataattccctatctttttttgataactttttatctccgaaaaattggtatcggatataatctctgcatcttgacatttaaatatatttcgttctttgataccaatttctaatttttgcatagctaaggcttggtttatatattcatgcataataaaccctggtaatttttgaattttatcgatcatttctaagaatgaaaaatataaattttcgatttcaggggcactaaatgccgctatgtagaaatttttcacccgtttaaaaagcatatttgcaaaaatttcgagattatttgatcgtttgagtatttttccagaaattttccaatttctcgtaattttgttttttataaaattaatttcttggtctattgtcgacatctgggattatagttacttctaatgttataacatcattcaaaggatagaaaagcgaatataattcttcttttaataggacatgttggaacaaagcctcggctgtgttttcgctagggcatctaagagggcaataaaatgattcnaaaccaaaggaaagcttcagaatgcttttgaattttccttgttcatttttatanattttttcgattattgatgcgagtattagtttaanattttgctcagcattancaaaaaaatggattgacnnaaataaaact

SEQ ID NO: 12818 - DNA, 1791 bp, Heterodera glycines
aagttgcggttttattagatatgccgaaataatgaataaataatttctctatttctttctgtaagaaatggactaaaaaatatttctttttcaggcctaaacaaatgacttactgcagttactctaatttcattgtacaacgttttgatattaaatttataattccctatctttttttgataactttttatctccgaaaaattggtatcggatataatctctgcatcttgacatttaaatatatttcgttctttgataccaatttctaatttttgcatagctaaggcttggtttatatattcatgcataataagccctggtaatttttgaattttatcgatcatttctaagaatgaaaaatataaattttcgatttcaggggcactaaatgccgctatgtagaaatttttcacccgtttaaaaagcatatttgcaaaaatttcgagattatttgatcgtttaattatttttccagaaattttccaatttctcgtaattttgttttttataaaattaatttttggtctattgtcgacatctgggattatagttacttctagtgttatgacatcattcaaaggatagaaaagcgaatataattcttcttttaataggacatgttggaacaaaacctcggctgtgttttcgctagggcatctaagagggcaataaaatgattcaaaaccaaaggaaagcttcagaatgcttttgaattttccttgttcatttttataaattttttcgattattgatgcgagtattagtttaaaattttgctcagcattaacaaaaaatggattgacaaaataaaacttggttttgtgttttttaaagccaaattttaagtctttatgacaatatgtctcaattatggcacaattttccattttgttatatcattattttttgttcttatatacccatatgctcccaaacaattgtttggagtctattttcataatttaacatttggctctgcacccttcgggactcaaaatgtaatcttcgggcttcaattaatgaattttgcgattgttcctcaaactttgttgcctggtcaaatgttttacatctttcgaactcacgccacgcagattcagcctttattgactccaaattgatttggtccatgattttgaaaatttcccaaattgaatctgacattttaagatataattcccgaacaccattagcatacggagctttttccctagattttattgcacgattaagcgtttcccgagaagatttggcaaaatcgccaacttctgctaacgcagctacatccctccaggctctttctgtctctttttttgcagcttccaccaaaatggtattagctttttctgatttttcagaattcatttttttatttttcatttattaaatttttcttttatattttatatgcaataaattcatctctaaattctgtttggagtctcggatttttcttagcatcatcaactatttcttgttgtcacccaaaaagcattttgcccccgcagaaaaattatgatattttatgtcctcttcgatttcaatcaatatagagtcaggatgatgattgtgtcggcgcgtcattgtaaaaaacccttccttttcaaaaccccagccctggcacccatgtgaattaaagtcacatttccaccaaagtttggaacttggtcgttttatgtttgtaatagcgataatcatcacaaaaattttcctttggcacctttttattgatacaagttgaaacattctctatatgcccccattaaaggaccgcccctaaatggttttagg

SEQ ID NO: 12819 - DNA, 3075 bp, Heterodera glycines
cggatgaaaaaaaattatgttatgtaattaatgaattcttaaaaaataataatgtgcctttcaaatgagaaatttaatacaaatattttttgcacgacaaattgccattttttatttgacgtctcttctttaatgaaattggcattggcatttctcgtgtgttgtttatcatattatctacctttgccatctttgaagcagacatttttcgcacaatattttaattttccaactttaattttaggacaatcacccgaagaatttttgggctctttatcaacaaagggtctatcaacggtgccaaccaaatccgaacggcaaatgagaaaattggctataatattaaaaaaataaattatgagcatttaaaaatacactaaaaataatctttaatcattattaatgaataattaccgctccaaaagcattcaaaaagacattgagcagaaggatgagcttcatatcaatcttgtttcttagcttatctaaaaacaaataaaaaaatatttattttttaaatttttaattatttattattaaatgaataaattcactcttcaaaaaaaatgaatcgaatgaatggttgggtacacaattattatgttttcgatgcatatctcttatgattaataaaatgctgattcatcactgatgagaacaaaaagctaattgacacccaaatcagtaaaaatttatgcataattatttttctgacaaaaaaatcggttttgagataatgaatgataaattatgttattgtttgcataatcgtttaactgaaaccgatattcaaaagtcaaatggcggatcaaaattgccgacaaatcccaaaaatccgcaacccgcaatccgtaactccaaaaaccccgcaatttccgtaatccgcaatccgcaattgcgttcagccctggtagccagcccctttgctaatgtattttctgcaaatttcgcctcgttcaaaaaaaaacaatgaaatggatttacaaaaaacaactttttccattacgatgagtttttttatattaaatgtaaatctttaaacataaagaatttcttttacgcaaagaaaaacatcccaccggaaatcaaattaattaaaaatattattgctttgatatttttattattattaattttaatgtcaatcaatatgaataacaaatttatttacatcaatgaatacaggtgaaataaaaattttacatattatttcaacgataatgatacgtcaatgatgatgtaaaaattattttacctataatattaaatgaaggtaaaagtcgttttataataattatatttgttattcaaataaaattcattatacattttcataaaactctaattcttaaatttgaattaaagcaaaatgttatttaatataatttctttattattgttcttctcatattttgccgaaggtaatttttttcattgatattgataaatgctttttttctatttctattaattaaattatttatattttgtttttgatgaatatagagatacgttatttcaatgttaaatggtcaatttatacatttacaaaaaattggtccaaagtttaaatttcagtcattttaacgagtgatgacgaaaagaattcttttgcatttgacctaaagaagcgacttgaacaatttaaacgaagcaacaaaaatgaaaaagcaaatgagatggaagaaattgaaaataaagtggagagccaaattgaggaagcaattggacttatcaaaaatttgacgaacaatgaaattcaaaggcttcaaaattttaatgaatttggtaatggcaaataggaaaacatattgaaatcaattataaataatctataattgcttttaattttttttttcagcgaaaaactcaatcaaaatttaaaatgtaaaaatgtgagccgtgacaaaaaaaattaaaattttcgctctttagtgatacactttttccaatttaataaggttgatcgttaataattatagaaaaagtaaatcgaaatgccaaaatcaatgaaaaaggtacctagtttagcacaaaagtttgaacacaaatgaatttttatgttgtatatatatatatatattttatttaataacattaattaaggctcaagctactccttcgattctgataatttaccgacaaaagatcatagagcgagcagcaatacttttcatataccaaattgtgggattagaattggcacttctgctgaacataaagcaaagtctagaacgagcaataggaacaacaaaatgttcaacgagttggaacagcaagcggctggcatcaaacaaacattgtcggcacaaaaaactgccaccaatgagcaaccacaaaacactcttagtaacacacgaaaaaagttgctggaactccgagcccgaatggacaaagttggcattaaaccgatgcacaaggcaaactctggcgaagaacgaaaacaatcattgacaattagtccgaccaaatcgccaaaaggcattgttgtggataagcgaaaaattcaaagggacaaaatattaaacaaatggcgatggttgatgggaagtgttgtgttatccatgcaagaattgtacttcaatgccgagaagtcacaaaaatataaaccgattgagcgtcagttgttgagtgaaactttaacgaatctgaaactagcaaaacatgaagcatcgaaagattccgcacaaattcttggactgttatccaatgccaaaaaattctttgatcagtaccaaacacatagaaagaaactccagcaagctcagaaaattggtcatgaacatctttcggaagatgatgacctttaccaaagtgatttgggctcagagaatgaacaagaaaactcgggtaaaaatcaggggttgcctgtggtatttattttccgtaaagaaaaatggatgcttggtgcgataaaagatttcaaaaaagctccgtaatactaattattatattatatataaacgatgatattttataaaaaaaaaatgaaagatgcttttctactgacgcattttccactgaccatttccggcggcgattttcattaattatttcatacttccatacagacaa

SEQ ID NO: 12820 - DNA, 816 bp, Heterodera glycines
ggttcgtggacgaccctatttataatgactagtgaaaaaatctgatgtgctaaaaacagcctaaatagttagtttttaggttcgaaaaacccccaaatagatgctaaaaattggaaaataggtgcaaaaaatccaaatttaggggtataaaatttttcaataaataaataataaattttggagatgaattccttagaaaatatcatttattatggtttattttgagaagggtcgatgcataggagtatattttcctgattttttgggtcgattctttgtggtgtatttttcatttttattgcatttttattaataaatttttgttaaaacggtgaaaacgccaaaatagctcaaaataggttttttcaaaattttttactaactaaatgaaaaaatttccgagtaatacctcagttgagatttgtgcgttttgctcaaaaagtgcaaatttaaaggattttaattattttctttcagaaaccaataaagtaactttctactccgctcaaaatttatgctttgaaaggtcttaataattttttaagttccgtttctttttttttttgtaaaaaaaataattaaagtagcactctcaaggtagcaatcagtatacctcgatggtcgtgacgcaaccttatttataatgaccaaaaaaaagtaaagacaaccatttttataccgaaataaaattacaaagaaacggaagaaaaatttcaaagcaacggaagataaatgaagcatacaaaggaaagaaaagataaatgaaacaagttttatagtagcatctcctttcagattatgcgttttgctcaatat

SEQ ID NO: 12821 - DNA, 2031 bp, Heterodera glycines
atacggtagttttagaaatgtttttccatcgtgctgagtcatttcttaaatgtcgtgagcatgggtatttttttgaagagatttcatttctcagaagccaaaaattagactcttaaatttatagtatagctctaagtattttctaatgaaatattgaataccgaaatctgtaagaaaatttttcaatgctttttttttacctttctaattggacaccacccaaattatcaaatttttattgtcagaaaaaatctaatgaaattttggtcaaaaactcatgatggaggaatttaggaaatgactcagcagcatcaatccatcagcggattcaatgtgggcgcaaataatgggtttctgagagatgagacattccgctggagtattccaaacggaatcgtttcaattcatcgtccacattttgactgtccttttcagcatactgtacaaatttgcttacagtagtctgtccaacgctaacccattcaccgctcagcagctcatgaatgagagcaatgacgccaagatgtgagactaacacaacgtgtttggctaaatttatttaattatatttaaaaaaaggaattatataataaaacaataaatttaatatttaaatattcaatgaattaaaaaaaattttccattaaaaaactataatttattacttatttttttaaataagaaaaaaagtaagaatacggttatatattagttaaaaatagttattttaaattttccattaaataattttaaaaccatttttgtttgtccttagaatatgacgaagtgtttgctcaacaacagaattgcattcattttccagttcttttgctttttctttttccaatttgattgctttttcattttccagttcttttggctgttttaataaaggtcgtcccatgattccaagctcaagcaacctattatattaatattttgtatttaaatagatattctaatttataattgtattaaatatgtattaattaagaaaaaaatttctttaaccttttgttatatacagacgaatatttcgagttggaaaatttaaaaagttgatacgaatcattttgatgcaaatattcaattttttgttgacagggtttatagaactgaaatatttaaattggttttaataaaataatttaaaaaggtacctcagttaggcccggctcaatgttcaaataaatgccaccatttctgccctccaaaatgccatttgctgtggcgactgtgcgttgaaaaggcgacgaataaatttgatcaattggaattgatttgaacctaaaatgtcgcgaaatgagaaaactaattagtggaaacaaaaagatattggaaaaattcattccggcgaaccaaaacaaacctttgaataaaaacgcatttttttaattatgtgttgaaaaaattctatgtgtacttgtgtttcacaaattttacccgttatgtacttggcaattggcatccctgtacttgaaaaaagggcttggacgatcccagccctgttataggtttagtccttaactatcgaaatttcgaactgcatggagaggattcgaaccggtgcctttatagagactaacactctttgaccacttagacaaaattcagatgacttattgagacactttggcatgaatttatacattgccataataatttaataattatttaccattctccaagctctttggcttgttcaaaaccgtgtttcgttaatggcacgtcctgatcagacatttcggataatggcaagtcttgatcagatatattggacaatactaagtcctttttcgattccaattgcttcttccaacccccgtcaatcccctcaatgatatcaaggcgatgcccgtgtcttataaggtacaatgtttggacaatagttggacggtggtctgataaaataaattttgaatttatatagaaattttaaaatattttaataaattattaaaaataagattcctttttaataccaactgtccaaaagtcgttccaaatctgtgatcattgacatcactccat

SEQ ID NO: 12822 - DNA, 1217 bp, Heterodera glycines
taaaacaataattgttaaatttatttcagttaatagtcgtttttggttttttattcaaaaagtatttcttttttatattctttttgcttttgttaaattaataatatgaatttaaacttgctatcagtgccgtaaattttatcgtatgttccatgagatattctggatgtaattttacttcgtacttgatttctggagtaaatttttaaaatatataatattttatatgtaaaatattttttaacatttatggtacagaacatgaacattatttttaatttcagcaattttgtacgtttgaaatttttttctattttcgctttttgggcctatgaaatttattagaatatttgaaaattcacaatcacttaaatatgagtcaatttaaatgaataataaataaaagtttcttttgtttatattttcgattaggatatacttatatagattaattcgaatttccatcgtgatcggagccataaaggtgttttgtaattttactagtttttttgaagaatttttttttatccctatgtagtccatacataatttggcgaaggcctgctccagaaaaaaacttaaaaacattcagtaatataaatataaatttttattaatatttaattctaaactaattgtttttcatttaattattggatttttttattcttattttatacatttgatctacaaacattaatattttaacaatcttataaatttaatattattcttttatgcattttttactctgcccaaatagattaaatattgggtcaaattaaaaaaattgactttatgccataaaatttcgaattttatgaattcaaacaaattgagacaaagaccaaatctaaaaacattaatccttttttcaattagatgacctctccacagcctttttatcgcactatgtacaaactgtcccgacccacccgtttcggcgcgcacgtttcggcgccagctcgtttttccacttaagttttttctatggcatccaaatccaacaatcttggtatcattcgaaagctcttaacatgctctattagccttatcaaaaacgaaaagtttttcaagccttgaaaaaattttattgagaaaaaacttgaaaatttcgactttttcgcaattttcatgtataactttttttgtatttgtctaatcgtgaagcaataccttaaaaaaagcttataagcatgttaaactttagaatgata

SEQ ID NO: 12823 - DNA, 1961 bp, Heterodera glycines
  unsure (1)..(1961): unsure at all n locations
atgaactttctaataacttattanttgttgaaaatttcttcttcgcttttttcattttattaatttgtctattaaatccttaattttatagaataaaattttagcttaatcaaatggatttttttatatgtcagcattattgaaataatacttttagtttttaatatgagtaaatttaaaataataatttttaatttcaaataatgaaggactgttgatttctataaatgatttttttaatgctttcattttttattcgttaaattatcacaattttgcaaacaactatttggaaagaaaataaataattggatagaatgcaaaaatgtaaattttaaaattgctccatttgtctgaagttttaataatttaaataaaaaatcgaagacgaaataacctcaaaacaagtacgccgaacgaaaaaagcataattcttaaaaataaacacttaataccagaccccacaaagcacggacaaaaaaaaacaggatgccaaactcaaaattttttaaaaatctcattcagaaatttattcaaaaattaaaaaattgcccaataatttactgtcttccactcagatttttttgttattttattttcaaaatcccaaaattattgaacctgcaattagagaccggaaatttcaaatttgcgggtcctgttgcaggattggtattcaaaattttttacaggacaggatccggcaggattaatcctgcaaatcctgtaaatcctgtattttccaaaatatgcaggattgcggactgggatcctgcaaaatcctgcgcaggatcctgtcctgtgccggtctctacctgcaatgccgatagcttcgccggcgaaaaatttgaaaattttggattgaattgttaacagattttgactaaataatgcaacatttttagaattttgaaaacccaaaggattgagggtttcagaggtgctaataagcggcaaaattttttcatttttaattcatttattaacagattttttcaaaccttatgaattaattaaaatggggtgcgattaataattttggaaaacttcaaaaaattgcatcaacagcatctcgccgaatgattattaaataaaaaggctttcttcaacaacgccattaattcctaccaaaacatatcttttttgagccaaattagtccctaaaaaacaaaatccatattataaaaataagcaataaattgatttttaagcacttaagcattttatgaaaatactgctttgtatagaattttgaattttaatttagttttacacatttaaaatcttttccatgatatatcttaatgataaataaatattatataactttaatccatttaatccatttactttttaatcttttaaaattttgaattaaatgtttatcattcattgtattttatagattttataagaagcttttttttagaaaataacaaaaaatttagacctttaaaaatatatgtgccattttgaaataaagttttttataatatgctaaaacaaaattacactttttataaactaaatattttcaaaaatctttaaaaagttcaaaaattttcgatttttaatgtgttttttaattccaaaaagtcaatcctgagggggtgtgttttttcacttttcttgcatttttcatgccaaaatttccaaaaaatggctactctaaattaaaaatgacaaaatataaatttattttcgaaaataccctaagtatgcattttatacattaaaaactttaccaaatcataaattttaacgtagaaatagcgatttttgagccaccttcttcatagcatatgcgtagaaaaaatgcaaaagcatataatttattgttctttttataaccatttgaattgttagtgttatacatattttgcattaaaaatacatttgcttttttattttatgatagaataaaggcatttatattcttatttattttgtaagcatcagaa

SEQ ID NO: 12824 - DNA, 2854 bp, Heterodera glycines
cccccaccggaataaatgagtgagcaaaggcagaggtcattaaagccactgtttatatcaccagcacttgcacatttgcatcaacactatgggtcaagctcagttttagttagacaaaattattcgaaacgccaaatagtttgcgttaattttttgcgcgctagttcaaaaattacactggtaaatgcctttttttcattgtttattttcagacataactcgcttcattcccaactaaaccgaacaaattttcaggcccggttgttcttcgcgttaacatgttgcagaaagacacattttatacatacttttgaaacgttttcaaaaaagtccttccttaaagtagaattagaaagatttatttatttcaaacaaaaaactaacaataaacaggcagcgtaacaaacggcatttttcagttaaagtggtcaaaaaaagatttaaaaatgtttttgtcaacctacccatatacacactacacaacacatgtacacattcatgagttacatattgtacatgtttttaatgcatgtacaatacgcaacccatgaatatgcacacgtgtcatgcaacgtgcacaaaaacaaaacgacaaaaaaaaacactttttgaccacttcaattaaaattatgcaccaaaacatcccaaatatgaatcggtctcttcactcttcctcatgctgaggctgtattgcccgacgccgagctgtgcccagccgatgcggagagagacgacgaaattggactttgatttggcgtcacaagtggtgagggcggcgttactccggtctcgatctaaacatttttgagaccaatgcttaatttttgcgtctattcgaatagagaaacataaaagatagctagattaattaagcaatttattcgttttggcattaaacaattatattttttaaattaaactaatgtcgagacccttttaaaacgatttttaaattatgaaacttagacagcaaagtaaaaaaaatttagaattgaattcacatcctgacttaatgaaatgagaaatgctcaaaattaattaaattaatgttaatagatttatggagaaaaccttacttctctgatggcgacataaatcaccaacatcgcattatgcgacacttgacaaaacttgtaaaagttgtcattcggaattttcagacgcaccagatcccactcctttaaataaattttaaattaagaaagaattcgatttattttgatttcctaattacccaattgaaggggagagagagtcaagaattttgcaagtggccaggggtcagaggcgaggaattacatagatcctaattgttttcgttttcctctttctattcttcgttgggacccaggggagaaaacctttagacccgccttctttccctttttatgtatattgtataatgaccaaattgtccatcaggaaatgatgaatttcactggttccaaattggttgccgaaactcatgataacgttctcttgttgaaagtaactctaatccgctgtcgctgtgtttaaaatttataaaaatgaattttaggcaaattttggtcatgaaagaacagaaaccatcacattttcaatgattgtttaaaattagtttgttggattaatttcttgcttctgcttatatcctattttccaaaatttttgggaaggcaaattatttatgtgctatttccaaatttcctttcatttctctcgtcccaaaaagctcaaagtatcaaaatactggtgtttaacctcgtccggtccgctcattcgcaatgaaacgagagcgtaatgtccgccgccttccgcaggatgaaaaaactgtgagagatcataaggcaagaaatttgcaacgcgatgacgttcatccagtggcagaaaagagcgaatgggtgtgcctgcgccaaatgtataagtcgtcccggcctctctctctctgctacattcttaaaaagcataatatttaaattaaattggatataaaattagatttaacaataactgattttttgttaactttcgattttggcatactttgcgtttcaattgtttgcctcgttttccgttatgaaaaaaataataaaccaaaaaattggagctgattaaaacccttcggtagtaaaactcgggaacaaaatggagcagttcgttgttcagttcagggggaagtttggtgttaattttgatgaatttcattagttttgggccaaaagtgttaataaaaggataaaaaggaccaattgggcttctgaaataaatttatgtcaaaacgcaatgaggtgatatttaaattggctaatttagtagtaaaaattcgacttgaacatacttcgttggcacacaaattgacgacgtaagggaaagccattagaatgaaaatgagtaagaaattggcttgagtctagaagaatggaaaatcactttgtgattcatgaaatgattgagttaatcatgtttagctttgatgggacttgcaccggaaagcagatcctggcttttgtgataaagccgaatgttccagaacaattttaggacattcgagtttaatagacccgatgaaaaaaccataggaacccttatcagtttgcaatgttttgtttcttttgcaaaaattatagacaatgtgagctaaaaaaatccaaaccgtagcaatttattgaatatttcacagaatgtatgtagattaaattcatatgttattatgtttgtctaagaaagcagacgtaattatcagttttatttgcaaaaaatattcatttgagaacatggtctgtttgtgtttgtgtgccatttgaatgacggactgccgacctctcattttcttttttgtttgtgagaatgaatgaataaatgcgtgagcaaa

SEQ ID NO: 12825 - DNA, 2018 bp, Heterodera glycines
  unsure (1)..(2018): unsure at all n locations
gggggcgctatgaggtcgaatacaatgtgttcagttcaacgatacctcgacgtgtaacaatggngctgtggaatacggggcgttcaacgggaatccaaaattggaccccttttaacttcaagcactttgacataagagacattgcggtgcacgctggcggtttcatatacccaatggtaccgtacaaattggctttcaaaaaggacgcatttatgcgagcgtatgttgatttgtatgaggcgctcggcatggcaaactcagacagatcttgtgatattacgcgccagcaattcaaaaatggatggacattgttcgtcatccccctcacatcaacactggatgacagtgtgggctatgaactgttgcgaagcggcaccacaaccatacgtgctagcttcaacacagcaataccaggtggtggggttgaaatgattgtgctcggcgaatttgatcaaatgataatgattgactacaaccgtcatattgtttcagactctaaactgggttagtttttgcctatacaaatatataaatatattggtgtgtgtaaatggaagtcgttaaatgacaatgaacattacaaccaacacgacaaaaaaaccccttgtccaaattttgaatggatatgatgttgatggaccatcatcatcacttgaaatgacaaattttgaaaaaattatcttattttttggtctctaccttataatatttccgatgtttcttctctgctggttttcgttaattaattttttaaagcgctttggccatattagtcaaagtgaagcaaacggtatggtcaatggactgcaaaacatacctttaccaagaatacgatagtttacaagggaaaaataattctgaatgttcatttcatcattatcattattatcatcatcatcatcatcatcatcatcatttattagtcagaaagtgtctgctcaaacctgaaggaaaacaatcattagcctgtagaagtggggtggtatttaccccacaaacgcataaggtcccatgctttccaacaaattttcatgaactgatttgagcagtgcctctctatcattgttctcacttgggcatagtgccaagaacgtgacttttcgctgatttcggcatatcatcaatacacattgcagacgctgggtaaaagcttttagaaaaaacaaaattgctgttacatcttccacacattgtagtttatggtggtacatctctgttaattaaatttatctcaaaaaatgctacaaaaaataaattgttcacattgaacatttttttttcataatccagaaaagcaaatcactattttttaaaattattcggatcgtgcaatcttctccttcgagcctcccgcaccatcttgatcctcgcccgtttttttcgtcgtcgtcttgtaaaagcggttgaccacccagtcaaagccagtaaaactttgactgtcttcctaagagaaaaaagaatagaggcaaaaaagaagttttaaaaagactactacctttatcgtcacttttgcagtaatcattgaccctaactttgcttccaaatgtgcgtatagcaccttgtcttccatttctaccacctgggtcgccttcaaacccaggaaagtctccgccacctggtccacgatttatcaaatgtgaaaaaaaaacgaggaacccaaaccgcggaaaacatggttgcacgctgcgtgcagtcgctctcatcaatatcttgcagaacaactcgtaggtagatgttcttgattggcctatcaactttttgcccgccacaagattcacaaatgtggttttcgggtagctttcggcgacagggaaagccccgcattcgcagaggacatgactaatgggccaaaaatgaatgaaacgaaaaaaggggaaaagatgtgcctacatcgtacacttggtactgtaaatcagcaactattgccccaatgtaaaaagtgccagcgcctgcgaagcgaataacttctcgcaaatttttggcactttccagctcctcttcctcgggcgcggagcgtt

SEQ ID NO: 12826 - DNA, 990 bp, Heterodera glycines
  unsure (1)..(990): unsure at all n locations
caaaaactagactataaaagctttacgcggcggaggattttgtgttcactctacgcctgcggagcctgcgtaggggtctgtacgcggcggaggacttttgtcttcactctacgacagcggagaaacttgttcactctacgcggcggagaacttcactctacgaggcggatgacttcactctacgcttgcggaggacttcactctacgcggcggatatacgcggcggaggatttcactctacgcttgcggaggacttcactctacgcttgcggaggacttcactctacgcggcggatatacgcggcggaggatttcactctacgcttgcggaggacttcactctacgcttgcggaggacttcactctacgcggcggagtacttcactctacgcggcggaggacttcattctacgcgacggaggacttcactctacgcggcggaggacttcactctacgcggcggaggacttcattctacgcgacggaggacttcactctacgcggcggaggacttcactctacgcggcggaggacttcactctacgcggcggaggatttcactctacgcttgcggaggacttcactctacgcttgcggaggacttcactctacgcggcggaggactttgtcttcactctacgccagcggaggtacttctctctctttctcgacgcggcggaggacttttcactctacgcctgcggaggtgtatcagcgtgcccggggattgaacttccactgacaaagtcattatccaatacactacacgggccgctgacaaattgcaatgtaaataatatttcaacataatttattataaaaaataattttccccgtttttttaaatgaaatggacaccaatttcacaatatgaataaacaattaattagcgtttaagtttgaataagtaacaaattaaaaaaaaatttacacatatattaaaaaaaaaatnnntttcctaagtagagaatggatttcaaattcatgata

SEQ ID NO: 12827 - DNA, 1040 bp, Heterodera glycines
  unsure (1)..(1040): unsure at all n locations
ttgctgcttctgatcactctgtccacccacaaaatttgccaacaaatcctgcgttatttttggcactcggtttttgtntggcaattctttttgttcacttggtcctgctacatcgtctccaattcggcgtcctaattaatttttaataaataaaaataaattcattttttctaaaaatctttctgttactttctgactctgttctttcctttgtttgataacattttatttctgctcctgatgctccatttttattaatgtccaggtcataattgatgtcacgctgattagcattcagcattagtctttggcattgtatgttcacataaaaatcttcctaaaatataaaaataaattaatgcacttaatatttaaaattaattagtccttctatatttcataattacctcaattaagaatgtcaactgatttgctgtactttgcgcgacaatcacaccaagtctgtacatgttattttcacaaattccgtcccaaaattcgatttgtccctcttttttacccaaatttgtttcagcataaaaattgttgtattcgcgtttagcacaatataaatggaagaaatattttgtcccattaccaaattctgtgtgctcaattttaatattaaatttgaatttatgtgaaggaaattttgacattggaagcgactgaaattaattgttattaattaattttattaaataaaattttaaatattggaaaatttttattttgattttaattaaaataattaaagtaaataataaatctgaaaaaagcgcttacactttgaagtgttaaaatatttgttgaagtatgatcataaagaaaacttttgacaacatctttagtcggctcgctgataaaagtgacgcaatttcgtccggacgacaactaattaaaacgaagtgtcataaattagttaattaaaaaattaaaaggtcgctcagaaacgaaaaatgcaattttaattgtctttaaaaagtgattaataaaagtgacgtgaacatatataattgtaaattaaattatatttaaat

SEQ ID NO: 12828 - DNA, 2132 bp, Heterodera glycines
tttttttgaactattttatatctcaaaattattttaaaaatttcaatgaaaaattgacatttttcctagcaattttttagtacaaaaaggagctttacaaattaggtaccatcaggccaacttttcacaaaatcttttcaaaaatttattttaaacaatcataaattcagcgaaacttagaaattttcctcggcggaacgcccgcctctttcggcatcgccgctctccaccccaaccatcgctaaataattaattaatttgaaaaagactcatccaacaaaagcaagaaaatgttagtaaattttcattctgcggatgaaagaggataaattgtttttactttattccattaatatgcctatttttgaaggttttaataaatatatttcttatttgtagaatttatttcttgacaaattttaggcaaaaaataaaataaaaatttatttaaaaaaataaaattactaataaatttaaaaaaaaacaaatgaaggcacacaaagctgacaattttatgaaatttaagcacactaattaggtttttcccccagcaagcttcgctttttaacactgacttttctaaggggcgctccgtgccgtgtcaaataacttttgttagatggcaatttatttttgatgccggaaattcaaaaattttcttcttctttctctttatctttcctattcctattttttcatttaaaatgtattttaaaaaattttaagatttcgatggcattgaagaaataatataaatatattttttgttgtttggtaaatggcattacttttttttattgttataatttcctattaaagcgaaacattttaagtacaagccagtttaaatacaatttattatttaaaaattctttttcaaataaaagctttttcaacaaaaaatgaattcttctgcgatggaagtgcaaatcataaaggaatcagaggtaaaaatgaaattttcagatgcgaattttgaattaaaataataattaaaattaaaaatattatttttgattccagttgtatctgcatttcaaggacgagcgtccttgctggccatttattggcttgtccttgacatttggcatgctcgcaactgtggatttttattttgccctcattcaaatcgtcaatcacaatttggtttggcttggttatctcggccattccactggtgatcggtgcgatttcaaatgctccgattttatactagactaggtaaataaatagatttaaaaaattgcctaaatggcattcatattcatccattttatcagcagccaacatatttaaattagaagctataaatttttaatttaatcgaaatttcgaattttcagcgtcaaaaatcctaaaaataggtttataaaaatcagtaattttataaatttaataaataaaaaggaggaatagcatttaaaaattagttcatataaatttatgaaataataaattacctaataaattaattactgcgtttaaataagcaaaaaatctaaaaaaaaaaatccatttataattttaattaaatctaaatacttcaataattaatggaaacactttccagtaatgccgaatttgtgacatcaatttagatccataaaataaaattttttctttttttagttcgcactatcgcgagacatttgctgttgaattgaagaaattttcttctcttattggacttggcaacttatctcttggcaacaataccatcagcgctagtggtcaattatttcaaacgccagcaattcaactaattagtagtgctaattagcacgctaattaattgcacaacagagccacataaaacagaattaattacattgacatttaacaaccaattaaggaagacattcaaattttgtcatttatgtataaataaacgacagcttaaaattttattaggagaaatatgcctgagaggaaatttttgtaaaaatcggtactgaatttcagttatgtaaaacagcaccatgtaccaagaattattgtcagtggaaattatccatgttcaaaatcataattttcttaaatccgatctttatccatccgaaggctgcaagtttatgcctaaggacgtcctgaaatccaggacataatcaaataatagaaatgaacgcgaaact

SEQ ID NO: 12829 - DNA, 2321 bp, Heterodera glycines
  unsure (1)..(2321): unsure at all n locations
tctgttacaatttgatttattccatntaacagcttttcttcagccgtttcttcatgatgtagtattccgccaaatttatccaataaatgtgttctcttttttcctccgtccgccgtcccctcttttttcgttttgctctttttttgcttcggctccgataatgatgatgatgatgatgatgatgcatttgtctcaattatttctttattttgttcatccacctttttttcttttccactttcttcctcagcacaaaattcccacaaattcgttcctgaacttttttcaattccaccaattttgtccacaatgcccttcaatttttgctggatgtttttcacttgttccaactgtttttcttcctttgttttaagatgtaactttttttctagattaggctgcttcttcttttgttcgctgatcgtttgctccaatttcgttgcaattccgttaattgttccattatgatttatgtaccatttggtgaatgcacacaaattttgcagagcttttttatcttccgctgtaattgtttctttgttttttattttttctatcactgctataaattctttatttgttgctaccattttgctcttttcattttccatttcttttttattcgtttccaatgtttgctttttcttgtcgttttcttcagatgccttagtgttttcttcaaattcttttgatgttttttgtttttcccgatcagtttcccattttttccattctatcccttttttttctttgtttgccttctccaattcattttcttgttctttaatggttccgtccaccaattctcgtagcttttccagtgctgttttagtgtcatatttatagttgacaatttcaattttggacaaatttactatgatgggtaaataatgttcattcgatacgaatgaagaaatttgacgcacatcattgagtttttcatcaaaatccattgatttgactcggtcatggatatcttaataaattttttctgttttaatggtaaagaattgtgggcctaaaaattggacatcaaccgtatattctctggaaaattgaaaaaattcggttattaagctgaaattttttttaattcttccagacagatttcgagcagccctgctcatttgctgtgtattttctcacctttgctcgggttgaattcgaaatttattgccaaatcatatcgaatatttttcataagttcaatttttgcctcttttgaaatgacatcatcccattttcttcgccttaaaatgcaaataaataaattttattaacatattaaattaaatatgggaaaagaggacagagaactcaaaatcataaattaaaatttgttcaaaccactcacagtccttcaaaatatccctctatttttttcttttcactttctttatcattggcaatctgtataaaatcgttttcaatatctttcagatacgaatccgcatctaattcttttgcgtcaagccttaataaacaattaaaaatagagtcccatgaaaaccaattaactcacattgaccaataatgagcctttaattgttcatcacaattctttttagcatcaacctcctcttttatgtattttgcaatttctccctcgattgcactgtgatggaattcaacgttctgtatcttttctttcaatctgaaaatcgaaaattgctttaaaaacagtataggtatgccaattaaaattcattccaatccaaaaaaaatcactcacatttccacaaaatttttatctatttcatttttcacattttttataacattctttagaagtttgttctcatcgatgctcatatagagtgctgcattattgtctaacattctcatcaaatttggtgtaatgtgttgaaagaattgccaaaatgcaatttttcgacctttttcactcgtcgttgtattgcctgaagggaattcttgcctaatattatgtgccgaatccgtaataatttttgacgtgttgaaaactcctttcgggtcttctccagctttgtcttgaaataatttaatcatttctattgcttcatatattgacaaattttgctcatgtaagcgtttcaatgttatgaaattttctggaaaatattttttatattaaattgaaataatttaaaaaaaattttcctccaacaaaaaattgtttgtctccaaatttttttcatttttacgattaattttgaaatccgatattatttttgatattttatttattattatattattaaggtccataaataattttttcttacaaaaattttttcttagaaagtttaccctttgaaatgcttttgctttcatgggcatca

SEQ ID NO: 12830 - DNA, 4546 bp, Heterodera glycines
cttttttcattggattttttgattttaatttaggcttttgagttcttgactcgggaaaagatttgttcatcaactgcatttttttctgtgacctttgacgaaaaaatctacaaattgtaagttttaagaaaattgcatccggcataattcttgccaccaatccaaaatttgtgccaccatttccatctaatccgctcgtgccaaactgacctttgcatcgcgaaaagaaggcactcgttggatgagagcgggaaagacttgctcaaaaaactcgtcgtagtcaatcggcgggtcgtcctcgggctttgagccggccattttgactgcatctttctacaaacagatttcaattcgcaaaataaatataattctataaggaaattgttttttgactttggtgggtattcgtccgcacacataattgtgtccaacattgtcgggacgacaaaaaatgccactcgggtccatcagaattggcatctgcagcaccggcacttggggcgcgtggacaatgaaatttgtacgccgtgtgcaaacaattggcaacggcacactcatcacaccgcctttttgccctatcaaaaatatttttttgtttatatattttaccattaaaaatggcactccaaaatgttaaaaatcgcttttttgtggggttattattgcttttgtgtttaatatggtcttatgcacaaaaacgaaccaagtccagcccgtctggcaacctcaccagcccatggaccagcggcattctgaaaacaaacaaacaaatgttgacaatgtaatgaaaagtacaacaaataaaagatttgcggaatattgggatttttgtggcattatttttgttttactagtgtaataagagggtccgatgaaatttcaaatcgaaagggtccgtcttcgtgcggtttttcagttggacccactaaaataaaaaaaaatgtcgtttagaagtcatccttggattctcaaccaagaatttgaaagaaaagcaactaacaatgagtctgaagctttggatgcgacgaggcgttgcgccagtcatttggggccgcacctaaacaacaaaagcataaaaaaggaagtgggaaatgtaattccatcaaaacttaaggcaaaacaaaaaatgcattgctaatttttgttgttttgcgacaaaagccaaaataaaaggaatgaataaaacacaatgccagggcgtggatagagcttttttcgttttataagttctgcaagaaaaacttttttccctccaacatcaaaaaaaaaaaatttgtccaaattttcaatattttagacgggtaccactttaaaaaaccccaaaaatggcacatacaatggccccgcgaatggtctgcatggactgctccgccgcgtccgcatcggccgtgtcggtggtgcgcccgtgctcctgcatgccgcggtgccggtacgtcactgtgccctccatgtcgcccttcaaatagcgcacacccaacgtcatgttcttctcgcgcagcgcggacaacagttgccaagtgtcgaaaatgccctcattttcgaggcctgaaatacccattgaagcaactatttgcgccaaaattctttaaaaaaatttcaaacggcgcctttcgactcccccttatttttcctcaaaaatgtccttttctttttttttggattaactttgctagtaaccatttgctcgagaattttttcttcggctgcacttaccccgagccttactatttaatttttttaatattcctgcaaaaagcaatttaaaaatgctttttttgggtccaaaatcctatttttgacttattctatttttatctggaaaaaattgcgagcactgacttttcataataatttgcaaaattgcaattaaataccgactgttccaagcacaacatcgtcaaaattcatgaacggaaatctgctggacagctcctctctgccgatgagaatcacatttgccccacgatcacttaaaaaacaaaacatagttaaattttataaaaaaagtactaaaattgaatcaaaaacttcgagtagttgtaatttaagaaaaaaaaattgaatattacacttgaagtttccaagcatttctgaactgctcggcgtcctcctccgtccgggccaaatgcataacaccacagggaagcaaatgaatatccgggggttcgttgtctaaaaaataaatagttttgaaaatggattaaaacacctttctgtattaaattgaacctaaaatttttagatgttccccggcatgtcgcaaaaattctgaggaaaacattgccatatcgatcatttcgggcgtagaaaattgctgagtgatcacaccactgccaagcaatgaacgcgttttggcaaactgaaatttgggatatgaattcacattagatttatcgcgtaattaaaagtgattgtgacccaatccatttcaatttttaatgtttctttggcatccttttcgaatatttcatgcatttgaaccgggtttgttgaatattttgtagtttgccgaaaattaaattttcgagtttttgttcaaatccgggttctgtggttacgaatttagtcaaaatgaatgccagaaccgttttctccggccccgaaaacctataaaacaactttattttaagaaaaaatttcaacaatttttttctcgaaaatgggggctttcatcgataatcagggttcgtaagtgtcctttttttaaagatttgtcctttattttaggcttccctaaactttttaaatttttttgtgcttaattatttatttcgctgataaaaatgctaaaaatctttgttttagcatcgtttgtcctttttttgaaaaaaaaaacttacgaaccctgtcgataatattacccaaaaaaataaacgaaaacgaatacattttcggtgctttccaacactgtgaccgttaagttttcgtcacgaaagccctgcttaagccaataagcggccgctgagccggtcagtcccccgccgatgatcaaatattcgcaatgcattggcagcagttcataatcgttcacgttgactttcatgtgtgccagcggatgtcggcgacggaatgcgtcatattttgcctgcaaattgttaaatttgcgaatgtttttttttttttgcttattgttgcctcgcgatatcgccgcgcggaacgtctgaagtcgtagctgagaatgtgctttccacggtcccaaaattcttgaccaggctcaaagtatcgctcattttcataaggttgccactgtttgcattgggtaaaactgagaaaccgtgatgaggttgaggcaaaatttataatatgtgtttgaaggatccgttgatttataatattcatttgaaaaaacactacaagaaaaaaatattaaacacaatcatggacggtaaaaaggaaaaaaagcggcaaaaaataattgacgtaaaaaacaaaacgccaatgcattcaagtgggaaacaaagtgtgtttggaatgctaaattgggagatttattgttatttgtaggggctataaattatatgtatgcttttgcatattttttgtgcgcatatgctatgaagggaggggctcaaaaatagcatttctacgttaaaattttttgatttggtgaaggtttttagtgcatataaaagcatattttcgggggtttcaagaataaatgcatatttcgccatttttgggcttttagagcatattttcgccattttttggaaattttcacaagaaaaatgcgagaaaagcgaaaaatacacccccaaggatcgactttttgtgattttttttaaaaaatacacctttaaaaattgaaaattttttaacttttttaaagaaattttggaaaaaaattatttatataaaaatgtgattttgttttagcatataataaaaatttaaaaatttggaaattcaatatttttgcaattgtctaaaaaatacaccttagcccttcttttggtgttttaaaagtcaattcttaatttatagacaatttttgcatttttttagggttaaaagccatttttggcagtttttaaggcatattttagtgcatatttgggcattttttggatttttagggcatatttggcggacttttagtgcatattttatgcgcatatttggcattttttagtgcatatacataatttataggggtcggggtcacttcggcgcggaccatttcggcgccgcaaattttgaaatgctataacttttttatttgtcagttagctttagccaatctggcatcatttgaaagctctgtgtgtgctctatatttacatgtaaaaatagaaatgaatgattcaaaaataaaaaagttatgccacgcggcgccgaaaaagccgagaaaaagttaatttttgaggttttttggccgataacttttttgtaaactgacgaaattttttgaaattttacgggctaatagagaatctgaagagctatcgaatgataacgaaaatttttaatttggttgatcgggagaaaagagttgtgagcaacggcgcacagaaaaggcccggcgcccgaaagtgggccggtttcc

SEQ ID NO: 12831 - DNA, 3416 bp, Heterodera glycines
tagcagatgagcagcccgccgcttggcccaaaacggggaacaaaatgtgccgttgtcgccgcgtcagtggcacgtagcccctcaatttgaccatttgttgttgctgttcactcaatgagttgcgcatgcgttgccatcgttgctccgcgcgttccatttggtcaatgattggcataatgtcgcgctccaaccgttgcacgtccggcttcaacttgaccacaagatgttccattcaaaaaaagaaaaaatgccaaaattggtcaactttaaaaattatcagatcgtattcctctacaatacaattgaatttacattttggcacttccggtgatgttcaacagcagctccagccaagcggccgactcgcgctcgccaagattggcagactgaaataatttagcaaaatttccattgtagcatgattgggtccaacacaattggcttttttttagaaaatccacgggatcctcatccaaaccagagtgctctcccgactaagctaccggggggggggaggattagccatctttggattctcgatcaataaattgctttttatggagcaattttacttgcattaagcatgtcagggatggacaacaccgaagccgagtcattgttgcttgtatagaatgagaaaaggtccggtgacaacaaatggggacgacgacgacggcgccatttgggggatgggaaaagggagaaaaagcggggcgacagcaacgcgatgtgatcaatgccaagtgagtcgaaaaagcgtgcaatttgttgctggagatcaaccaacgcgggcggcccctcgggcatggccgaacgaacattgacaaacgggttgaagcgggaaaccaacctgaaaatcatgatcagtcaatcgttagtacgacttgcaatttccgattttatatttatggttacgatatgttaacggtattgcatgtacgtctgtttattcatggactgtttggttactgtatttctctgtgcccgcgctgattactatgtcatatttagaaaataataattgccgtgggtttagtttctaattaggtcctctaccatacccggtggcattttcgatcatttttttcttaagtacatcaatcaccgactcggtgttttgcgcgttgatccgtgcaatagagcgtcgagccctctcaaaaatctgcatatatcgctccaattcgcgtagattatttaggctttcattcagcagccctgttgttgtggcaaaggaatcccgtcgactaactgtctgaatcggggcgttaaatggctggctcaacagcattaattaagtttagccattcattacattgaaaaatcaggcatttggttttgtggtcttaccacatcctattgcggctcccggtaaattggacaccagaaaattggacaccgaaaattggacaccgaaaattggacaccgaaaattggacaccaatggaaaaatggacaccagaaaattggacactgttgtaaataaaaatgaaaataaacaaaataaattactaaacaaaaattttggcttggcctaaaagatctttatcttaatctgccatatgttgtttataagcgtaaataatatggaaatgaatttgttattatttttgtaacttcaggagaagaaaaacatcatatcattcataaagaaataagttttattactcatttctggtgcattttttggcccattgatcaatcgtcacccatttctggtgcattttttggcccattgatcaatcgtcacccatttctggtgcattttttggcacattgatcaatcgtcccccatttttggttcaatcttagtgtccaattttccggtgtccaattttcctttattgtccaaaattccggcggtgtccatttttccgcttggtgtccaattttctggtgtccaattttccggtgtccaatttaccggtccccaggggacaaattcggacaaaattttcattcattctaacctttttttcattttcagggaaagaaagcggataaaaaaggtgaacgacagcagcagaggatttcttttttataatgtgagaggggaaagccactacaaattgctgtcatcaaaaagtggcatgatttgactgaaccaatcctctaacattttcattactaagtgccgaaggttttctgaattttagagattacctggcaaaatcccgggaaattgtctctcgtatctctaaaacaaaaaactgaatttttaaatgttacagcaaagaatggcgctggtcaggcgaactcgggcgaacgcagcaaattggataagtcaaccgcccgcggcgtcgggaacggatcaccgaaagaagcaggtaaaaggagagagaggggtggaggagaaatgagatttgtttgcgagtttaattttcccttttcagccgtcccggccaccacgccacagccagcagcaggagaagcgagtggtgagagagaatggggagacgaaaacggcaaattcattatttcttttgttcgttcagcaaatgccgcggcgaaagcggaggtttcacagcgcaaaaaggaaaagccggacattttcatcacgaagaaattgcctgagaacaagaagcgcgaattcgtttcaggtagagcgaagcaaggaatacgaataggcgaatttttgcaaaattccgttcgttttcaggcaaaaacccggactacgagacgctcaagcagttggacatgcaaatcttcctcaaaaagaaactgtcgggaacgcaggcgaggccgcacgacttccaatcgcaagtgtcgtcgcaacaatcggccatgtagaagtgtgcacagtttttggtggagtcagcagtcagtgatgatgatgatgaatttgtgttatatgtcggatgcgcccccgttttaccaatgctatgaacaacagttgtgacaccaccgcatttatattgttaaacatttgtgtgttatttgtgatgcatatttattgtcagtgaattattgtattataatttaatatgtatgtgctgggcataaagcaacgaattttatgcctatgccgtcgattgaaaaagcccgtaaatgatctgtaagctctctttaaatgcttgttatcattctatacatagtccctcacaaatctcttataaatccaaaaaattggtgtcccaacgaaagcttataggtctatagaagcttttgtataactttatttttagctaaatgcaatagacaaaaaattactctcgaaaaagttgagttttgtgttttcattgtaatttatttttaatgccaatatttgctttgctcttttcttgcatttataaaatcccgagactttatctttcgtttgataccaagaatataggtattggccaagtaagaaaaagtgatggccttagaaactgaggatggcaattcaaaaggggcataaaacacgaacagaaccaaaa

SEQ ID NO: 12832 - DNA, 1094 bp, Heterodera glycines
  unsure (1)..(1094): unsure at all n locations
aagttaattggcatttgttcgcttttagttaattacgttcgcccggtcattgtgctcggggctttgaaggatcgcataaatgacgaattggtcagtcgacaccccgacagattcagcagctgtgtgccacgtaatgggccatcttttccctaattagcatcgtacaattccgtcactaattgtctctcttcagatacttctcgcccaccgcgggaaggcgaagtgcacgggtaatttgcgacaattaattggatttgctttcttcgattcatttcaatttattctccagacgcaattattatttcgttacgaaggccgaaatggagagggacgtgaagagcaaccttttcattgaagcgggccaattccaaaacaatttgtacgggacgagcgtagcggcggtgatggaagtggccgaatctgtacgtttttggaggaattgtcaaatttcggcatttctcgactttgttttactttttcttttggcttaagggaaggcattgcattttggacgtttccggcaatgcgatacggcgactgcaaaacacagcccatatttatccagtttcggttttcgttaagccgcttaattaccaacaattacggtaagaaaaggacgggcgatcattgggtactgtatccggtaacactgattgtgaggctaattgtaaggctggttgagcccattaaacttggtctcacggggtttgggttcgctggtcacaaattcctcccattacggtcaatccctaacagcgaattcgaattctaacaaaagtcagtgccaccaacattttcccctgctgggcttccctttttatatccgcctaatttattgtaatttccttcagagaatgggactctttgctcagtgaagaagatgccctgaagcaatttgaacggtgtcaacgccaagaacaaaacttcggggatttgttcaccggtaaatgccggccactagtaggatgggatttatttttatttaaaatcacgaaatatttaaataaacataatcccgtccctaagtaattagtgttgccaatcgctttgctcaaatttgtctttangaatggtcaccggacattcgcccgacg

SEQ ID NO: 12833 - DNA, 2410 bp, Heterodera glycines
ttccaaaaagaattcataattcacttatcgttttgaacttttccgtttcattcagtgccgtcagttgtgctaaagcaaatttgccaaccttcgtttataaacttgctcataaatttattaattttatttcatttgtccctatataaatacataaaaacaacagaatgcggggttttatcatgaatatcacttttccattaataaggatttaaaatttgggtcagtacaattatttaagtaagaaatcacgaatagatgtgcttatgaacgggggaaaattagagcagactccaaaatgtgagtccgcatgacaagaatatttaggaaggggtggctcttagaatttgaacataaatagaggaaaatgatcagtacgctcctccaccgttttttgcttgcatcatttcatttagtgatgggctcggcctttcattggttgaaaatggattatttttgttattggtcatggcagtcgttgatgaaccgaccaaaaacggattagtcgctgaaagggttgaatgtgaacaattttatggcacgaaacaagaaataatcaccttttttaggggcaatagtcgaatggttggaaggcccaagcagattatcaagattaacaagagcagaattctcttaaattgcaattgtattaggcaaaagcaacttttgaaaacctccaagaaaggactcgggtgtctttacaccggctctttgctgtccctgacttgtcggttggttcgtcgtttgtgcaggttcaccaatgtttccaaagaaatcatccgatgattgtttcgttggttcggatgcagcaaaactttgtgtttcaaatgatgcccatgggtcatttttggttgaagatgactgcatgagaggaccgagaacgtggcccccatcgggatttattgttcgagtcgtcgacgaagaaccaaaggacacaaagcttggatccgaggaagaagccgcaggtgcccatgggtcgttttgaataactgtgtgggaagagaaatgctcaaaagagaatggacaaaatacttgtctggtgagcggagacaggcggcgcagtttcaaccattggaatagttgtggaaggccgtggcgaccaggggtcgttgaaaacgcccagttgaggtggctgttgttgtgtttgtgcagaactacccggcgcagtcgcatttggaatattactcctgaacacgtcatccagtcccaatgaaagcaaatcatccaaagctccgtgcgacttggaggtgccctgtttttcgacagggtcaattccaccagacggagacgaaagacttgaagaacgagccaattcacgcttgctctcttcaattgcgatctaaaattaatgaatttgctcgaccagtctgactgaattatgcctcgattaatatatttaactataatttcaaactttattaaaaatcaaaatctgtatatcaaagttgagtattaaaatagcataatattagtaaatggtaaaaattaaactcatttacttgcaagcggatgtcatcacctcgacggagttcacgttccttttcacattcttcctttgaaagtgctaatgcaatttgcagttgcatttcctcctctccaagggaagacggccgcgcttcttcaaattcaggatcttcaagagacgaaaagcaaagaaaaatgaacgctttcagattgattcacccgttgcgcctgtttcgatgtttctccttccaacagatcgtctcgaaccgtccgatgaaatcccagaagatccgttttgaatgaagcgctttcgagtcaacaaaaaacgggctcgctcattcttcaatttttcgtcgtcctgcaacaaagcgaccatctgtttggcttttgcacgcacattcaatccttggtcacggttgtcctcgatgtgttggaaatcctattaaaaaaaatttagcaaaaaacatgaattgcaacgactttgagtgtctcaattgaaaagagattctcgcggcattgagctgacactttctcgcttccgcactttatcaaatagtcaaggagcaccaaacttttgtacacctaatgaaggtttattgttaggtttttttgtgacaaaaaacatacatgacgccaattctttccgtggtcatttagccttttccaaaccatagacataatttcggtgaatgaaactgggttgtgagttaaatctgcgatttcagacattagcactgtggttggtccccatgggtcgttgctaaattgctcgatttttttggtttgcaaatttttgggataacctggtcgcctctctaacttttacttgtgcatcagtgtaattgcaggccacattcttcacttggcgacgtaatgtagatatagaagacattgacgcagctccaaaagccaaaagtagagaggaataattgttctgtcggttatgtcg

SEQ ID NO: 12834 - DNA, 2105 bp, Heterodera glycines
tcagtgtcagtaatttatttttattcggagatagtcctcccgtgatgagacaaaacctgtcacacattcattgtgtcattaactcattaaacaacatatgtctctctctacccatctaagaagctaagccatttcaatttcattttgcagaagggagtgtggagggaaaggaaagaaagggaaaagaaggggcgggggagttgcgcacacagcttaattagtaaattggacagagaacagcttgaacttatgaactaaataaaaatatttattcttattgttttttaaaaacggagaacaaaaaaccaagctaaaaaataatttgcacctacaacagaacaggtaccacttattaggtagctacctaattagttcgtcttgccccaagcgctttccctatttaaaaatgtttgcttttttcggctcgattccttttaaaaaaatggtcgctgttcgtctgtttaatatcgttttttataggtgtattttcttcaaatgtttcatattttcttcgtcaatcgtggttatatgcttgttttggagccacctgctcttggttccgtttacgatttgcagaagtgagtttatttatttggctgcttctgtattccttcctttaggtgtatcgctgattccataaacattgatataaatgagcaggtctgatcgtttttttaatcaaatatccctcatttttgattcagtaccttttcctctctggtggtgcttctatcaatcgcaatgcgatgctttctgcaatttctgacgtgggaaccgatacgaacccgatatttctcgttcgtcgaatcactaatacccaatcagaacctaccaaaacaaattctgacggaattaatgagatataccaaggtagagaatctcagtgtgttcatacattcttcctattttcagattgggagatttccatggatcgtatgttgggaattgtgcccacaaattcgccctctgcaattagtgaatgtgtcgaccttggcaaaaagtgcgctcaactcgctgaaaatattgttcgcttttgtaacaacgtgctaattgagcatcaatttctatatcaggtcagaaatgctttttagttttgaatgagaattttaattattttcttcttcaaaatgcaattgtactattttttaaattttcggctccattaatgcaatattccggaatccaattgtgttgattgaatacacaataaatttttaaaaacttacatttaatacttaagggttggatgtctgtgatctcaaatttggatgaaaatattctgcgtattcaacgtcgtttggacaaatcaattggacaagcagaaaaattggagacatttcggcaaaacggacgctctctgttgaatgggtttgacaaaatcttggaaactttaaagaaagtgcgtcttcttttttgttatggtgttcttccatccttaaggctttgttaagattgtgcttcccccttcgcttctttctcttggccattcttccacaaatttatccgattctgatggatctgctgaagaaataacacttttcgattggatttcgtcaaaagacccggcctactcgctcagctctttttcgcaacatgtgctcgatcacttgggaaaaacgacggacgaagagctaagagaggcgcaacatttgttggctatggtccaagatgtgtcgcaaaaacctcagtaaaataaattatttataatttcaatacttaaattattggtttttgcttgtaaacaaatccaaaaaatttttatttttgaaatattattttgtttccatttaccgaggtgttttcggttgacacgtttggccaatcccgaattctgaacccataatatttttaatcatttatactatgaagcaggactgtatccagtaaaaagtttcgggggagtgcaccaccgaagagcttttctttttttttgttctccagaccaaaaaaaaaaaaaaaagattttccggtgtcatttttcaagtttttagcaaaaatacccataattaaaggtaccgtgacataagagggattgacaaacgcttgggcacattaaatgcacatctacaaaaacttgaaggtgtgttctaatatttttgttcaat

SEQ ID NO: 12835 - DNA, 4158 bp, Heterodera glycines
ctttacaggtgcagcaaaaacccatcttactcaacacatctatacccaacaatatataattgaatccgctattttctcttgataatttttgaaaatctgccaagtcaacctgaacatcagtcatgaatccagcaggcacagttcgtgacctcttaaacctaacacgcctaggtttatgtaaagtatatgttctgtctccctcgagaaagtgttcaacgtcttttcttgtgatcgaagagtcatgttttattgcctcttcgtaaagtctttcctgtccagcataacaggcgggtgaatttgggtcattatacaatttgttcagtaacttttccattttttaattataaattttcgttgtttacttttaacgcccgatcccgattgttcattaaatttttgttttaatattccactagtcctcgggtcgtttctcagtcgttgctctaaagcttttgtacctatgggtgatggagcattctcgggtgaccgtctcaatattcgctctaatgcttgattaacattactttttaaatatgccgttccatcagctctcagtatatgtcctctatagccaaccccaaatttctcagggtcattatttataattgacataatttttccttttttcttgactacaaaagacttttgtttttgacgaaatttacttgtcccaacacgcattggttttatcagtggtctcgtctttggtgttgatgttgttgactcagcatcactctcttcagcagtagtgtaagggtcttcaagtgttggaatagagcctgtttcatccaatccttcgtcattaacaatttgagtaggaattttgctatctctttcacgctgttttggtttaaacaccattaatgagccatctgaaagctcaacctttacgggtttgtcttcaatttccttccttagtttcaagaaacgcctcaattcctggttataaagtaaattttttgaagtagcgtctaattttctctgcttcaaaagtgatgacaatttatttttagcattatcaacattaatttctccggcgtctggttttagtaaatttttgtacaagtcggaaggaacaagaataaatttattctccatattttaacgcggcaataagtactggtaataataaaggagtcaaattaaggaaaccaccgcctccgttttgttgaataattttatttacacctttctcagttctaactcttcctaattttctcacaaaatttgcgtatggtaaaagtctatatttttgtctcttcgtgagcggaaagtacccctttaatatattataactaatttcaattaataatgcaatttgttcactagtcgcttctttaaatatttgttgtctctttttaaaagactttgtttttaccaatttctttaaaaaatccaagttttgaataacatttttaggtaaattaatcattttgaatatacaatgctttttcttcatcttctttaaatatcctcgtccgtattctcagtaaaggggtcgatgccgggtgtaaatccaaaaataaatacccataaggtgataaagtggcatctttatacgcacttaggaaaaatgcaagattttttggaaacagttgaacacccaaattacgtatttgtagcgcggcattcggagcagacattaaaacaatatattgtgaattaattcgggctaccttcacctttctctcgaacaaattttgtgttatgaaaatcacacccatattaagatgatgagcttttttaatgaataattcggatagagttttctcatcaattattgttaaaaggtcatctagaattaataagagaggcttctttagagagctcagcaattcgtccctaggaggtcctttgtgcacatgcactcccattttttgtagtacaggaatactatcattaaattgaccataacaataaagcactgattttgggtgtgggctaatcaattcatctctttctctcaaaaattttagtaaaaatgttgttttaccgctactggatggtccactaattaccataccaaaaggcaattttaatttcaaatcgttcaagtgaaaaaatttttcatcaatcatctttattaattatataatgttaaattttaatcttaaatacaattagtgggggttctttgtgtgtttgttatagatatcagtctgcatcatattgtactttacgcaaccgggacacatcacttgtgtaaagtggaactcatcttctcccatcaacttgaactggtccttgtgcttatagttgattcgacgacaccctgggcagagaaagttgatcactgcaaactttggccgggccaatttccaaaaggattgtttgtggtcaagcaagttatatacggtgtgggttgatttccgttcactcttttccaactcattctgttttagtggtttctcactgctttttatttctgcgtcttgttgaattacttgctccactacagattggagagtcttctttgaagaagtagaagacattctaatttccaaattgagttacaaaaccctgactatttctctccttaaatacctttttgtttggttaatttataccttttaatattagtaatgacacatttttcaattttatttctgaataaacattcaaatgaaaaatacaagtgtaaaatagaaaataaagagaaatgataaaaagaaagtatgcaactcttttgatagatttgaaggcatatcagaattcttagagttccctttgaaaaaagtgagcaaacacacccagggaacggcttcacccttcggtccccaatccaaacactcacgcaccaggctgtgcattacaataatgaacagctcgtccaccttcatctcagatggatggcctggagtgttggagaggatcaaccaggggtcattccgtcccacatgagtgatataaacagagagaaagaaaagaagggaacaataagaaaactaatatacagaaaatttaattgagaatgcatacttatcatttgcgataaccaaattcgaggacttggaaggcgttattaataatgccttttgtgaagacaggttgataatgcttagttagagattgagtgtacactttgccttggataaggttaggacgaataaaatgggggtatgttacaataatggggtccgcggggtcatcggacccataacgcataatttgatctttcacactgtcataatggatagtttgcacagtttgttcatccagtgttatcccccttatcttcaagtcgtactcaatttacccattgtccttacgttccaacttcagccgtagtttttgcagccagcgctgatgaactccaaaatgttgtccggcttttcgtcagtcagctcaccgagatgtccctttcctgtcgggagtgggtcgttgtcctcggggtgaaccacaagatttggaacaaaagctggaaattttattataaattaaatttacataggattattctttcatattttagatatatttttaacacttattctatattttgattatattagcgaaaaaacgaaaaaaactcgtaatttagattaatgaaatggttagaagcaactttttatttttgccttttttgatgatctaaataatttattatttttttttcttttgattttttgaatcataaaatggaataagatatatttcggttttactcgtacttgtgatcgatattttgcgctggttttgaacatcaatagaatttaaaattgttaaacaattatttttcttatgccactttaaatttataacacaataattaaatggagacttaaaataagacaaaaaaaatattcaaacgttaaacgaagaacactttaactgatcatttttgaataaataattgttaaaaaattattaacgaaacaaaaataaataaaaattcagaaattatatgaaaaattaaagttgcgcttcaaaatcgtatgtttaggaaatttgaaaactctattctaataagaatttaaaaataaatgtatttgcaagtttagctcagcaaaaaacaatgtaaacgaaaatttaatattaaaatattactaacatttttaaaataacaatcaaaaggctgacatttaaatgaaataagaataatattaaaaaaatctcctatacaatttcttaccgaaaataaggaaatgataaattaat

SEQ ID NO: 12836 - DNA, 4868 bp, Heterodera glycines
actggcggtggaaacgggaccacgacagctgaatctgtgccatttgaccgagccgaagtcttcacagagtgccaagttaggtgtcctgcggggtcaacgaaattccggctgaaaggggagctcgcgttcatcccccgtcaactccaatttggatttggccacagagagtcagttggtggccagcttgaacaagggggtggaatccgactacccgattggggcatggaccccttccccctgttccgaatgctcatcggaggcccatggatcctagtggcgatcggggccggagccgtcggactgctcgccttatatttgtatatcaaattcaacccagcttttcgcatttatcggtcgctgatcacggttatcatcctcctcgggttggtcggcagcggagaaagtgggcaaattccaccaaacaccgactccgtcagcttagcaggggctcaagccccttttgccttcattccaatcggcgggattttagtgcttggcttggcactcattcgtctcacaactccacgccgacgcccgacaattatcatttttccgccctcccccctggtcttttccatttttcttctctccccactacagctcggagttctctgcccaaaaggggaccaatcagcaaaggggtacccccctgagcgagggggcggagcgacggcgcccggcgcaacacccctccaacgtctatttaatacagcggtccagagaagaatttcacttccttccacatttaccccccattcactctcttattgtcattccctttgtgaaccgagtatgactgacgacttcgcaaatggcgggttcggcgactgcaacgacgactttggtgggggcggaggtggggaagtttcccctcgggcacaggcggggagagatgcgcagcggcgaaggagcctcagcaaccattccgagctgggcgcacacggtcggccgatggcacgttgcaaaagcctggggcgcccaaagccccttccgcccaaatcagagcgccgttgcgtcgcggacgatgtcaacttgttcgccggcgagaactggggagacgacccttggcaacgggtggaggtcgaacgcttctttcgggagcaggaggcccggggaaagcgaatgatccacgagcggacgggcgaacaggtcccctttccatcaactttgggccttttgcccgctaatcggcaggaaattgccccggggtggacggtcgctgactatttcgctgaaacgaggtgccggtccctcaaatggcctcaatggccatgcatttattcgcccggaggtgtgattgggagttcgaagcgcagtaggactcttcagcaaaaggggcatgtcccctggcgtctaggccagacgcattgtgattggcacccgctggaggaattgtggtggacaacgcagtccgaattggactcggaatgcgatggcgcgccgatgacgagagaaagagcgcgggcggacagcacagaaagagtggcgcagccggcgggtcgttggggaatctctcccccaaattggccgacgaaaggagcacttcatcgaatcgatgccatcaacaacggccgccctccacgcccctgccattcaatttggggccgaagtccatcaccccgccctgtctcccctcccaagcacctcccaccaactgaagacaccattcattcacatcactttcattgccatcaaactctttctcatcaggggactttcccctccgatcgttcggaattggccttctccaaaaccccatcccttcttagatcgtactcttcctcctcctccttttgttctttctccaccttctcatcaaaaatgtaccgcagccgtgacacggaacgttcgtcggggcgcacggctcgacgtctgcgcctcttggaattgacggccgccgaactcgcccgaggagagttcgaccataatcgcatggtccagcagcatggtggaaacgctgaccgcgtcctggccgccgccgaccacttgacagaactgcgcgggaaattttcccgcaactggtcgaagtgccacgacattcctgggaaggaccgtcttcgacaccgcttcgatgtggaccgttggttggtagtggcgccgagcaatgccggagaaaacggtgggcaaaacgacgggcaatcccgaggaaaaatgcgttcggtggtggtggttgtgccgcccacctcgccaccagtgggggggagtacgcctgggaccgtggcgaaaaagcacccgccgacatcaccaaaaaggggcctgtcccctagtgcgctcccaggcccatcaaataggggcctgccccctctgtccccgactgtcgccattgccaagccggtcgaggagatcactcaagtcgccgaacttttgggcaaggtcggcgacgaaatgaaccgaagaatggcggaggacgaggagcgatcggcgacggggggcgaactcttgtccctcccatcggaagacgaagtggtgccggagacgccgacgccctcgtcgccccgcgccgggagtgtcgcaaaaaaaattagcgacgagaatggcagaggaaagaaaggagtgagcgccctccaccgagggccgggaatcacgggtcagggctgtttggtgttcaacgccaacgacgggactcctcgagagctatcgtcggatgatgaagaccgttttgggggaggcgctcgggaccattttgatccgatcggaatgtgttggacacttcttcccattttatttttctctcacttttaaatttcgtaccctttcccattttctcttcctcttccttttttatttccatcgcttaatttgcatttgtttatcgctatttcactaaaattcaaatgttctttgtccacccgattggggctcttttctcagattcccattttttgccccctctttgtcctattcatcgtatctcttcgccatcaccaatcttttcaaatttgtgcttccccttcgccttctcatcgcctatcgcaggtgccgacccattcacatgttttgcattttttgtctccctgcccggggcctatttaaccccccggctcctcttctttttcttccttctgttttttttgactgatccatttttcgctccccttttttccttatctttttcgctccccactttgctctctccgattgttgtttatcctacggcaaataaattgtgtttgttgaccgctcctttggtcgcggcaaattcccttccctcccttcggaattgccaacagcaaatcgtacaattggggccttcctctgccccttggtccgttctcgaaaactgcaactgtcgaacgggatcggatctccccgtgatccgaggctcacttcttcccttcccaccggtgaacgagtcgggtcaatcccgacggtcgcagtttggagtccactcactcctcccttgagtggtggtgccgtttctttccttccctctttgtcccgccctccctcttctcctttctcggccccccttgggcctcaattcgaaaggggtcgactaagccgagaacgagggcatagaacccggtgatcacccctccctttgatcaccaggggttttcggacaaactggtgccgctaacagggggttacctttcttcggacaacgccaacttcggacattggatttcggacgacaaaatggacccaactgacaatgagcaagaacacggcaacgacgggaatgagcgaaccggaggctcacccacaacgcaagtcggggcagttccgccgagcgcgaagaaaggaaagggcaaaccgaaagttgtggagacttcggcaattcaaagcaattcgggcgttcagcccggagggactcggaaccttcgaagtaatggcattaccatacgtgccattcgggaccagctggaaagggcatcgggccctctcgccgatcggatcgcggaggcacgagaactgctcgagccggacctcaacgcaggagacaagcctcagtcagcagtctgtctctcagccatggaaaggggactgcgggagttggtcgacattttcaagggccacttcgatcggggcctagcggcgatcggggacgaggcaccggagctgcatgactatctgtatgatgctttcaccgtgccactcccggcagcgacgagatgtttggggcttcgatcgcacccgcccccggccgaactgcttcaaatcgcgatggaacatcttgctgatctgcgcacggtccgtcgaacactcgaggacgtggaaaagctatctcagctttcatccgagactcggtcaggaacaggggacagcctgcccgcgggagatgatcccgctagccgtcgcacgccgcctccacagcaaatccatgacccgactgatcaccagtccgacgagtggctgtttggacgattcccaagacggttcgagcagctgaacatccaagagggacgtcgggcggtgacgcccgtgatgcgaagcgtcgcccaggtcgcccaatacccggtcgtaaacgcaggaggagccggagccaacattcgagaatgggtcaatcaggccagtgatcggagggaacggactcactccccacggatccaacaggcgggcaatcggccgcgcccaccgggtccaaaccgttcagtcacgggagatccaaatccctgtagtcgttttcggatacccgaacagatcaggggcagagacccctcggttctgcgcgccgcccgacgtaacgaagcgacaacggcattcgaaaccgtgcgcctccagccgccgacattttcgggaaaaccggaggattggacgacattttggtcgtatttcaagcgggcagtggacgacaagcccatcccgggcttcgaaaagcagccttacggcttcgctgcttaaaggaaggatccccagccaggagg

SEQ ID NO: 12837 - DNA, 1365 bp, Heterodera glycines
ctcttttgaggcgggttgtaaaataaagcccgacccctaaattagagcttcccctgaaataaagccctcctcctgagggggaaggttgaaaaacaaagccccagggggctgtattttactaaatacgataaaattggctatattcacttcatcggcccaattacggggggtcggagaggttgaaatctgattcccgaaatttctaaaaatgagattttctgttaaaaaattactcagtttcagaagaaaaaggtttggctcaatattcacatccaccaattgcagcagcaggaaggaaggaatccgtttttcaccaccacacaaaatgacatgcggtttatggcattttgtaccgtttgcacatatcgtataacaacatcatattctttcttgggccttcttcaatttgtgctgttttttgctgcaattcactttgcttatccggtccaatctgccaattatattggtcaaaaacaacagcaaactggtccaaattcatcgttgatgtctgaagaagaagcatcatttttggacaacggactccggcttgaactgctcgaacttcttgccaacatgttccgcagccgaagcagcaatagcaacgacgaccccgcaagcgatggacaaccaaaagcattggcacaacggcgcgaacctcgctttttcggtgatagtgcgccgttggcacttgaagagggccaaaaaacgggtcaaggatcggccaaggaaacaagggtcagaaaaaatgggaaaatccgtaagggtaaagtatggaaaatttgcaaaaaacgagtggaagttttaaaaatcttaaaaaaggaaacattaaaatctttgagatggatacaaaaaattaaaaatgccattagagacatttgaaattcgttaagcatccccctgcccaattttctcgagttcgaactcgtgaggaggaggagagacttttggaggaggaattacgggccgaatttgtgcgcgtgtcaaccgttaatgacccggatgttgcgcatcggtttcgaaagaaaacctatggtaagtcggcctaattaaaaaattaggggtcttgaaatttcataatataatttaatgtttaaattataaattaaaatagtaaattataaatattatctccccaaaagcaaatttgcccatttgcctcgggggtcataaaaatttaattagcgcatccgacgacaaagaatattgtgggaatgtgccccaagggacaaccccaagggacaattaatagaatattagcctcattaaaggcgcttagtcacaccaaatctttgtttccgtcactattttttcgtggggatagattttctcaataaatcaatgctagttgaagacagtttttttggg

SEQ ID NO: 12838 - DNA, 1525 bp, Heterodera glycines
  unsure (1)..(1525): unsure at all n locations
gacccggggtatctctagagtcatacgaattataatcatataaaaggcattaaacacgagcaataaagggaatnngaaatnaannnananaaanaaaaaaggccttttataaaaangaaaaannaanaanangnngaaanaaaananaaaaanannnannaaaaannaaagnnnaaaanttattttttatgtgaaagaataaattgggtatnatttatgnnngtttttnagtgagaatagttatgaaaaaaatataattttaaatttatttataaatcccaatatttatataattttaaataaattattataaaataaatatactaattttaaaaaactctcaaagaaatatagcatagaaaaagtgtactaaaaattataatagagataatttatgaattttttctattttgttaaaaagattgcattcaatgataaatataaaaatagcatattatttcaataaaaatcaaatgataaatatcgaaatatcatttatataaacattgtacaaaaattcaataaaattatatataattaaggcatattacaaaaatctttttaataaatgtttttataaaaattattaatttttaaacttaatgataaattacttttttgaatttaactgtttatagaatttttttaaatcatttaatccataattttttgtagtagaaataaaacattgcgggtattagccattttatttatcataattttttatttttatcctaaaaatgcttcactaaattttgaatgaatgcgaaaaccgcaatcattatttttctttgtttgtcaatgttttaattaattaattcttttaaatgttctttatatgtattttctttacttttataattttttcttgtcgaattgttcgttacattgtggactttcaaagtgctgatttgtaaagatatgtaactttataaattataataaaataattattttttatttttaatgattaaattattgaatttaattttccaataagttatacatggtttcaaatttaaaaaattaacccttttaaaaatacccgcaatatattcagcagtaaaaacatgaaacttttatattaaattgttaacttaatttagtttaattgaagaagaacataattacaaattgagacgaataaaaataagttttttatataatgaaatagaagattaattaaaaaattgactttaaaataaatatataaattatttggttatttttttttatttgataagaaaaataatatgaagttataatatatttacaattattgttttgtttttaccttttaattcaagaatttaaacattattattaaaatattcattattaattaaatataaacaataaataatgatttaaatatttcaaatttatcttttaaattgaaaacccttttatattcatattttaaacaagaaaattaatggaaataaatatacaatgaaaaatttcacatttattttacttaattaataataaatgaatcaaatatactcaaaatgcaacatctctg

SEQ ID NO: 12839 - DNA, 2229 bp, Heterodera glycines
caggaaatacaggtttttaaggcctgtacctgtacctgtattccaaaaatggcctgtaccagttttttctgtacaaaagtataggaaaatacaggtacaggaaaaatacatgttgctaaaatttgtctgtatctgtacctggctggatccgtaatttttaggaaaaataattataaatataatataagtaattaaattttaatatttaattgaaggatagtaaattaaattttttgtatatccatatagtagtcctcttcttatagcatcatttaattctttcataaagtttcggaagaccactttatgccaaatggaaaatctgaatatcccaaacattaaattggttttttgaatttacgaaataaatttgaaataaacaattttaattaaaaatataagaaatttcttcaaattagctaaaaaaataattcaagtaaataaaaataaattattattatttcaaaattatgtttttcactttttttttaccaaatgcttctgattaaacaataaaagttctcctttgtgatgcccgctatttttatattttttatagattttggtttttattttatcgaagattattaattttcaatatcaattttccaatggtttctgattttttctttttaattttattattaaagtggcaaaaattttgcgattttgagccaattttttaagtaaaacaatgatacatttcgctaaaatagttattatattattcctttttccaattcacgcaatataaataaataaattacttcgataacatttgcattaattttggtttttaatgctttttttatcacgtcttttaatattagctcggcttattttgagttaaattagattcttgtacattaaattattaggcatttagtaaattacttctctttgtttttctggttattctgtctcgttcaggggtgggtgaagctcggcttagcactcgaagccgaagccgaaggcgaagcccaatttttattcgaaggcgaagtccgaagctcgaagcccaaataaccccgaagttttcgaagccaaagtttttcaaaaaatttttttaattccaaaaattttttcatcacaaaatttcggttaaatatcaaattcaaccaattgacagaacacctagagaacaactaacccttttaataaaataaatatatgattttcttgatgaaaatgtatttagaaatttggaagttttataaattagtaaagcattgacggtttttgactcaattaggggtgcatttttcacactgaaaactcgatctttaggggtgttcccgaaacttcgggtaaattacccgaagccgaagcacgaaaattcgaagctcaaaaacccaaagttttcgaagccgaagtttcgcgcaccccctggtcgcgttgcgtgttacttatatttttgtcttttttattgttcaaaaattttatcaatattttattttcttgtggtgttaattattatgtatattgtttcaatttctttgtgaaattgaataattattagcattttttcgtttttgataaaaagattgttgaaaaatatttgattaaatgtgccgaaatttggtacataataatgggacacttcttatattattttataagttattttattttatcaaattttaatgataaattacgatttttcaaatataaactcgaagtcggatctccttttttaaaagtagcagtttggactatttaatttaatgatctttatttcgaataattttattattcttttcatgtgcacgtcagtaggagtgtcgtccttttatgatgtcagctgcattttctatattattagtctaaacatttcattttagtttcaaatatgctaatatttctgttttttttatcattttttaagattctaagcgaagtaattttaattaatgttttagtattttaattatacgatcatgattaattgtcaatattattaattgaattaaatgctaaattttaaaatatgtaattatttctcacgaataacttcagattattttattaattaataaatttatcatattttaatttgttaatttttttttcacttcttttcatataaaaaatttactttctttattaatcaaataaatgaataaaaataaataaaaaataataatttaaaactaaaaattaaaaaattaatagtatttatttttcatttattttcttcctggtgcttaattaaaaaaatttatttaaaaa

SEQ ID NO: 12840 - DNA, 3021 bp, Heterodera glycines
  unsure (1)..(3021): unsure at all n locations
ttactcgtcatgtaatgcttcttcagtgagaaatgattggtttttcattttgataaaaacatcatcacaataatctggtttctttttcttcattttgtcccaaacagcgattttgtaacgccccgggggaattacctggagaaaaaaaatggaattttttaattaattttcattttttatggttacgaccgtcgccgcgaaaaaaccttttaatagaatttcacaaaatttgaatttttggaaaatttgggtgaaggaaaccttgaagggggcacaaataaggaaaatcgaaaatttttggtactaaataatagaaagggactactcaaaattaaaattttctcaaactttcgcgctgcaagccataaatttgtaaatttgtgtttggtttatttgtattttagctcacctttccgattcgtttgtcatttttgctcactatcacaacattactctcgagcaatgaattcgaaaagagcccaaaagcaattgccaataattgaagcaaataaatcatggtaaaaaattttcaaattctctaaaaataatttagccgtaaattttattttattttttaaattacggtacctccccgacccacaacacactttcgggtaaaaagtcgagagtgagccggggaaggtcgggatttcgtttttcaagaacaactcaattttatatatttatattttattttgccatgccaatgtaagtccttatttctaagattgttattatttttcgagggtttgacaaagttcaaaaaagaaatttgacccaattcatacaacttacaataaattggggaatgcttcaagttttgaatgaaattattttcacactattttaaatcataccactttaccaggaaattaagctcagaaaatttattatattttgtcaaaataaattttatattaattttattgaaaggggtttaatatagaaaagtaaaaatattataattttaatattaattctaatgcgaaaaactaatattatacattttttataaaaattataatataaaaatgaaattttattcgctattgttgaagaaaaaaaaaatttataaaatcgataacaatgcattttaactcatattttcaattataatattattcatcttttttcatcatacaatatatatacagatgaaatcgtaaaattgcaaataaaattgtaaaaatatgtataaaaaaaaatttggcaatttatgggtaaaatttctcagagagtgtatgatttttagagaacttacaaatttttacaaaatcatcgtgaaattagctaagtaaaattttttgtgaaattttcaactgtcttttaatgtcaggggccactttaatagagatatccattcaataatttgggatcccatgcggtacggcggattatggaaatttttgaaaattaaataaatatcggagtattaaatgttttttttgaaaattagtataaaaccaaaagtaaattcaattttcaaataaaactttccataaaaacaaaaaaaatgattgctttacggcaaatacataatttttagccgagctttttcagtaataattttttcaatgggaaggggtcgcgcgggaaaattcgattgtgcctaaatgagaatttttaatatatttgtgacaatttcttttaaaaattaaaggagatttatattttaaatattttttaaatgtattggttttaaacctttttaattttcattttttaattttcttttattaatttgctgggataactttgagaaatttttttttaatccttaatttccttaacattttatcaaatgtatagctagtaaattcagctcaactaataatctcccccattccaccacacccttttcgggaaaaagacgagagtgagtcggggaatgtcgggatttagttttcaagaacaaacaatttaagaaaaggcaaagaattatgcttatgcagattcttttttgctattattgatattttgtattttcttattgccaatcttcaataaggaaaatatatttcattattattttatttatttttttaacatttcattattaatatttatataagccccgacatattttggggaattatgaaagtcgtaaagtgcacttgaaataagatggaatccccgttccccgacattttgctccccgagggtcggggcttaaccctactagaaatcactattttggagattcgtcactaaaatagtgaaaattcactattttggcgttttgtcactatttcaacattttttggaaaattccttaataaaaatgcaataaaaccaaaaaatacacccctaagaatcggccaaaaatttttttttaaataaccactaagaattggaaaattttttcaaaaattcttcccccaaattttttttcttgacaaaatttttgatttaaaaaatgtcaatatttgctaagagaattttataaaggaaatgtagctcatttgcaactgcaatcagtgaataaaaattattttttgctcaatttttggctgaaaattatgtcactatttgtcactgttttgaaatttttctcactattttgtcactatttttgcatttttattcactattttagttaactatttcgagattttccatcactaaaagttgcggccctactaatcaataattccataattcaaattgattgacctattgcaattcattcacttcacttccgctgctgaccacttgggccgggagttgtgtcgagaagtctaaaaatcgaaaaagaaaagcaataaatttgggttttcgcttaagcattcgcttacccatatcttagggctcggatttatccatattttagatgttcgcccttaaaataagtttttgctcttattttggcattttgtccaaaatttattaacaaaaattcaataaaaaccgaaaaatacactcctaagaatcggcacaaaaaatttcggaaaaatatacccctaagaatcgacnccaattttttaaaaatagacccataagaaatgaaaaatttctcaaaaa

SEQ ID NO: 12841 - DNA, 1427 bp, Heterodera glycines
  unsure (1)..(1427): unsure at all n locations
attcgggtccggggttcgaaattagtcaaaatgaatgccagcttcgtgatcagcgacccagaataccccaaggaaatgtgttttactcggctttttttaaaacttttattttttagaaaaatggggggggggataaacttcagtattacccttaattttaatgctgtttaggctataaggtttgaaaaaaattcaatttagaatttccggcatttagactaaaaatggatgttcgaaaaatttgaattttcgactgtttgttcgagttcgaggctggttaaatggatgctggataaacaaattcaaaatagtcttaaattcattttccaatttcataattaaaattgatcggtcactttccaacaattcattcacaaacaatcctagaaataagctcattatttcagaaaatcactaagtcatcctaattgcataacacaaatccatgaattgatcactccaatacaaaaaagaatttatttaaatccataattcaaattgatcgatcacttcccaacaattcattcattcacttctgctgatcacttgagccgggagttgcatcaagaagtctaaaaatcgaaaaagaaaagcaataaatttggtttttcgtttaagcattcacagacccgtctccgatttcgtccacattaaatagaatttgattccactgatcaaaacattcccagccaatcgcttcctcttcccattttgcccatttgctcgcatcacgcacaattggacaacggaccaacacaaaacagtcgtcacttttgtcagtttctttaaatgccaattgttcacgggtcaattcgttggtcaacacaaatggcacaacagggtcagcaaaagacgaaggaataaaacacatgacgacaatgaaattgacgggagatgaagccgaggcaaaagcctaaaaatgtggaaaaattggttaataaatatgaaaatgaatgacacttttcggttgggagggggacatgaaaaaccaaaaggtttacaacttttatggttgaagtggccaattctgttagagccaaaaaaaacaacgaaaagccaaaaaaaaaaatcattgaaaatcaccgctttgaaggcttcaatcttcgacgccaaattctcgtcatccatgtccaacgtgcagatcaacacctttggcacagcgttttgaagtggagtgaaaagccacttaaccaccgcttgtccatccgatgtgatggcactgtcatcaaatggaaattcggcgaaaatgtcgtcaaaaatgaaagagacaatgcgaagtgatggacattcgttgagaaatgatgggacgaatttatgcaaagggctgaaaacattctcaaacaaaaacatcccacaaatgtttttcgcgatcattgggccaatggtgcgcagaatgaaggccaaaattncggtgtttggtcgtgcag

SEQ ID NO: 12842 - DNA, 1506 bp, Heterodera glycines
  unsure (1)..(1506): unsure at all n locations
aattaatacccgcaggccatttaaattagagagagcgaagagagagaaagcaagaaaaagaaagagagagaaagatgggttagagagagaaaaaatggttgaaacggaaagtaagacaggaaaatagcgagtgagatagagccaaatagagagcatgaggactaagggagagaatataaatgcaaatacggtaaaccctatcgtaattacggatattcaaattgaagaatcgtcgttaaatacggcaggaaacggggtacaaattgttcagatcagtgagaatccattagaaaacaatggaagtcaaaaattgaattatattatggtgaataactcaaagggtactatgggtcaaataaacctctcggcaaatttggagacgataaattggaccgaaattcatcgtctgtttcctccccctaaaattgcattgaaggcaccacagcctgaggaaatgactctgagccaacaaccgtcaacgtcaaatggtgttgctgaagagagtctcccgagttgctcaacgattggaatttgcaaaaatgggaaggcatttcgcatctgggataatcgcggtcgtccagtcggcattgttagtccgtctttcaccgactcgcaccgaagaccaacaccttacttccgcccacggcaactccagccggtcccgcaacaaccgcaacaacagcagcacaaccagcaacaaaaaaatattttttataagataaatttattcttatgatcattttttgttaaatgtcattatttatataattaaatttaaaatagaaataatagtcaaataattatcagttttaactatagatcaaaaagatgtaaatctcaagagagtataaattaattatatttatattattttcacggcacaatgaaaaatagcatacggaacttaaaagtcaaattttaaacataattgtataggaaattagccagcgatcagccaaattatcttaatttaaaatgaatttgctccttactgaaaaatgaagttatttgctaatttattatttaaaaaacttaagaaggatttgcacgaatttaggaaaataaacttaaatattttttataaggataatttaatatagaataataaaatcaaataattgaaatttacaaactataataaaattagcatatataactattaaaatatatttatatttcattaaaaatattgattgaatgaaatactatttattaaatcattaaaaagtacaattaagtaaaataatcagaaaaattaacgacttttgttcaaaaaaaatggaaatatttaaaaaaagataaaatataattatgttaatttaagttctttttttanattgtaaaaaagatttaaaaaatctaattaatccttaatctgactataatttattaaaaataatctttttttaatgactaacacgccgatcaactgctttataanatgaaaaaaattgaataaattaatttcgtaaatattaattaaataaaaatatataaattactttt

SEQ ID NO: 12843 - DNA, 1661 bp, Heterodera glycines
  unsure (1)..(1661): unsure at all n locations
atcaaagaaaaaatatttaatttaaaatgaataaatattgtatttaataatttaatcaatttgaaatccatattaacttaatacattattattttttctaaaatattatagttgtttttatttcatttaaatatcatattttttacaattttcaattttattataaaataaaaatatatttaatatatgtgttagtgtaaaattttaagagattgtttatacatttcttgaatgctacagtaagattttaaaaactaaatattggtattataatatccaacgctacagcctcgctcttttattgatacttaaccatttttaacaaggtaaaaaattaaaaaattcgattttaagctttgtcagaaaagcgcaaacagaaacgcattgcaatcagtggtgtgcaaaatctgcgcatgaaattcttttaaatcaaaaaattcaccaccgatgcctatcggaatcgcccgactcttttactttaagactttataaaaattactagagctacatcagcttttccacctactaggatcttcattatcttagtttgaggatacatttaaaaactttatgtttcttaattgtggattaaattagttcaaaaaaatttcgtgtttttcatttacttcgtacgaaaacgattattttttgttttcgtatttcgttttcgtccaagaaaaaattttcgtttttattttcgagttttaattcttgtttctttttcgtaaaaaataaatattttcgctttgtttcgttttcgaaaattatttttttggttttcgcacacccctgattgcaatgtcgtgagaattaaattatatagaagcagataaaagagaaaataaacaaataaaatttataaaagtcattaaattcggaatgaaacccataaatttaaaaggatatgaaatatgacaaataaaatagatttcaaataacaaataaaaattgaattttatttataatattcttgaaaataattttagaatgtcagttaaaggcattttcgaataatttaaaaattaaacgataaaaaactattaacatgcgaaatacaatgtcaaacaaatgtataataatgaattaaatggaaggacaaattatagtaacttaattaaattaagttttaaataaaatcagcgattggaagataattttaatatttttcatgaatttgcattcattatattaatttttttagatatttcaatttatttttatatgttttctatttttacattcataataatcttataatactattcgtaattgattttttaaattattttacttgaaatttaaataaatttaaacaaatataaaagatacaaaaattcacagaatttataaagtaaaacaaatatcaaactaataaataacaacgaaaacttactacatatgaaaatggccaccttcgcaatggaaaatttcctggctgaacaagcaatagattttgaaaaataaacaagtaaagagtaagcattaacaattttttacagctaaaaaccgttaatattatatcataaaaaatacaacacaataaaattaaatgaatgaaaaaaggtgaaaaaaatttgaaacccaaacataaattagaaaagaattaattagcaaaaaagtcttgaattacattttgtaaataaaacaccaaaantataaaa

SEQ ID NO: 12844 - DNA, 717 bp, Heterodera glycines
tgtaactgatccatgggccgagatttttgaaatcttatggtcggaattcggagattagccccctcctcttgatattaactgattagctaatataattgtagaacctaatccgaagttttgattcgatctgctgttgatcttgtgatctatataatagcatttttggtataactctctctgttcaattataaaaatgtactattgactgattgatcaattgattgatcccttttttctctgatcagatggcatggtccattggacgacgaaggtgtcaaacggtgccaaagatggctctggtggagcagcaaagaacatcggcgatgtcgcttgggacaccaaccagtacttctctcagccccagtcggccgacgttgagatgagcgcgtacgtttgagtccccgcgggaacgaccttttttgagagagagcgagagggagagagatagatagagagagggagagagatagagagagaaagagagggagagagagagtgagagagtctctcgtactcaatttgtcggctttcaaatttttcatttaaaaaattgccaaaaaagaaaatgccacttttgtttacagttatgccttgctcacatacatgctgctggacaacaaagagcatgcgctgcccattgtccgttggctgaccgcgcagcgcaattccctgggcggcttttcatccacgcaggtgggaatttgttcaaaattcaaa

SEQ ID NO: 12845 - DNA, 2350 bp, Heterodera glycines
  unsure (1)..(2350): unsure at all n locations
catgaatcgtgattaattaggcaatgattccgatcaatttatttctaaagattntattgttgacgtatgccccgcccccttttcagatcatcttggtacccgtggttgggcgttggcggcaaagatgcaagcaccgtatttgatgtaaacaagcgccacaattaaccctactgaaagctcccaactttttagtttacccgcgtgatgcagacccgcgcagtgagcacggaggggcgtgaccagcaggttcgagcagaggttgccgaaaaatacatccaactgctcgagaaaatggggcatagtgagaaggctttgatggacaaatgggacgcaaaagaaacggcacagaacgaacgctggaatttatttgtctctacacagagcgaccgctggactgcatttgtctctgcacagagcgaccgctggacttcattcgtctattttataacgggcctttttgtttccatgtttgtggggttcgcgggcctttattattctatgttgtctgagtttggcgaagtgaagcagctaatcagcgcaaagcagtagagaatggaatcatcggatgacgcgggcaatttgacttgacaccattttttctcattgattctcattttttttaaataaatgtatttgttctaagcataaagacataaattctctattactcattattttattatcaatgaatacgctatacttgtgaaaatatttataccatttcaaatttatagttttggaaatctaagaaaactggtttgagagattttgttgctcgttattcattatgcgttcgtccacttacactttcttgggctttgaacaatagttaaatttgattagcattttgttgtaaaatattttcattttgctagaaaatttctgttttctcttcatttttgcattatgactattatgatggcataccatttaagttcggtcctctttttgccacggttacttttgctttccaaattcacaccatcatcagtggccaccgaattgacatttgaattgcccgacaatgcaaagtgcccaaaagcggtacgatttaaaaaatttcatggctgggatttccaagtttttttcggagattgcaacagaatttaagggtttaaatccattacgatttttaaatacttttcatcaaagagatgttttatttgcttttttcgaaaaaatttttttagcggaaaattgaatcaattttgcaaacttttcgaactcataacttttgtttacgataggcatcgaatggaatttgaaattatttgtaaatgttatcatccccaaattttgccttgcgtttctctcgccaccacggacgtcaaatttttaattaggaatttcgtaaaaaaaaaaaattttttttcacatcgccaattttttgggggatttgttataaattaatatttatttattgttttacattttttgttcccctgtttttaagaattgttgacgattatcagacgcaccatcggctacgcgaggcgatctcgcgcaagcgggcggaagatttgaatgagcgcgtcacttactggtcactgggccaaaccgctgttgtactgctgatcggtgttggacaggcgagttttgcttgtttgagaggcccggaattatgaggaaaagagattaggcgggcttggttttttctgacggtttttttacggcgaagcccgagcctcgggccgaacaaattttgataaaaaatactggaaccggtgctttttcaccactccttcgcctctccctaaaaatgggtagtttttttgaatgtacttcctttccagtattttttttttgaaatcatccaaaaatttattttgctggcttccctggctatatgccataaacctccgttcaaaaaaaaaaaaaaatttttttttcaaagtggtcctgctgattgtgaggtcgttcttcgccgacagaaaaccgcccggtggctattgagaaaactcaaaaatgtctctgtaatttattaccgttttatttttgatgggagagaataagtcactttatttgaggggccagaaatttcgaatttctgcaacttttctgttgaaaatctgaaaattggccggttaaggaataaaacattcgaattttccaaatttctaattactaagacacgttttctcactatatttttgcaccgtttgatccgaatgttattaatatttgttttcgcaggtggtcattggtggccaatatgatgttgatgttgtgttagaggatccgaatggcaaagtgttgtacaaggaggccaggaaacagttggacacccacacgtacaaagtgagtgacgatggcaccggtgaaatcgaatgccaagggtttatttttcata

SEQ ID NO: 12846 - DNA, 1604 bp, Heterodera glycines
aaaaaaaaaacttacctgtggggccacgtgcggcaccacaagcgcgttggggcctccgaccccaacgcggaaccagcagcccaggcgctggaagcgggcgcgcgcaacgcagttaatgaaccaataggcgctcccgacggatagggaggccaacacatgcgcatacgcttgccagccagaagcctccactcggtgtccatcacccgtgcgcagaacgcagttggtgacaggaagcgggccagctgttgtctgttgtgccgcacggtgctcaactgacacgacgatcaggcacaatggcctgaaaactttgtattatgtttttaaaattaataaaaatgagctaacgggagcagctgccccacttctgcaacacaaccattcaaaaaatgttggttgtgcgtaccatcagcattgaaagggtgctgaaattttaatttaaaaaaataaaaagcatgacgaaaaagaaacaccggaatttgctgttcagccgcattgatgagcattggttgaaccaaatgagcaacctgaaataataaattattaatattttatttatttattttttaattatgacttggccaaggggcggcatttgcccgaaacccgttggtagctgttgagtcattacaataaaatacaatttatttatttttttcgctgtaaaaaaaaaaaaaaaaaaatcaatataatagaataattgcggaacaaagttttttcattgtttggcttttcgtttacttttttttcgcctgctatttatttttccatggcttttcgcttttcgtttcatcggctttttcttttcttttcttagctttaaaatttatttttcaatgtttttcatttccttttttccatactcgcactgctttccttttttttttttttattctataaaatctatttttattttatttttttttattgcttggcttttcgttttctttttaaaactcgggtgggggcttttcttttcttagcttaaaatttatttttcattttcatgatttttcgtttgcttttcgtttattagcttataaaagttctttttgattttcatgacttttcgttttctttttaaaactcgagggcttttcttttcttagcttaaaatttcttttttttttcatgccttttcgttttatagcttggcttttcgtttttttcctgattttcttttcttttttgtttttcatggcttttccttttctttttaaaactaaagggcttttctattctgagcttaaaatttctttttgggttttcatgccttttcgttttatagcttggcttttcgttttttttcctgattttcttttcttttttgtttttcatggcttttcctttactttttaaaactaaagggcatttctattctgagcttaaaatttctttttgggttttcatgccttttcgttttatagcttggcttttcgtttttttttttttcctgattttttttttttttttcatggcttttcgttttatagcttggcttttcgttttttttttttcctgattttcttttcttttttgtttttcatggcttttccttttctttgggaggactaaagggcttttctattctgagcttaaaatttctt

SEQ ID NO: 12847 - DNA, 2653 bp, Heterodera glycines
ttgaattcaaatttcacaggccgtcaatccattaccccctaagctgaacggcgaaagaatttcgcctcaggcacaactttgagcggtaaattcccgacgccccgcccactcgcgcaccccgagacttgcgcagcaaaactcgcgcaccccttgtccgattgacaccaaatttaaggggcaatcaatccaccaccccctaagctgaacaacaaagaatttcgcctcaggcaccatttcgagcggtactttcccgacgcaccgccccctcgcgcacccctaccccatgcgcagcaaaactcgcgcaccccttgtccgattgacttcaaattttacgggcagtcaaaccacgacctcctaagctgaacagcgaaagaatttcgcctcaggcaccattttgagctgtactttcccgacgcaccgccccctcgcgcaccccgagacttgcgcagcaaaacacgcgcaccccttgtccgattgacaccaaatttaaggggcaatcaatccaccaccccctaagctgaacaacaaagaatttcgcctcaggcaccatttcgagcagtactttccagacgcaccgccccctcgcgcacccctaccccatgcgcagcaaaagtcgcgcaccccttgtccgattgacttcaaattttacgggcagtcaaaccacgacctcctaagctgaacatcgaaagaatttcgcctcaggcaccattttgagctgtactttcccgacgcaccgccccctcgcgcaccccgagacttgcgcagcaaaactcgcgcacccttgaccgattgacttcaaattttacgagccgtcaactcacacccccttaagctgaacggcgaaagaatttcgcctctagcacaattttgagcagtacattcccgacgccccgcccactcgcgcaccccgagacttgcgcagcaaaactgtggtggtaagaggaagttcacgccgttgaagaggaggtccgcggcgatggcgagagggggtccacgccgacggactgcaaaatgatgggggggggggggggtccgcggcagtggaaagacggggtccttgggagacaggggtccgcgccgacggacggcggaatggtggggagggtccgcatcagtggaaagaagtagagggggtccgcgccgcccggacggttgacagcggggaggggtccgcggcgacggagagagggggtccgcggaagagagggggcccgatccgacggagagagggggtccgcggcgatggtgagagggagtccgtggaaaagagggggtccgcggaagagagggggtccgcgctgcccaacgaaatggcggaggcgaccagcggggaggcggccgagctatttaacgcaaaatatcacgaccccgcccattcaaccggtggccgactggttaacgcgtcggcccaccaccatctcgggttcaatcccgcgcggcgaaactcccgcgcatttaacacccacagcccaaaatctcgcgcaaaccccatcccacacccccaaatcccgatcccacaccgtcccgcgcaccaaccaccatcccgaacacacatttcccgacgcatcccccaccccctccccgcgcaccacagggcagagaaccaccccataggcacgggacccccagctcatcctctctgcgctcagcggagaaaatcaatcgataatcaaagtgggcaccttatgtagtattgaaaaatgtccgaaatttggttctgccgttgtttcaggtggaatgtcccaacgtttgctggacgaaacaggacggccaaacagtctaaaacagctttttttcctaatgataaccaacaatgttggatttggtaggaaagcaaaaaaaactcacgcaatatgttcatttcttgtaagaacaacttgttctttttttctgagtagcctttttgaacactaaattttttgtaaaaaaccaaaattatggcctagacaattattaaaacttactcgctcaattttatcgtggttttgcttttcatcgaagagtgttagtagttcgcgtttgacgcgatctgacaatttgtgtgccttttgttcgatgtcgtccattaatgttttgttggatttaggcaaaaaatcagaggtgtgctgatttgcgtcatatgcccatttttgcttttttaatacatcgaacacataaatctaaatttaaaatttctaatcattgcattaggtgttgacctttttaccaaaatcatgctcatttcatgcgcaattcttttatctgattctaaggcattcgggtcttaaaaatcgaataatccgcgacatgttcgggggggggctatatccctctgctcactcgtcgtgtgatgttggaaatatatgtccgcctatttagcttctcgtcgtaccagtgcttttctagcttgaaaaatgtccgaaatttggttctgccgttgtttcaggtggaatgtcccaacgtttgctggacgaaacaggacggccaaacagtctaaaacagcttttttcttaatgataaccaacaatgttggatttggtaggaaagcaaaaaaaactcacgcaataagttcatttcttgtaagaacaacttgttcttttttctgagtagcctttttgaacactaaatttttaaaaaaaaccaaaattatggcctagacaattattaaaactta

SEQ ID NO: 12848 - DNA, 2150 bp, Heterodera glycines
tcgaagcgggtcagttccgtctggccagttccgtctcgccagttccgtctggggccggttccgtctcgggccagttccgtctggccagttccgtctggccagttccgtctcgccagttccgtctggggccggttccgtctcgggccagttccgtctggccagttccgtctggccagttccgtctcgccagttccgtctggggccggttccgtctcgggccagttccgtctggccagttccgtctggccagttccgtctggccagttccgtctcgccagttccgtcttagtagtaaaagagccggttccgtctcaaatatttttggacccaaatttttttaaatttcagaatgtaaacagaaagttgagatataattaacagtgctgccaaaaatatgcacgaaaagtagccaaaatatgcatatgcacaaaagtctcgaaatatgcaaaatatgcaaataaaaataccgatttttctacgcaaacacaaaaaagaacgtgtttttcctattatttatagcatggaaaaggcaggaaaaaaatacatttgcatgtttttggcagccctgatatttaatatgcctaatatttttgggtgttaaaaactaaaaactgccaaaatatttaggttttcggttctaaaaacctcaaaataggtgttaaagtttcaatttaggggtataaaataacaaaatttttgaggaaatttttcatttctcaggggtgtatttttgaaaattagacgaaatttatgtaaattaatctttatattcgggttcggggtccaaaatgggtgccggattcgctgcaaacaaagtgctggacacatttttttgggtttttaatgtatattctagcaattttagtgcgtattgcatatttggaatgtttaggaacatataacactatccctatttattattgatataattagccaaaaaagttttctcgaaaatcctccgccgtcgcttttccttcgccgcgacgccatttcagcaccaattgattgggactgaattatgtgaaggtcagcaaagcacacacagcaaaacttgaggaggcggaggagcattggcgccggagacggcgctcgtcgatcgatggcccctcggggcccgtaccaaaagaacgaggtaatgatttttacaaattaaataaatatgatggccattaattccctaaggctattcattcattagagcctccgagcattattcctcgggctaaatgaaattttcttcaataaatatatttcataaattgacagtcattgaaaaattaatatatataaataaaattacattttttcgataatatttatttattttttaaatcgaacatcattttttgctaattggtcgtttttcatcaaattaccgtgggagtttttttctaataagcaaataaattttccattcttgattctgttcgataaaggaacagctattttgtgagcttttgtggttacaacttattttatttgaaacttatccatttttaaaattatacatgctaataaataacacttaaaagccaacgaatgatttgaaagatttggttgcttttgagcaaatttgtctactaaaaataatttttttccaaatctggtacatttagccaagaaaatgtgcccaattctcgtcctataattcttgatatcataagctaaaccacttggcttgattattagcatgaaaattatttaatttggtgtgtttaagaaaagttatgaagagtttttttcggtaaacctgcaaattggcacttttatgaaacgcccatagtggcattttttatgaaacgacctagcatcattttaataataaaattttttaaaataatttattctacctaaaccgacaattcacatttcgctctcccccccccccccccctaaaattgggacacgaagagagtgcgctgcagtttcaattgtcgcgcaccctctgtcgtcagcagttcctccttgtccgccctcttctgactgtcggcggcgggcgatcggtcacgcatttcccattaaataattgactgacgaatgactgaccgattaatgttgatggctgacctgttttgatcggatggatttgttctcacatccactcgagacgaccttgtgcccacactttttcagcatattccttctacggg

SEQ ID NO: 12849 - DNA, 2042 bp, Heterodera glycines
  unsure (1)..(2042): unsure at all n locations
ttttcaaaaatccccagttccaattttcttgaaaaataaaattttcatatttgaaaatacaaattttactatcactgtaacaaaaattaaaatgtcattcgtagctctaagtgtttatgtnggtctacataataaaaanaattnaatcgataataaagtgntaaccaaattagtttttaataatttgaattttgggtcgtcttttttatttttttatttccattcaaagctttcgaatgatattaataaataaattgaattttttcttgggaaatgcttattttttctcctttattttgtattacgtcaatgatcgttcagccgagtttcttagatttgcatgggaatagaaaaacaaaaatacatttttatttaaatataaaaaatttagcaaatatttgaatttaataaatttgtgtttgaagctttagttttttaattgatacaaattttgaaatttttaaggaaaaattttttcatgaaatgtttacagtgactaaattatcattcaccaaatcattcatgatctaacgagaaatcttctatattagctgtaatattttaatttttttttttgcaaagttaaagaaattataacaagaaattatttttttatttcagttattttattattaaattagaaaacttaagcttttgagcaaatacaaaaaatagaaaattgttttttttgccgaaattgtaattttattttttcattttcttccacttggcgcatttaagaatttttaaattaaattaaaaagatttaaattttataattaatcagcgctatgtttttgcgtctgaactgcttggccgccattctgtttgcactgtgctgcacctctagcactttttggctcggttccgctactactgatgaacagaacaaagcgccacatgttgaccaccataagctgaccgaaacacaacaatatgaagtgggtaaaactaacaaatgtcgccaattaattgagacaattagcgatgctcgagagtgcgttcgagtcgagagattcaatttaatagcttttgttttaatgaagttcttagcaaaatgcaaaaaaatattatttacataatattttatgattgattcgcaaaaattttaattttaaagagcggcaaggaaaccgacccgaagcatgaccacgagcagttccttggcaaggacgaggccaggcagtatgaggagttgacgccggagaagagcaaagaacgactcgcgtaattttcgaaaattttatttaaaaaatattttaaatattttacagaagattagtgccaaaaatggacctaaactcggacggtcaagtggatgagttggaactacgggagcacatcaatttcatgcagaaacgttatgtggtgcgtaattagttgaggggatttaaatatatttttttaacttagccgaaagctttttaatttttattttgaaaatttgggtttataattttttattttaagtaatttcgctgaaatttttaattttaaatttttgaattttcacattttatatttctcattatccctcatttggtttttttgagatttttttaagctttttttgacaattttgacggccttcgatgttttacttatcttttgatcgattttctatgcttcggttcactataaatttcgttttttttaattttttcaatttattttcttatactggctaatccttaaaaatataatggtttatttttgcagaacaacgatgttgagcggacatggaaaaattacaaggaggagcagctgaaggacggcttgctcgattggcaaagactacaggtgaagaaaatctaaacagagggggaaaagggtggaaattctaaaaaaatttaaggaatttgatttacggaaaaccacaggagggccaggagatttcaccggaatacgtcaaaatgattgagcgagacgaacttcggtggaaggtcagaaacagacctaattctgctaatttatattagatccgagaagctaacggccaaatttttatatttttaaatgctttacatacagtaaactcaaaa

SEQ ID NO: 12850 - DNA, 1117 bp, Heterodera glycines
ccgatttagagcagaatcagcgcatttccttcttcaaacaagtcaccttccaaatcggctttcttatccttttcttttaaatgcttttgtttagaacaaaaaacaatttccgatgtttccctaccaagaggagaagtcgcgggtttgtctcaaaattgatcaaccgtcaaaatgattgatcatttccattcagtgggacgattacggtgaaatcattcgtccggaggaatatataattgtcgattccgccgctgcgactcagcaattagcgacggtgacgaaagagaaggacaccgcaggcgatgaggaggagggcgaggagcagcgaagggtggcggtggaggaatggccaaccaaatgcatttcgtacatcgccaaaatagaggcaacatttgagtgattaattaactcactgatttcatgtgattgctctgtcgcttttagattttgtgcaaagtcgaattcatcgacttcgaagggcgttcagacggcgaatccatcaaaaagcttctgagtcaaattaagcccaagcaattggtaattggttgcccattttcttgtcaattcttcctctgacaatgagacagcgcttaattttgttaggtcatcgtccatggcacggccgccgccacgcgtcatttggcacaatattgccaaggacagcaaattgtgcaggtgtgttgggtccatcgcgttaatttgttttgcaatttgattttacaaatttattttaggggaaaactttcaccccgtcacttggcgaagtgattgatgccacaattgagtcgcatattttccaagtgacactttccgaccaactgatgtcctctctgctttttcaaacggtgcattaatttttaacttttttttttttaaatacggtaccacaggtgaaagaggctgagctcagttggttggatgctcgcatcattcgcaaatcggcgattgttccggtggccattgaccaaatgccgggagatgagagaagggatgagaaggaaagcgacgaattcactgatcacatgggggagaatcagcagaatgtggcggaaagcatgaaagagggggagggtgagaaagtgaccgacgaggcagtgaagacggaaggggaaacgga

SEQ ID NO: 12851 - DNA, 1559 bp, Heterodera glycines
atgcccaattgcccattgtttgatgcgaatgatcacttggattaggcataatgaatgccaagggcagtccatgaaggaattggaactgacaattagagagacaaattagcagcaaaaatcagtcgaacagaaattccaagaaagggtcgtaaatataattgttccttttttgaaatcgctgatcattggaatagggaatggactggactgactgcctttctttgctgtgatcgttacgctttatcgcttattttttcacccctttttaatggatctcgtttcccataaattttccgttatttattgttattatattatttgttaaaacgcttttgcgggttgacgaggcgatcgtttgcgatatctttcacatcccccatttttttgcttcgaaaaacaaattgcgtgctctctcattctgctgttgtttgttgtcgcccttctcttttcacgcttgctaatcaaatttgaaggagttccgtccaattcacgcgctttcattgcgtgaacacccccaccctttcagcgtcaacgtcatgtccatttggttaactaaccacctgctgctgaccatccatccccctcctccccttcctttatccaatctaagagccttcttccgtgtctccaaagtttctgctgtcggcggtttatgatgagctagagaggctgcatttcgtcaaataatgatatttcggacgtttggaagggaaagggacgaaaattccttctcacgggaaaatgatggggcgataggagcagaaataataataagacgaaagaatggacagcagcagcagggcgtgggatgaggggagagcgggaaaggcagagggaagggaggcgcattttgagtgtcagtcggccttttgctgccggcacttccaaggcggaagtcattcctccccccccccattcatgagtccattcttcgcacttccaaattttgcgtttcctcagcaaatccggccaaatatctttacgcttaatctattcgcaatggcacgtcatttcattcactcattcaaaaatcggcaacacatttgtcaggtagccattggatacgcaaaatgtgaggggagggtttgttttgtgctagggagtggacagaagcggaggacgcaacggggggggggggattattggcacactcacaaaagggtggcggagaattcgagcggtgtcgctggtcagctcccaacgacggaaaggaagtgcgtttccgcctcttcgccaatgcactgtcatctccgatggtggtggtctgtccgttcgtcttccgcatgttcatcatcattcccaccatcctctttcccttcctcttcccctcccttgttcaatttcctcttcccctcccctccttctcctctccaaccttcgcagccgccggttgttcgtctcgttcttcttcaacttcatgcgcttctgcccttccgtctgtttgtccaacgcattcgtttcgctaataattctcataatctaatgcgcttttcttccccacattcccccgctttcctttctttcttttcccctcctcttccgtctctctctctctctgc

SEQ ID NO: 12852 - DNA, 1578 bp, Heterodera glycines
  unsure (1)..(1578): unsure at all n locations
aaaatgcaaatggagctgagggggaacagggccggaagcagcataggcaaaagcggatgaggacgacgaagacggcgactgcaaatgccatcggcagaaaaaggcacgtcatgaaaaaaggtgggcgaaggaggcacggcacaacggcaaacaaagtgccatcctcgggggggggggggcgactgccannaacatagggatgactaatcgttgggaatttgtttttccaaaatgccaattccaaatccaatgtaaagtgattaaaattgcagcattggccctttctttgccatgtgtccccaaattcattcccccggggacccaattccgttaattgaatgtgccgatgcgatgccacgcgtcggcattctccgaatcggacccaacagtaaaacaaatgcactcactctctgctgccccatggatatttatgtaattattttcaattcttttttgccattttcccttccttttgaaattcctccacaaaatttgactgttccaaatacattccttcaatttcgatgttttgagaagtttgctgattgttgtgagacaatggcagttgaattttggttttgaggggacaaagcgaaatgatccgaggaaaaaaagagggggaaaaacactcgacggacgacggggagaggggggggggggcagctgaaaagccaaaaggggccaaagagaacaaaccaaggccaaagcaccaaaattaagccattcattccctttgtttcctttgtgaatttaccatttctctccgattattaattattttttatttttaaattaattccattttattttcatattatttttaatttttgtcaattttcttcgaatgtttctccaattccccctcaattctgttcacgatgactccgtcattattgactttgaatttgtgcgttttcccaatcgccactccaactttttgtcagtcagaggtaaattttaaaaaacatttaaataactggattattactaactttggccactttttttggcaattatatgatcgaaatagccgatctatggcatttttctcattatctctgagttttctttcctccgtcgatcaatgggtccctctcgcgcctccctccctccctccctcccctcaccctccttcctccctcttcccctctcttccctcgcctctgtctgttttcacggttgatgctgttgtccgtccctctccctgctgcaaactttgccttgattcgccttacttggaattaattgcggcgctcgttggggatttggatggggagagagggagggattggatcagcaaatcgctgaaatggatgagattggattggattgaattggttgggatcgcattttgggtgttccgtcccaccgaatgggcggggaaggaattgaggtgcaacacaatttggaggacatcttcaacagtccttcgcccgcagcagtttcgaaatgaatgcatgaatgaatgtgcgtggccttttcagaagaatttctcttttttggggggaatttggacaaatcacttcaattttgattaaaagcgaaaggataggcaaagtttccaaataaattctcgag

SEQ ID NO: 12853 - DNA, 3644 bp, Heterodera glycines
gggggggcaaatggacacgaagttggcggcgatcaccggtgatcagcactttggttaggcaggggagtggctttaccaagttgaggatctggacgtatggcgcctgtccagcttcatcgatgatcaaatgcgtcgtttccccaaacagtgccggcaattgctcacagaaggacaaagtggcgaagcacaggcggcgatttttgtgctcctgcacaattttggcaactgccatttcctgggccaggcgtgggttccgctcgcaggcgtccaggtaccgctccaccttgacgcggtcttggtccttctgtaggagttcctgaaagtcctgtgcctccaccgcggtggcgagcaggtggggggaaatccgctcaacttccttggcatatctcaacttacctgtgccggagaacaaggcaagcatcggctccacgtggtttccggcggccagtgcgtcctgcatctccagcaccagcttgacgacggcgacattcggcggggccagcgccaacacacgtgccgtgggatccgtggccaggacagttttacgatttaccaaaattctgcgaaactgaaaatgttaaaattaaactatttgccgatgatcttaaggcctatcatgttctttcaaatatttccttttctccactccaaaattttattaacaaatttaatcaatactgtaaattaaacggccttaaaatcgcttcaaataaatgtttaactttacatttaggacacaaaaaccaaaaaataaattattttattgatgactttccaattcctaaaaatcccggaaacgaaccatcagagagaggaccttggcatttattttactaatgatttgaaatgggcacaacatattgacattatctcgaaaaaagcattacgatctgctttcgctatactaaagtcaatcaaaactggtgatacgcaaatacttgtaaatttgtttaatatttattgcagaccaattttagaattcggatctccgattttcaatccttatttaaaaaggatatagaaaaactggagaatgtccaaaaaacttttttgagagtaatatttagacgtaacaattatgctgctgatttacctaattatgctgaattgttaaacatttatgatcaaaagtcgcttgagagtcgtagattaaaaatagacttaaaactttttcatgaaataattttaggtaaaataaatttacaaaataatgaatccttttctttttccaaaaacattgtaaaaaatgaattcactataagatagagcccggacaagagggtcggtcggtcggtttcggtataaaaaccgaaaccgaaaaataccgaaaaaaaccgaaaaaaaccgaaaaaaaaccgaccggtccgatctctactataagaacagcgtattgctcaaccaatgctagatacaattcgttctttattcgaacctctcgtctctatagacttttgcctaaagagacgagattactaaattctaatgagtttgccaaacttcttgaaagatctgatctgaatttgttgatttctttgccaccccagctccaaaagtgaccaattgtctgttttatttgatattgtttcattatttcttatttttagcattttaaaccagggctcggatcgaaaatttttcaaaataagaacatcaaggccaaaaaataagattttaggatcaaaaataagaacatttcgcaaaattgcttcaaatcagttattttacaatttattcgatcaaaaatgtatcaaatattatatgtttcaccacttcccatgatcatttttaacaatttaggggagaaaattagcaaatcataattttgtgtattcgggatcaaaaaaacagatttttaacaataaaattttttgtaatttcgttctgatttgtgaacagatttgcatcaaaaaggccaaaaattttgcgcaaatcttatatttgcttgataaaatagtgacattctgccataaaatttcaaaattatgaatatatttaagaaataagaacaaaataagaacaatagtccgaaataaggacaaatcttacaaataaggacagatccgagccctgttttaaacacaatcttttttttatttcgtcattttttattggaaccgagacattgtttttttaaaagcgcaaaaaaggttttggaaaaaacgcgcttcgaaaaaagccaacgatgatttacatggccggacgccttcgcaaaattggaaaattggccgctgaccccattttttgcaaaaaaaaatctgaattttggggtctaaatctaaattttagtgttctttatcctgaatttgaaaaataattaattataaaaaatgcccaaatattcagcaaattagcccatttgaaaacaaataatttgaaccaaaaagtaaataattctctcatcgaaaatgaggaaaatttgtaaaaaaaaacaacattttatgaaaatgccaaaaaataaatttgatcaaactcggacccaatcggcagagtttaacaaattcattcatccaaaagtcggacggataaagccaacaaaaattctttgctgataacaggaaaaaactgttcattgtttgccttgaaaaaggcacggaagttgtcaacattcaaatgcaaaaaataattctaaaagtggaaatttaattaaaatttattttttaaatttaaattttttaaataataatcactttcaaattgtcgagtccgaagcgttcaatcagaaggaaacggtcgatcagcggaatttccacgcaattgatcagatgcgtttcgcagcgcgacttcaacgaggccacctgaaagtgaagcggcggttttaatagaaataacaaattcattagcaaatttgggagcattaatggctaagtcaaaaagtgccaaatattatgatggattacgagaaatcacagaacggttcatttgtttcattcatataaaatattagagatttttacacaaataatataatatttaaattaaaatgatcagacaaagaaagaagatgtgataagtgatcagaggactcacctggaagtaatcagccaatttgagaagcatcagcacatttttggctaaaaaattgagaattcatattaaaaaaaaaattaaaaatcatattttctcccctcaggggttatagtagtaataaatacagtatcatggaattacggttgggcagaaaaggtccgcagatggcctccaaaaactgcttgaattggtccatgtccacgcccaactcgtccaaagtgatcattcgctgctgcttctccttcatctccacgctgagcatgcgactgatcaccggggaaacggacatcagccaatgggcggacacagcgatctgatcagctagattaattaacagtgctctgactgggatttactagttatccggacaaatttatcagtgatctaagcaagatttagagtgatcagaccaaaaatgatcagtatcaagaattgtcagcgatttgatcaggaattattaatataacctgtctaaatctagtctttggtctgatcaaattatcattgatctagtcaaagtttatcagtgatctgataaagtttggtcagttaaatggtcagtttttaaatccattgcgcttcttctgttgtttcacctgtttgtcaccaattttcac

SEQ ID NO: 12854 - DNA, 1466 bp, Heterodera glycines
atttttaatgcgatttgttaacagatttttgtcaaaaaataacaaaattttgcgcaaaccttatatttgcttgataaaatagtgacattctgccataaaatttcaaaattatgaatatatttaagaaataagaacaaaataagaacaatagtccgaaataaggacaaatcttacaaataaggacatttttattttgtcagatttagaccctccaaataaggacaaatcttataaataaggacagatccgagccctgttttaaacacaatcttttttttatttcgtcatcttttactggaaccgagacattgttttttaaaagagtcgtacaaacagatatgattgttgtcagggggcctttaataatgttgttgcactgcacacggcaaaacagacaacagcccaaagcaaacagcaaaacacaaaacaatgccgaagataatttattaattccaaataaaatagggcgaggacaatcaatagggataactgacgaccgcataaaactaacctaacacttcacaaaaatcacaaacaaaaatgaaacaaattaaataacaaaacgccaaatatattttaaaatcacaatattagcacaaaagcgcaaaaaaggttttggaaaaaacgcgcttcgaaaaaagccaacgatgatttacatggccggacgccttcgcaaaattggaaaattggccgctgacccccttttttgcaaaaaaaaatctgaattttggggtctaaatctaaattttagtgttctttatgctgaatttgaaaaataattaattataaaaaatgcccaaatattcagcaaattagcccatttgaaaacaaataattttaaccaaaaagtaaataattctctcatcgaaaatgaggaaaatttgtaaaaaaaaacaacattttatgaaaatgccaaaaaataaatttgatcaaagccggacccaatcggcagagttaaacaaattcattcatccaaaagtcggacggataaagccaacaaaaattctttgctgataacaggaaaaaactgttcattgtttgccttgaaaaaggcacggaagttgtcgatatccaaatgcaaaaagtaattctaaaaagtggaaatttaattaaaatttattttttaaatttaaattttttaaataataatcactttcaaattgtcaagtccgaagcgttcaatcagaaggaaacggtcgatcagcggaatttccacgcaattgatcagatgcgtttcgcagcgcgacttcaacgcggccacctcaaagcgaaacggcacttttattaggacaaaactcattagcattatggtggttaaatttaatatttaattaaaatgatcagacagggaaaagaggatgtgataagtgattagaggacccacctggaagtaatcagccaatttgagaagcatcagcacatttttggctaaaaaattgagaattcaaattaaaaaaaaaattaaa

SEQ ID NO: 12855 - DNA, 1621 bp, Heterodera glycines
tggcaatttaggcaaatgccattcaatttaatgcatttcatatgtttttgagacagttatagatatctctctctctctctctctctctatcttcatcccttttgattcattttctttttgttatcccccccccccttttttaaaaactttgtccctccattttttccaaattttctttgtttgcccccccccccccttttcaccggccaaagtgtcgtcgtcacttggcaaatatttgctgcatattatttttaatcgggacaaatttcattaataatacacatgttctgttgacacttgtctcgttttttgtttgtcatttatttgacctcttccgtccgccgatggccaaaaatgggtgaagtgaaagcgaatggaatgaatggaatggccggcgatgcgatgcatttcactcgccaccattcttttttctcgaatggatcagtcgtaccattcattcaacggcatcggcaaaatgtgtaatccaatacacacacgaaataggtacatcataggtgtacaactaatttctgctgctgtaccgggaaatgaggaaatcaatttaaaaaacggaacgtatacggtacaagttttatgggacacgaagtcggctaacgatgcgtaattcacgggacatggaaggtattcgagcgtaatgtctgtacataatatagcttttcacttgtaattatatcgggacaaggtccaattaaaccatggttatcgcccggtgtcttagatttaaatttttatttaaattctgtttactggaattatatttctataaatatggcatttctttcatctttctattttcactctcatcagtgacaatgctaattgcactttctttttgttggcatcctccataatttatccccccaccgctaatacattcgcttctgttctaattaccttcatcttgtgattattacaacacaaggttaaccacttttgtgtcatttttaaattgacaaattatgggttttattggaaaataaaaatatgtaaactgattttcccatgagataaaagtgagtgcaaacacaatccattaatcagaatcaattttaaaatagtgaaatgtgaaatcaaataataattaatcaaaatgtaaggtcaaaccaacgtaaataaaattaaatacgattaaaattgatttcaaaaatttcaaagtatttaaaaattttgatatttaatgtaaggaatttgtgaaattatatatttattttaaatgatttcttttctcctcttcaaatacattttttattttctttagattttcttccccatcttcggcagaatcctccagaacaacgctttcctcctccttggtggtttatgacggcacttttgtgcatttcgaatgcccaagtgggggcagtgatcagtggctggtggtcagtgcagtgagcgagatgagtctgatcgaatgccaggtgaaaaatggaagtgaaattaccttaaaatgatgaggaaatggtcggaagttcagaacgaaacaaactaagggggattacgaatatttttaatctcctcatccatttttgcagtatttaggggggtagtgatgctcgccgagatttgacccctagaccgaaaattttttctttcggggggg

SEQ ID NO: 12856 - DNA, 852 bp, Heterodera glycines
  unsure (1)..(852): unsure at all n locations
tgggcgaggaggaggaaaagcgggggacaatggcgacggcggaagcggggagggagcggaggggcggggggacgcgcacaaccgattggccaagtcactgcgcatcaaaccggagtgagtgacagatggaaatgaatgcttaatgaccgctctttttacattaattagctcagatacaattctaattttattcatttttgagcaatttatttatggtaaaattcaaaaaaataattgtcaaattaaaaaattttcaaatatttagactaaatttccctgatcataaatccaatgaaaaaatgtgagaacaaaaattaaatgtgtttcaaaaatggactaatctcctattcactcccaactgttcaaaatgatatttaacgcataatttttgaataaataatcattttaagttatttattaattgccacttaaaaggtatctcgagtttgtgcgcaaccacgcaatccgtggcggcaccggcgacattcgctttccgccgacggaagaagacgcgcgtgacgagcacgtgaaatggccccgtttcgtctcacgagtgggtcaatcggaacaaaaatcaaattaattttattttcgaaatgttttaagaattccgaaaatccgtggcggcgcgcgcgtccagcggcagcactttattcaacaaatgaagcacttcaaaaggaaccgccggaagaacggcacaccgacgacggcacaattaatggcaatgaaagcgatgatgaaatgaggaggaaaagcgaaaggacgaggcacaaaggcaattaattaattggccagatacattnncaaaatgagattganaaatttatttaaatttttaatttcttttcttta

SEQ ID NO: 12857 - DNA, 1939 bp, Heterodera glycines
  unsure (1)..(1939): unsure at all n locations
aaaaatgagatgaaaaaattatntaaaatttntaatttcttttctttattaggtccnccgcctttcgacgtttccgccggccatttcccattttcccaaaggaccaattgatttggacgacaagctcagcaacgagtatgaagaagctcattctgagcagactaagcattttgaccatagtatttgccgtccttttcttcaggctgcctttcctcacatctttttaaatcagagtttttcgatcattgtttttattgtttcttttttatattattattattattatttgtctcattttttattgtgtttttatttgtccgggtatctcacaatgcataaacatttttgaaagaatgaatatatacctgaaaattttgatatataaatccgcaaaaaattttaaattaaaaaattagtttttgctttttcaaatatttcatcaaactaaaacaactaaaattaaaacaaatgaaataaatattcaaaaattattttaaagatttatttcgttcaaaatttggaaaaaacatactctgatataacaacatctctgctgcttctgtttatgctttttgccatcattttcccattggccgcgctgcgtgccgcccccgggggttacaccttcgcccgacttttgcttattaacgtttttcatcaacagcagttgcactgctggccagcaaagaatggcaaggcgaatgaaatgcgaaattttagcagcacggcgaaaagcctaacaaaattggtggaagagcaaataatgtgaatttttcacatactaagcatttgcgctggttacaatcaattcattcattctctgaatgcgtgcgtttgtttgtacaaatgccatattgtttaatattatattaataataattattacttatttagaaaaattaataatataatcacaattttagcccccactttatttattttttttgccatgcaattaaatgccgtttccgtaatttctgctcttctgctggtggccattttggcactttcgccgccattttgtgacggagtgcgcgaagaagaaacgctgaagaaaaagtcgaagcggccgacaattggcaaatcgccaaatgcgtcgccaattaggaagccaaatgcgctgcaattggccgcaaagaaaggaaagcaaaaatttcatggccgagaagcactttcagttcaaggactctcttctttggctgctgaactatcacctccaacaccgaaaataactgataagacacttacaccagcgaatgcggcagcaaaacgatccgctctttcttcgctaccgtcactacttgaccgggctttgcaaccatcgagtttgggaaaaaaggcacttgatcaggcttttcaaccattgaatttgggagcatcaacatcttatcaggctttgcaaccatcatatgtgggagaacatgcacttgatctggcttttcaaccatcgaatttcggagcatcaacatctgatcagtcttttcaaccgaatttgggagaacatgcacgtgatctggcttttcaaccatcgaatttgggagcatcaacatctgatcagtcttttcaaccgaatttgggagaacatgcacgtgatctggcttttcaaccatcgaatttcggagcatcaacatctgatcggtcttttcaaccgaatttgggagaacatgcacgtgatctggcttttcaaccatcgaatttgggagcatcaacatctgatcagtcttttcaaccgaatttgggagaacatgcacgtgatctggcttttcaaccatcgaatttcggagcatcaacatctgatcagtcttttcaaccgaatttgggagaacatgcacgtgatctggctttacaaccatcgaatttgggagaatcaacagctaatcaagcttttcaacaattgaatatgagaaataggatacccattcaagctttgcaaccatca

SEQ ID NO: 12858 - DNA, 2011 bp, Heterodera glycines
tgatcaatcgcttcgatctcacacttctttatttttgattatttacaacaataacaaaagtgaattttaaaacgatcactccaaaagagagaaagaaaaaagacaaaacattggcaatggacaacaaaatcggacagagagaagaggaacagaagagacaggaagagaagaaaagggacgaggaatgccgaagagagacggaggaggaggaggaggaagagagggaggaggagagggagggggagggatcggaaggagacggcacaaatgccgaagaaatgacggaaagggacgcggagcaaacgcaaaacgcaaccaaagtgagtgtggtcggcatcaaaccttcttctttcacttttggaatattctggtgtttgattccttaatgactctgatttgcttaaaaatgtaaaaacggagcgaacaattcatcatttgataaatttaatggcttttcgaacgattccacggtaaaaggaatccctttttgccccattgttttgaaatattttgaattaaaatatagaaaaagcttatatcttaaaaagtgaatgcttttaaaaatagggagcagaaaaaaacaaacagagtgttaatattaacctcatgaagcaaaagattctatctttttttgacaaaaaaatatatctgggggattttagagagtgctgctgttttgaatatgatgttaagcatttgagtcaattactaatcctaatttataattcgaattcaaataaaaacaaaaaataaataaatttttagatttgtttctgatacatatgaaggatttgaaaatttataaatgtgtttcagttttgtgatcagtgatcatgaaaattccatggatttatgtcacggacaacacaaaaacattaaaaaaactaaaagagtccttcgattttcatattttatgtgaataaggacaattgattttccaatcacttcataaaaaaacaaatttatcgtaggattctccggcggaaaaaatgccatcggcgaacggcggaaaaaacagcgcaattaatgccaacgacagaaaagggacaacggcaccatcgaacggcacaagtgcactgactgtggagaaatatctgatgcacttgcggcaaaaggaggagcgggtgcgttttgtgacataatttttagaaaatttgaccatctcgatgcgtttgcattgattatttatcgattgatcgttctcaaagattcggcaattggaggaggaaaatcggacgctcagatcgacactgttggacaaatcgcgcgtttaccaagcccaagtggacgaactgaccaacgaattggtgcgaaacgcggaaatggtggcacgtctgcagtccgagttggcactgaacaaaggtgccagcatcatcactcattcggcgcctcccttaaggcgagtttggcgtggcggcactttttgtctgatcgctctcaatttggtcagtttttttcagagatttgcctcagccaaaaaagccgcggaaagtgccgtcctcctccgtccacacgcacagcaccagacaccagcagcaacaacagcttttgtccacccaccaattgcagctcaacggcggccattcgacgcgtccgcaagcgaaagtgccgacaaacgcgtcactgcagcagcacgccgcgtccaaatgtggtggcatcgcccatcagctgcagcaggcgtcgacgtcagcgaccgacgcagatgaaatttgtgtcgcgttgcaacactttgtggagcgaaatcggaccaatcagccgcagcaacagcagcagaatggggcgggggtggtggaggcgataatgggcgtactgaaggggggccaaggcgaaggtggcacttccacggcacagccgacgcagccgagtaaaagcatgtgatcaaactgatcaaacaaacacccactgaattaagccgcggcggaagaggaggagctggccgcacagatcgccaagttcgtggccgacgatccttccggccttttgtccggcattttgttcggctccgacccct

SEQ ID NO: 12859 - DNA, 2495 bp, Heterodera glycines
cagcaccatccgttggacccttccgttccctctcccgctgctgcgtcgatggcggagaacggcgaagtgaacggattggacccgaccggacttttcgcactttcgatgcttttcgatgagatggcagcgaacgacgaggaaaagcagcaaaacgcgacgttgggaggccaacagacaaagacggcactgaacagcgttggcataaaaagggaaccgcaacaggaacaacagcagcagcagaacatcgactttgaggaggtgggaatggttggagagagaaagggggtgagagagtgtgtgatttaagagggaaaagacgaagagagggggagagggagtaagaggaggaggacattgagagaaagagagacggtggaaagaaagaaaaacgaaatcaatttgagagtgtgagaaatagagaaaccaattagagaaaaataaaaatgcgaggaatgggaaatgaaactgctgaaataaaacaaatcattacgttttaaattgtatttgtcatgcccaatctttttaaaggtcatgcaacgagtgatcggcggcacttcggcgtcgactcggaccgccggaagtgtcacttccatcggcagcaatgcttccggcacccatttgccatcagtttctgctgcttctgccccactcattgggccaaaaggaatgggaagaatggcaaagaaaaagagcgacagaaagtcgtccattggcactccatcgctgcgattgcatgaagggacatcctccgctggtggcattggcacgaaaatgccgacgatggtcacggagagtggcggagtgccaattgcgttgcccaaagggtcatcgaacacggtaaatgagaataccgtatcaactatcagccaataataaatgattgattgctttgtacacaatcactcgccatcgtttagtctgtcggacgaaagtcacattcgaacagtgccgtcagtgtccccctgttgaagaccgaccaactttcgccgcttccaaacggcgctaatcattcgacgccccccgtccaaaagccatggagtccggacgagttaaagctggtcaagcaattggaagtgagcaaatggccattaaatatggtaatttgtggcattgtttatgcgatttaggcacggatcgacgaaaacatcgtcaaactcggcccgcgtccgctgaacaccgccgaattggccgcacaatgcacgcgactgatgcgcgggtacagcatcggacagcgactgttcgcacgcactgtgatggtccaagtgtcgcaggtgattggcaagagacacaacgcaaatgccaaccgggctttggcactttcagtcccagggatcactcagcgaattgttgagcaaaccgcgtccatggcacaaactgacggacaaagggcgcgaggcattccgacgaattttcggatggatttccgacgacgcggccattgatttgttgtgccaactgtcgcctaggaaagtggcacttacggaaagattggaacacccaaacccacaatcgctgattggagcgggcgatccgacgcaacagatggaaatttacggaggaactgcggggccgaatttgacaccgatggaaggaggcggcatttctatggtcaacgcggcaggaggcggtggaagcggagtgggacgaagcggaggggggaagagaggtgaacagcgaagagggaagagaaacgggggaagggtgaaaaagaaaattgggtgggaaatgaggagggaggaagaggggagaaaagagcagggaaaggagaggaagggagagagggtgagagaagtgagaagaggaagcaaaaagtggtgagagaggacaaaatggaaaggagaggaagggggagagaaaggaaagggagagagtggagaggagagaaaagtgagaggagacggacgaattagggaaaaagaaaaacagggggaaagtaatggcaatattaaaagggtgaatagagcgactgtttgtggacccaatgatttaattgccaatttcagctttgaaaagcacaaatgcctttgccaatgcgccgccgtccaaacgaatgggatcctccaccctcaaagtcgacaatcactcgccccaacagtcgctttccgaaccgtcgccgaagttcgcctccaaagagaatggcagcggcacggcaccggcgactctttccgcgacgccgggcggggggcggtggcggcacgacgacattccgaaggagaaaatcatcgacatttacgaggcggagaaggtattggagagcagcaacaacaagcactgattgaaaagcataatgatcagaaaagtgacactttgtgttgatcagcgatcactccgtttttgttgtgtccctttgtgcgttgtgctgtttttgttgctgttatttattgttttcctatttttgaataaatttatatgatccgtcaatgccaccactgacccattcgtccggttcaggccaaacggatggagcaggagtgccatttggagcgtgccatcgg

SEQ ID NO: 12860 - DNA, 1222 bp, Heterodera glycines
ccatcaggatctcagcagaatttgattttgaaaattaactaattttttgaactttcgctgtctaatgaagcgcccaaaataggcattaaaaccccaaaaatagacacaaaaaacctcaaatttaggggtataaaatgacaaaatttattcaaaaaagtaacaaaatttagccaaaatcagcagggctgtcaaaaatatcaaaatatgcgcataaatatgcaaataaagtcgtgaaatatgcacaaaaaaacttgaaaattaggggtgcaaattaattaaaaattttattcctcataaattttatcgttgtttttgcaattgcaaatcaaaaatttctcaagattttcggcaagaagctcactgttgacccactcgcgcatccattcaaatttggatttaattttatacataatcaattttttccgaagggatattcaatcggaaaatatttgacaagaaatggcaaaatatgcaaaaaaacctgaaaatatgtataaaaaagggaaaaatatgcatgaaatatgcagaaaaagtcaaaatatgcaaaattaaagtcctgatttttatacgcaaataacaaaaagatgttttacctactaattatactacagggtgcggaaaaagttcgcgcactttattaaaacttatttttcgtattaaatgtactttttcttagaagcttcaccactatcgtatgaagagaccttttctctaattatcccccatgggggattatttttcaaccttcccagaaaggggggggggataattggagattgggggataaatggagattgggggattatttttcgacggattttcccaccattttacatatttcgggattttcttacatatttgtacatattttggatttttttcatatatattttcatttttttacatattttgagtattttttacggaaatttttggaaatcctcaaaaaaaaaatccaaaattttggcaaatatttttgtacatattttgaaaatttataaagaaaaaataagtttgaaaatgttgcctaaaataccaaaaaaagtaatttttatgtcattttgtggctatttcatactttacggggattttctttcccaaaaaataccattaaaaaaattttatttacatatttggggtttttcttacatattttgggatttttcttacatatttatgtacatatttggaccactttttgtacatatttttggcagcccta

SEQ ID NO: 12861 - DNA, 2982 bp, Heterodera glycines
aaaaaacttcacaactcggaaacggtattccgaggctccaaaaaatatcggaagccataggccggaattccgagaccaaatgaagtcggagttttaataataaaagaaattagaattaaaaaaactttaaaatttaaataattttactaaaataaaacaaatgaatgtgtttcattttcacagatttacataggttttatcgcaaaaaataaaaatttccacaaagaccaatgtatagccatcaaaatttttaaccaagacgcaaaatttttttatgatattagcgtacaaattaaattattgaatccaatgacggaaattgcgaaggatggacattttgtcagcttaatagaccagtaatttattaaatattaaagtcatatttaaaaattaataatttagtggcgtcataaaagaaaatgagaaatatgtgacaatttcggagttaggcgaaggaaatttaaaagaaaaatttaaagatttaaagacattaatctccgaaataaaagcagcatttgcacatttaagtgaattagtcattatcctcaaggaagttatgaatgcgctggttaaattccacgaaggtaatttaatttttataaacataatgggcccattatgagctttaattagcgaagggatttaagcgacaaaaactccaaaatatatacgtaaatatgtgctaataatccgcaaaatgacaagtaagttttaagttttgtttaatatgctttttattattttttttatgagctccagtggccagaaatgcatgaaaaatgttttttgggggattcaagcttagatagagcctattttctaggtttatttttagagcctaaaaagcctaaaaaattttgtgaaaaactattttggcattttgccctaaatttattaagaaaaattcaataaaaacgaaaatgcatccccaagaatccaccccaaaaatttcagaaaaatacatccctaagaatcgacccaaaaattttcaaaaataaacccctaagaaataaaaaaatttctcaaaaattaatctcttaaatttatttgtttattttcttgacaagaattttattttaaaaattatgcaattttaaaaaatttctgatttttaagagaacctaaacagtagcattaagaaattgtaaaattaatggtaaatcaatgcttttttagttggaattcatttgcatttcaatccaaataatttatttgtgtttaaaagaagaaattatggtcttggaaaaatgctgatcaaattatttgtgtctgatggtaaattgtttaattaggataattaagataacatatttattattagacattatttaatttttattcaaattaataaattatttttaatgaaaattattttagaacattttaattcttataaattaaaaaatattatctttaataatttagctaaattaaattaatattaaatttgctttatgttaaggtttcgttttatttgacaatcaaaaaaaggaaaaaaatcagaaaaattttatggttaaagttaaggaagaagatatagaatattcaacagattttgctgcgcctgagctgcttcaagtcagaagttattgttttttatttattgaatttcatttcagcaactttcaaatggcactgatgaaaagggcgaagttgaggtgagctaactgatttttacgtttaatttttccattcatattttattttcatatatatatatatatatataatcactgaaaaataataataatgaggttaattattttaaaacaaaattaatttttttatctttgacagaaattagggagggggtgggatttaactaaggaattctcgaaaaatgtcaaaatgcacaggaaatggcgaactatgcataaaaatccaaaaatgcataatcaactttaaattcaagttgttcatatacagtaaaaatatgcatatggatttaattgacttgcttaattataacaattaatgaattattccaatatcaggtcaccccgaaaatggacatttggtcagcgggaattaccatttttgaaattgctttctcagaaatggttggcttttattcgacatgccaccgaactgttgttggggaattgtttcgaagtaccaaattgaatttggatgtggaaaggccagcagcaaatcatcttttaaaattaaaactgccagaagaaagtgctcatgccggctctgaaaaatggtggaaaagatattgggtagtgatcgatgacattctcatcgtatggcataaattgccagagattgcgtttcttgcggtggtaagccggggaataatttgaaaaagcaccaatccatcataccttagagaaattggtggtttgttaagctacttttcgagttattagcacctatcttctaggtttttatgtttagagcctaaaaacctaaaaaatttaaaaaacctattttgatcctacatattttggcgttttgcacaaattacaatattaacaaaaatacaataaaaacgaaaaatatatctctatgggcagctcggtgatgtgacacttactccgttacatttgcggcgccgatatactgtggcaccccaaattaatgcttaaaaattaaatctcaaacactattttgtttcctttatggtcataagaaattcttttcaaaagtaataacgaaccactgaatgaaatctttttaaaaatatttttcagcgggggctttaagaaatcttttcaatttttcgaatttataaatttttaaagctggacagcgacgggatattgtaaggaagaagttagctggaccttaaagcaagtaaagcggcggttgatacgaggcggatttgcctcagaacgcaatggcctagttgccaaaggactggatttccacccctggcttaacattttgcctatttctttattaaacagaggaaatccataaaataaaataaaacttttttggttcggggtcattaattctgcgcagcaaatgtca

SEQ ID NO: 12862 - DNA, 4619 bp, Heterodera glycines
  unsure (1)..(4619): unsure at all n locations
gtgttctccggaattgggatttgcaacgacagcattgtgaacagctcgaacgtcttggacgaatatgtacactctgggcatctgagctcggagacggactgtccggcgaacagatcgaaaatctgaaaaaatgccattgtttaaaatgccgtcagaatcgagtgttctcctctttcttaccacgctgcctttctttggtgcgagcacttcatttctccaatgctgaaaatgccaaattaaacggtacaaaaaaaatcacaaaatttggcattacgtcgattgcattgcgccaaatttggtcgtcacgttgatcagcaccaccacccacgccgtcatttctgtacatgtcacagctgacgccttgcgtaacaccgcgcagaatgcccttcatcgactcgtgcagctcgtccacaaagaattggatgaactcctggctgtcatgttggaacgaatcagcgaacaaattggtacggctggagatgacttcctgaaaaaacggcgagtcatgaaacgcaacaccaccatcaccaacggcacactgttcaccacaccttcagttcgaatggcgccgccggttgtcgcaacaccaaaatgcttttgatcatttgcacatattccatcgacgagtttgttgggcagtcggttttcgctgaaaaaagaggggtaaaaacataaattgatggcattggacattgacattattggcacccacttttccatcagaaaattgctgagtgctgtcacgttggccaatgattggagtgcagcgcccatgtagcatgtgttgccgatgttcagaattccgcccacttccttctttttgttgttgttgttgttgtcgtctttgatgtctgctgctgctggtggtgtgtctgatggtgtgcccattttcgcttaaaaagagaaagcaaatgaattaaattaatttttatttgaaatttttgttaggaaaaaggacagggggagatttgaagtagggttggccgagtccggtttttgtaacctctgccggatcaagaaacgctgagtcagtgtccaaatttttcaaatggattttgccggattttgaaaaacataaaaggattttttggagaatgaaaaacaaaagtttaagacattttctgaacaatgaacaacagaaaacgacgcttagcctaagaattaaaaaatagaatggagcagcagctgaagagaattcaaaaatagagagaggcgttgttgggagaaattaaaatgagagaattttttaaaaaatggtcccttttatagagaatttggcaatcgtttgcttttcaatttttaacttttcgatcattttgcctgaatttacaggggtataaaaggggacaattttggctgacaatcattgcatttccattcactgtttcgtcacttccttttcattgtaagtttattcaacatttggggacgctgatcatactgatcacgaaacaggcatccatttcaaccaattccgcaccttgggccaagattcgaaccaaaagtcgagaattcaaatttctcgagtttcgcatttttgtctatgatgattcagtttgtttcagaaaatccaaaccgattttcaaccaaaaatgcgaaactcgaaaaatttgaaatttcactttctgttcgaattccggcccggaagttcgaaatttgtcaaaatggacgccatttcacattactctcttttcttcatttgctgttgatgctgttccgttccacttccattctctttcagcgcctttgctgaaactcacctctctgtgctgctgttctgtaccacccgctttttgtgttgtgttcactgtgccgacgaccacaacgactccgaccgtccgcaaatgacaagaaccagccgaagcagcagcagcaacagaagccgaggcaggacaacaacaacaacaagaagccacagaagcagcagcagggaaagtccgagaagtgtgctgatgcgccagctcgaaatgttgatgcaaagcgcgagcaaaaacagcggattccgtgcgtgtctcaacgatggcaatgtgagagaatcagcgacctaactgatctgatctgatccgcttttccgttacgcatatttcagtcccatccctttaaacagatcttcaaatggcgcgttttcatcgatggtcctccggaaacaccatagtgagtgggcggcggcggcagaggaaaagtgcaaatcaatcaaattaattgtttccccattaatccctcctctcccctttttttagcgcgggatgcacgtttacggcactgctcaaattcccagcttcgttcccgttttatccgccaacaatgactttcctcaccgacattcttcatccgaacagtaagaaaagcgcgcaatgattcatcaaatcccagcaaaagcccccacccgtcccttttcagttgacacgagtggcaaagtctgcatcagcattcttcatccgcctggcattgatccactgggctatgagcaggcgtcggagcgttggaattgtgaccgtaccgttgagtcaattttggtgtccattcaactgctgctggcggagccgaacttcaacagtcctgccaatgtggatgctgccgtaagtggattgattcttcggcatatgaatatagtatatcaattttcatcaaaatttcaggttttgttccgcagcgacccggcacgatacagggaggaagtgcgtcgccgcgttgagatagtgatggcggcaccaacacaaccggaagggcaggggacgacgcaaccgtcggaagggcagaggacgcaagcggcggacgaacaggggacgcaaccgccggaagaacagagggcgcaaccgccggaacagcaagggacgacgcaaccgccggaacagcaagtgacgacgcaaccgccggaagaacagagggcgcaaccgccggaacagcaagtgacgacgcaagcggcggaagaacaggggacgcaacagccggaagaacagggaacgcaacagccggaagaacaggggacgcaacagccggaagaacagggaacgcaacagccggaagaacagggaacgcaacagccagcgacaccgccgcctgaagggccgcagcaacaaacggacgaatggtacatgtgatgtgatgtgatgccctctgagtgatgatattattacacttatgtatgtattgtatgtgattaacagtctctctctgttcatttgccctgcttttgttcactgtacatatgtgtatatattgtcattcaccaattactgtatgtatattgtatatatgtgatgtatcgagcaataaattttcaatgccatgttccatcataatttctgctgaattcgaacgtttaagataagcagggcttcaatctgtgtttattttctgatttggaggatccaaatctgtcaaaatactaatgtacttatttcttctccaaaattgataaaactgataatgggaagcaaaaagcataatatttgacttttgttcgaattccggtccggggtccgaaattggtcgaaatggatgccagattcgtgatcagcggctccgaaaacctatggaaacatgttttcatgatttttgaaaacaaaattattttttcgaaaaaatggctgggaaatttgtctataaaaggacgagaatttggcatttccaatcatttcaatcgttccctttattctcatttgctattcttccctccacttcttcgactacaacaacccatttcaagtgcacaacagcgtggacgcatgacggattcattggtggagctcagcccgggagcgctcgtctccggccgttggactgtcatcaagaagcttggagcgggcgcgttcggtgccgtctacttgtgccaagaccaagatgggattacaaagggagcactgaaaaccgagccaatcaacgcgccattcccacttctcgcgctggaggtagagtttgagtttgaggggggaacacaaaatttggtgtaatttttgtttccctttatttcaggccatcgtgttgcgcagctttgacacacttcgagcgagcagtggaaagcatttttgccgttgcatggaccttggacgcgaccaacagccggatgctgcttctggacgtacgctggagttcaacttcattgtgtgagctttgacagggccggatgtgtggagtacataaatctttgtccccccattttcagcatgtccctggttggccgtccattcgacaagcttttgcaagaatccggcgactgcttcagccccggcactgccatcggcgccgcactccaactgctcaaagcgctccaggccctgcacgatgttggctatcttcaccgtgacatcaaaccagcaaattttgccatcggactgccggaaacgaacgagcagcggcttctctacctcctcgacttcggcatggcgcgcaaatacctcaaagacgacgtgaggagtttcactgctgctttttgtttttgaattttcaaaatctgtatcccccgctttttcagggcactcactatacgacgccagcgggcctcagncaactttcgtgggacaccaatctacgcgcgatctccgcgcacatcaaacgcgactacagccgtggggatgcaaatcgaccatggttctacgtgctcatcaaattctacaaag

SEQ ID NO: 12863 - DNA, 1955 bp, Heterodera glycines
cttccttttctcctcttttcccttattctcccccatctttctttacccctccaccccttcttcccttacttctttcctcctcttccttactctttccccccccgccccctctccctcttcccttactcgttttccccctcttccgcttttcctcctctccatctcctcctccttttcctccccttaaaattgttttgttttacttttttcttcatttcctttactctttctcctcttcccttactcttttttctctcctccttactctcctcttcctccccttcaattgtcttccttttctcctcttttcccttactctttttcccttttgccttacctctttaccccccccccccctcttcccttactcttttttctctcctcctctgcttttcctcctcctccctctccatttcctcctcctcttcttcctcctcttccttttcttcctcctccgattccactcgaattgcgttggttgaacttctcgtcgcataataatagtgccgtgctgcttctgccgctgtctccgcttcttcttttgttccgcttgtcctcctccttctgctgtggccatttactgaggaaaagcgtcggtttggctgccggacgaacaaagcgccctaaaaatgaataaaaataaatttaaattaaaattgaaaattggaaaaccctttcagttgagcctcgcaaatatgcattttccagctccagcacctcaatttgggtctgcaaattttgcacgtacacaccttccagaaaagcctgtggaaagtttctctcgtcctttgagaatttccaaaatttttcaaaaataacgaaaattctctcaaaaattgccaaaaataaagcaaaaaatttctttataaaaagggccaaattcaccatgctttccgccgcctctgtgcatttgtaaacatttcgctggctaaaggaaaataattttttacccatcgaaaaaatgaaattgtgtaaaaaagtgtactcattcgaattggcattggcctgctgaatggcactcattgaagtcaccaaatgaccttaattaaattcataaataatttttccaataaattctcgaatactaacgacaaattttcccgaatctcgaaatttgaaatcttttacgtccgtctcgctctccaataatttttctgtctcacaattagatttttgaaatctcattctcactctcgagcttggttatccgtcaaaattggccacctaaacttccgcttcttcgcattgcgttcgatggccgcggcaccgccggcggcggcggcggcggcgcttttgccctttccgccgccgcttttttggctgccacggcattggctgccgtttgaccacggccaaatgcgacgacagtgcgcggcggctttggcacggaagtggacgcggtggcaggggacgagggcagcaggcgggtgcctttggtagggagcaggggtaattagagtaattaactgatattgatcgtgacaaaataaaaaaaacaatgacataagcaatgaggagaaatgatgctttaaatgctcaccgatgaccatcagctccgctgttgtgtcctcgccaaaattatcgatggccggcgcaattgtaatttcgtctttttatataaaattaaaaaattaataactgaaatttttggatggatttaattttaatatttctttaatttcccgaaaaatccttcaaacttatgttcatttaaaagatgaaaatgcttctccttaggttggtggttatgcttagtttatttactatttatgtgcttttgctatgaaggaagtgccaatgccggcggcggcggaggtgccaatccgtgggttgtccgccaattgccccggggggggggggtctgtcggtcggtggtcattcatcccatccatcgtttggttgtctctctgtcctccccccccccggggaatttccttggtgtcttccacataagc

SEQ ID NO: 12864 - DNA, 2159 bp, Heterodera glycines
  unsure (1)..(2159): unsure at all n locations
gcgggtggcatgtgtgaactttgtgatgtatcataaaaggaaattaaanctagnccaatagtgccccagggtactctcgggattctcgaagtgtaggagtggtcccctgctggtaaaatacttttttggatttattggcaaatgtcatgtgtttacattcattttgtttgttacataattgacatttgagatgaaatttaaatacaaatactgttggattgctacaaaataattgattaaattaattgatttggcatgtttgccttttttggcataatgtttgcctttatctctgatcatccttccttcgccactgatcagagttcgtcctttgtttggtgcgtctcgcgtttggtgccctcaatgatgtcgtagggaaagtcggcactgagctggcgccagaattccaacttttccggcgctagcgatttctccatttgagtggtgtctgagctaaaattggcgtactgaaacggtgcgtggggatctgtcggacgccaattggccaacgaattgatgcgcggaactcttaaaaacacaaaataaaacccgccacccaaattactgccattttgataattgagacccaaaaataggtacggacttgtgatgctcgagaccgagttcctcgagactggagacagagaattgggccaaggacttgagaccgagacggccccaaaaatccgagacttttgtcgagtcaaatttaatccaaagtctcgaggccaaaaccccgagaattttttcaagtcgagactctcgagtatcatgaagaagaacaagccgagaaaccaccaaccactaatttaaagtgtcattgctaaatttacccggcctttgtgaagcttgtgatggtttcgatcagtgcccgttggaagtgtttgtccgcttccgtcgcattttcagtttcgtaagggataggaatgccaaacaaagggtccaattcgacgccgtgggaagagcctggaaaaatttaaatttaaaagttaattaaaatttaaattaaatttaaaagttaattaaaatttaaattaaatttaaaagttaattaaaatttaaattaaattttgaaaaattaaaatttcaaaatttgagtgtttgcaattgccctcctgcccacctttgacaggaatatcagatggatatcccgaattaatgtgctcaatttggtacagataaattggccacccggaggccatcttttgctgggcttccaataacatcggcacaagaaacattgtgtcagtgattatctaaaaaaaaaatccgcaaatttaaaatttaatacatttaaaatatttgaattgaaagaattaaaaagattttcttagattttctttttaaaatatattgataaattaattaattattaattgcctcattgtatttggtcagccaatatttgttgttttcttcttccccattttttggtgagtaaaattgcaaaattcgctgctgtgccattttcgctgtgtcgtcaaaatatttttcgggcgcaattttttgtgcaataaaatgttgaaggtcggcacgaccaaaattggcccatttggcacgaggaatttgggtggacatgatagtcgggtcttcggtgaaaagggctaaaagcaatgggaatttcaagggatagaaataataaaattctaaaatttttgggaatttccgacgcttttggccccctttttgtcagaacaatttaaaacaattaaaaattgttatcatttgcttactaaatgtcaatgcttcaagcgaagcgatgcccataattgtgcgctaaaattatttaaaacaaaaattatttattttaaattttcaaaacttttgggggcgctttttgtatcaaatgtgccgccgaatcggtgggcaaaaaatcgccgtcaaagcgcggatggaattgcaaaaagttcagctcgtttcggccacggccctaaatgcgttaattanaataaaattgaataatttaaattcgatggtcacaattttgttgattccgtccatcagttcgttcggcgttttttgcctaaattttttcaaattattattttttatttggccatacatgcgcaaggngggtgcctgctcacccgttgcccaaaattattaaaattaaaatgtaattacgggatttcgctcccagtgaatccgattgcccatta

SEQ ID NO: 12865 - DNA, 1403 bp, Heterodera glycines
aatgatccgagtcgtggcccctgaccaagtttctacaccacgggtttgtccacacgccctcttccccgccctcgcccgtctcacttcgagctctgggacagaactgaccatccgccccggtcccgagaattggtgatcaatgttgtgccccatggtgattcgacggctcgaggtgccgtggaggaataccgcatcggtgttggccgcgaactcacgatctctggccccctcgttctacgaatctatgctggtgcccttcttcttgccctattctctgttgcccttgtcgatggccaatcatctattgccggtctctgccctgctcattcttttgccctttgctcttcacggctgcacaaattttcttgccttggtccgtcgctttttggtccttccgcgtttgattttgtgcaaatcacgaacaaatttgcttcgttggcttactcaccgcttcctggcagcgaacacttcgctgaaagctatgccgaagcagctgactcacccatctctccgctgtgttctgccattctgccatttttgctctctggcctagttcgtatttggccgctatttaagccatggatcgcaagaacgggccaccattcatttccctccgactacctaattctcaacaccttctgtgccatgcccgccaaacctaatcttctctcgcaggagcttgccgaattggaaagaaggaaaatggagctggaacagatgatcgcctcagctaagaaagaagtgccggaaaggaagagccgtcgtccaaagaagtgccaaagttcggacgagcccgcccctcaagacgagcccgaggaaaagggacctaaggcggcagctctctctgatgctccgactactcagccatcccatccgccgctcggcatcgtgcctccaccacccccatcacctgttggctccgacatggccgaccttttgcatggtcacgtcaataagtgggcaatggaacgtgaggaggccgtgcattttttgcagaagaaaaaaagagatgtcgccgtgcctgttcacgatgcactcaaaaagttcaacggcggcatcaaacgcctgagaacggcgctggacgacgtccaggaaagtgtcggctcgatagctgctggtgtgaacgaattggccagctccaccagtgacggcttggtcattaccgtcactcttctgcaagttgaagtcgatcgccaggcggtggagctgcgatcccttcgccgatctctgcaccctccgccagacgtcgagaccgttgagacgttgtcagtcatctcgtcggaagaaggagcagcagttgccgaaccatcttcggcggcgagtgtcgccaaagcgactgagaaaggggagaaaaagaagaaatgaaaaaaatgaaaaagagagagggaatgaggaagaagaat

SEQ ID NO: 12866 - DNA, 3281 bp, Heterodera glycines
gagtgctacaacaattcgggcgtgtacgccttcgggttcagcaccgacgccatggacagaaagcgttccaggccgtccttcaccttcaactccttggccaactctttctggaaaaaaaagaataaacggtaagaaactgtttggtaatagttcggatgacatagcaacttgttcaaaaaatgtagttttaaaaacatgtttttgtgagggttttcaggcacgctgaacacgaaactgacaacccatttcgatcaattttgaaccccggacccaacgaattcgaacaaaaagtcaaaagtttaaatttgcactttaatcaattttaggtgtccaatcaatggccatccttattgtcagttttttggccacaactttttttccttacttgaccaaagccatattcttgacaattggttgaaatagatgtaagattcatgattagcgacccagaaatccccgacaaaaagttttcccaataaaaattgcaaaacaaaatggatcccgcctttggcactttttctgcggcccccacagcaaaagtgccgtttctttaatggtcattggttggcattcgtgtggttccagggggccaaaaaatcggaattttgccatctaataactccaaaaaaccgagcctcgcaagtccagaatgccagaatcggagtcccaccgcactaaaaaaacctggagacccgcgaactcgtcgtgcaccgaaagtgccgagtcggccgaagcggcggccgatgtcattccgcctacggcaccgcccgcggtgccatcgccatcatcgttttcgcccatttttaagtcgtcgccagccagcacagaaacagcaccaaaatagcaccaatagtaaaaaaaaaattgctaaaaaagaggaaaatttggacaaattttgatgaaataaacggaaatttaaatgtgcaaaatttgaacaccacccaaagatttgattaattgattaatttttgattattaacatttgtaactttctttaaatacatatgtattagaattttcgtgtgcgttcgaatgataccaaaaatagaaggtttgttcgaacatgaacaaagttattgtataaaaatcaagtattgtcaattaattggactcataaagtgcaatagaaccaattatatttttgaattcccaggacatattaggcttttgtttaataccaaaaaaagtagaaaaaaatttgttaatgtggtgaagtacaaaaattcgtgttttctctgttagcagagaaaaaaaatagtacgccaaaatgagcggtgtatttttctgtgcactctccattttttggttcatctctctgttttgtaacggtttaatgaacatttttgagtttgtgcgaacatcccgaaatcacaatcagtaccaaaaatccaagttccgggctctacattttgtggactttttcttccattttttttttggctatttggtagaaattttagaaaattacccaataatatttttatcttttggaaaattatgtaatttatctgtaccaaattagtcaatggaaaaatgtctttgataaaaatgattttaaaaaagtgacgcgtttacaaaaatggccattttatcagcaaaataaatattttgtacataaatttgtgtcaacgacggtcaattaaaattggaaaaacattttttcttcgtaactaataaatgggctcgggtttaaaaatatatatttttttaaatgtaactggtgtctgtagtttgttatttgaaaaaaattagagaccatttcgggatcgagacaccgtcggaattttctcgggatggatggggctacccgacattgaggtgattggatatttgaggaccacaacattgaaaatgatgtccttgaaatctccggccctcaaatgtccttgggtctctgggggttatcctcaaattatgaatttttttcgtaaaaattcagattttctgacaaaaaaaatgaaaaagcataaaaaattagaaaaaaaaaatttattgagactttcacattttagcagccattttttaattatttttttgccttttcccgagtaataagtgatttaaataaaatggacccctttaatatagccgcactaattaaattttgttttttgaatacaatactatttaagtcgtaaaaaaacactcgtttcctatacaaattgtgcaaatttgctcatcattaagcaaattaatgtcaaatatttaacgatttttaactcttttttttgagcggcatttttttgattggtcacaatggggagagattaaaaagtgagaaagaggagagcactttttgataaggaaaattccttaaattttcaaattaacacgaggggagacatgggagaggggggggggggggggggggaggagggtaattaatagggccatgaattttggtgataaaaatctaaaaaattaggggtataaataatggtttggtgaaattgggcacaattaaaagggcccgggttttggtgtgaaaaatcgcataaattagggggtaaaaatgatgaaagttggcataattaagggcccgggttttggtggaaaaacctaaaaattaggaatataaaattggttggtgaaattgggcccaattaattgggcccagatttttgtgtgaaaaatcccataaattaggggataaaaatggcaaaataatggtgcaaattttcaaaaaaaaaaccccgaacttttcctaaaaaaaataattaaaattagtcttttttgtcacttattgcagttagatttcatcttcttttttttgaataaaaaccaatcgcaaaaaatttatttatttttcatttttatgccactttttcaaaggaaaaaaataaaaagtgatttttgaattcggagactaaatttgaaacccacaaatttttttacaccaatcattttaaaattgccttgaccttaatccgcaacaaatagcgaacaaatttcgcagcagcagcacacacaacagttccctttttaaatatatttgttgatgggaaaaagtgtttcggtgaaaatttttgaaaaaaaaaaattatgacggaaatttttttaattttctccaaaaattggactcgattaagattgatgaggtcaaaaaattttttaaaaagtcccaaataaattgggaccttagctttggaagggataattaaaataaagtttaaaaaagaattggcaaagagttgaggcccaaaatggagtcaaaaatatagaaaaaataaaaattttaattcctgaacaattctcaaattttattttctaggattataaaa

SEQ ID NO: 12867 - DNA, 2721 bp, Heterodera glycines
  unsure (1)..(2721): unsure at all n locations
cataccgccgcaaaaaatcgcggccgatttgttttgcctttaaagggggncanangaggngggaaagaaccaaaaaacattaatcaaaatcggattttttcacagtgtgtaaaaacacacactttcctctcatctcatcagtcagccaaaatgaatttggtgggcaaacggcgcgggggagggcaaacattaaacacaaaatcatatgacgaaggacgaagaaagaaaaagggggaaagatgggcaaacactttcataaccaaccctttttgctctgtgctgataatcgtcgcaacacaccagcaaaagaaagagagaaatgaatgaatgagctgttctcggatgtgtgtctgctctttttatggccaaccgggtgatcagtgatcacttatcactgattagatctattaattctcgccgatattcgacgagaatagaaatgtgtggaagcagcagtagaggatcaaacattctcgtcaaacaaatcaagaatggagagaactgattaacgcctggtgatcatgggatttgagatttatcccccaacaaaaattgctgccgcttggccgccgccactcaataaaaatgaatgggtggagaatgcaccgaaaaaaacaacaaatcgatcattcattcattcattgctaatcaccactaattatccgtggtgccatcaaaacaaagacaaagggagttgcagacgcggtctttgcaccgccgtgaggacaattatcgcgtgttgagaaacgaacgaacgaatgaatgaattatggtggggaaaaaagaattgttttcatagcatggaaaagaaaatcagagagagatgagagaacgagaagcaaagttttaagcattgaaaggagtagccctatgagaaaatgaaatgggattcactcgaaatgtgaaaatggcaacattaaaaaacatccgattatgaaatggttccgtgtgttttagttagtgcgtgccagatttagtcgaattcattccgcgaaattaccgcatttgtttgccctcccctctcgcccacatggattatttattgcccactttggcctcgcgtgagaattgacccccccccctcgcccgcccgtcggcgcgtggtgcggacgcaaaaaggcgtgtgtaatagcataataatagccatccatcctttgtgggttgtaaaagacggggagcgggagaggaggaggcacggcactccccgccggaggggacgacgacgacgatgggggttaatacatatcacttgcgggagatagaatgttgtacatgttttttaacaatgggagctgctaattgtggttggtttccgtgaatatgatggatgattaaagggacggacggggcataaaaagggcggtaaaaaaagggggaatgaatgcaaatttttgaaatgcgcgtaatggcaatgtgaaagcgactgacagaagaaggcagtggaaaagctccaagtttaatgttaagcggaagaaagatagcctcgactcgggccaacctcaaaaatgtgtgtgtgatttgacaaggcaaggggaaaagcggtagaaaggtgcggcttatgtgcccttggggggggggggggagttgttgtgtgttggccccgggggttgcgacgaggtgtccaatttcatgtcggcgttttcttcttgccggatgtcgtctcactgtgtttgccctgctgcagtcggcggataatattacagctaatcccccgtttcagacccaaaagggacagaagagttgaagccgccgctgattgaatttttgtgactaacaagggaacatatcgaactgtatatgtccaaatcactttagaaccacttttatcgtgtagagcatggtcgatttactattgtaaattttcggcttttttggtgcagtcgccaaaaatgatcagaaaaaagtgatcaaagtttcgaaaaatcagtaaaaatgacaaaatttaaaaaaaaaattcctaagattcaaaaataatgataaagtcatctaactttttttaaatgatcagcaaacaattctatatcaaatagcatcataaaacaaattaaaataactgaataaaaatatgctaacttgaataatattttgaaaaaaataatcaacttatcaattttttgctgggtttttcatttgatcacttttttctgatcatttttggtgactgcaccaaaaaagcagaaaatttacaatagcaaatcgactatgctctctacacgataaaagtcgttttatgcattttttgaaaaaaaccgactctgttcgaattcgggtccgggttcggaaatgggcaagtactgtaacacttttttaaatttatttgtttatggtaaattcaaaattagtttcctatacaatttaaatatgtttacatatgatgctacaaatattttaaaagataaattcggagaatttcttaagtcgctaaataacaattggataagctaagccgaacccaaaaaaatgtaaatgtgtatgatttattattctggaaaaaaaaactaaaattaataattaaatgtaaatattattattattattattattattaacacttttttaagttcaacccaaaacctcactcagttcgtgaacatgaaaagtatagttctaataaaatacgaattcaataagctattcattttttcaaaattttaaagttaaataaatagcaatgtttatatatttgttggaataataatctaatttcccagatttgcttaa

SEQ ID NO: 12868 - DNA, 922 bp, Heterodera glycines
  unsure (1)..(922): unsure at all n locations
gcagttcgatatgttcccttgtaagtcaattggacagaagagtgacttgaaaaggaagtgcttttcagcacggggatgtggcaatttgcgcaaaatgcgaccaaaattgaattggataagagaagggggggggcagacacgtatccagaaaaaaatttcggggagggcacccgaaaagctttttttttattattattcttcgggccaaatattcttttctcgtattatttttcagtgcatggggcgaaaaacaggaatttgtagcgattttgggccaaaaaatgactactttttgccattttggggttaaattttcagtacataatgaatgctacattggggtccggcggtaccgataggcgccgcggtttttttggaattttaatgaaatagagtaagaaaatagcggaaaatttcaaaattttcccatttattcgtgaaaaacttttaatttttcatttcggagggcacgttcccccactggataaggagatatacaataacagaataatatttatgtaaaaagtttgtgattataaaaaaatggttattgtacatttttcggtctttgttggggggtggtgcatcgaagggacggacactcattggccaacgaaggcaaacagaaacgcgtataaatataattaaatcacgcaccactgcacatttatgtgccgctcaacaaactccgctctaagaaatggattatgccatttgggtggggctttttggtttttgacaaatcctaccttatttatgctatgaaataatatgtatttcacttatttattcgttatttgcggggcgtgtgctgtgtttttgccattcccaatcaaaaatacgtcagccgtcactgacaatgggaagaaatgcgggtggatgaatgatgtgggggggggggggggcgaanggggtgaattgt

SEQ ID NO: 12869 - DNA, 4065 bp, Heterodera glycines
  unsure (1)..(4065): unsure at all n locations
tttcctgggggcagtgaacanaatctcaaatgcaatttaatttttgcaggtgaaaggtccgattgcggttggcatcagtttcacaacttatgacatggtcagtgaacggctaaagcggtggaccggccaaaagggcacacattaacagtgagaagaggagcagaagtaattcgagtccatccatttgctacattaaattataccctctcttcctcccattttcgatgttatgcgtgtcagtcaaaacaacaaaaatttgttttttgttcattcgttcatttcttctcacattcttttcgtaatttttggcattcgattttattgtatccaagtaaataattgtgtaaccaaaatgtgtcccttttggattgtgcctttaactttttcctctttcctgtcattttgtgttcagtcagcttttgttcggtgtttttcagaatcgcacaaaagcgaagcaatttagtactgtttgtactcaatgccaccagttgtgcagtcattttggtttctttttcaaggttctattttccattattctttgggtttgcacaaagccttactgtcactttttactgatttatgtaagaacttgtaattaaaataaaaaaggcgttgtgcttctgttttgttattcgattgtattttggggtttacttcaaaatatatggccttccttacaacaaattgccatcaattatttatctgctcgtcacgccatttgctcaatttcgaccaaacgaatcactcgttttgtgatttctcttgattgttatacttcagaggtttcttttgcactaatcgaaatggtacagattttgttcacaaatgttgtatttgtacacaaacagaataaaattatgttaaagttcgaagtctaaaaaaataatcgtttcaatttttgggttgtccttaaacaaaagaattttataaaaaaacacttgaagatggtctttttttaaaaaatgattgatttggcgaaacttgcatatgccttgattttgttaagaggttcgtacatccataagactttgtagtagttcttgggaatgttgccctttatttgtacgcaaattttcacctattatgccgttgcatttcaagttatatattttgagcaatttgtcgtgtcgtttttcaaacaaaattttcttttcagataaaaattgaaatcaaatcgttctttgacatttgaaagctgttcgttaatgacggatcaacagcaaaagccgatgagtcggagtatgactccaaaaacaccttcaggtttatctttaaaatcttgttaataaggatgaaagaagaattaagtagatgtaatatgtgaccatcaattcacattaaatgagtccatttgttaacttttcagtgcaaccgttcaaaaagggcgacatcatttgggtggtctaccgaaaaagcatcaattggccagccaaagttcgtttttgggtgttctttccaaatgaagttcgaaaattgaactttcacaggtcaccgcgtactatcccaaggacaagaaagtgtcctacgtgttcttcccactgaagcagaaaaacgccgtcttcaaaacggacccggcaaaagtgcagcttttcacggtacgatttgctatttttgacatttcgcattaattgtgttttgtttctctcagttggatgaccaaatgccggaaaatgccccgctcgacttggagtacagttttgaacaggcccgtcgcattcttcaaggcgttccggaggaggaaattattgcagaaaatgtgcaaaaagaggaagaagcactctcccaaatgaagccgaagaaaaaaccgctgacgacggcggacgcattgaaaaaagcaaccaccggaacaccaaaagggacgccgcgaagccaacagaaacagccgaagattgtggccacggaaaccaaattcaagcagggcgacccggtcattgtggacactccgatgggcatgtggccgggaatggtttgtaatttgaatggaattccaaattgttttgaattgcgttcggaataagacaaataaagtgccgaagagaggccgtcgccttcgctttggcgttgcgcggcggtgcggagtttcggagccctccccttccccgggagcatcgctctgtccgcctcttcgtaaagaaagtgcccgctttttttggcacggtccgcatattcctgatcgcttggtactgccccgacggggtcatgaccactgggaaaaaccatgcggaacacaccgttttttattcctaaatttctttttcatgattcttttccccatttcagttcatttcctacgtgaaaggcaatccatcgttggtcaactattcactgtttcctcgcgaggaacactcccacgaagtcgtgcaaacgtcgggagaggcaatcatggcatttccacccgagcaaattgagcaagcgattgaggacgggcgcagcagcaactctgaagtgctgttagccgcgctgcaggacgtgcaaaagtacatgaaggagatgggacatgctgcttcaccacatgaagcagttggtaccacttcgtcgatgcaatcaccgaccatggacacgccgccgccactttctgccgaagatgcacaaccgatggacaccagtgaggaattgggcaaggagaagccgaagaagcggctcaaagtggagctgaccccgcccagagaggtgagtgagtcggaagagaaaagtacaacaaatctgccaaaattttgagtgtttgaaaggccggaaattacggcaaaaaaatcattttgcaaatgatttttaattgttttagacaaagcctcatcctcgaatgtcgttgaattcgcgtctcagcaaccacactggcgacgaagttgttgacaatgagagtcattcgccggcggtggcgacgccgccggtgccgaaaagcaaaaagcgaaccgccgcctcgctcaagcagaacgacagcggcaacaacaagtcacttagcacattgattgaggcggccaaaatgatggagggcggctcttcatcggaagagcatcaccaggacggagtcagcatgcccaactcgccggcggggagcagtggtgccgcgccgctggtcaattcctcgcgttgaaaactcaagcagacaccgactcggcaggagaccgtgagtaaatggtgtccagacatttgcgtttcgggcgacccaagccaaatcttacatttttcggcccattcttgcttaaaacccaacgagcaccattttttacatttcaccccattcatggggcggttacatgtcgtttcgctactcattgttagtgaaaatgcgttacttatatggtggataatgtctttatggtgtaaccttttggtttgcaaagtttttgtgataataactcgtgtaaacttgttcccagtgcttttttgttccctgatcacgaatcaggcatcaattttgaccaattcctattccttaatccaaactcagcccaacggtctaaactcggaaaatttgaattttctcgaaattttgttcgagctagggataaattgtcaaaaaaaatttgtcgctttgtaactatcgcatacctgtgcacagggagggtcagggggggtctcttagtcgatcgtaagggttcgagacagtcgatcgtacgaggtgggggggggaagttgggggaggggggagagtgaagggaggaagaggaagaaaagaaaaaggagtgagagaaaaaaagtaagtcacttatttcttaacaaatttcattaaaaaatccaaatttttgcgatagactaataccgatacatcaaattttaaaaattttcccgggatgcaaaattctatataaaaatttgtgaaacaggtcatcaaaaaactataaatttgttgaaaactcggggtgcaattaccaagcggaatgacttaccatttagcgaaaggacgcatttttactgattgcgagaagcgaaacgacttaaaattagtggctaaaaaatcccttgtcgcgtctaactcatatggtctaatgcggttctttcgggacttctcccccacttttaatgcacaaaaaatctaaataaattaatttttttctatatgttaat

SEQ ID NO: 12870 - DNA, 2657 bp, Heterodera glycines
aatgcaaaatttttaaatttttataaaggggaaaaaatgaattttttaattaatgaatttaaacaatgttcgaattaaaatgcttaaaaatttatctaataaaaaaaattcagataaataggcaccattattttattactattgtacaatattatttgtgcatgtcgtggtcgttttgtttttgtgcgaccaaaaataacgcacaaaaaagggggagacaaaacaaagcaaaaaattttggggttggctgaacaaataaaggggaaaaatgccaaaatttacccggaaaatttttttttgtattatgttatgttgaattagttgtataatttttacaacgaaaatggaaatttctcgagcaaatatataaaaaaaatttgaggcttgtactagtactacactatttttaatgtaaattcctctcaaaaaacacataatcttgccaaaaaaatatgccaaaacaaatttaatactttctaattttggagggtgtaagctttcccaaataaattttttgattttttttaattcagaatttttacatattgaattgcagacctttcatgaaaagattgcaaattttgtaaaaaaaaatttttttcattttgctgggtattcaaaaattaaattattaaaaaaggcaaaaacctttctcatgtcaatgatgttgttctccagcaaaccgaacaggccccgcccgttgtccaagtgcatgtccaacatctcgcgagacagctccaacccgctgtcatcgacgctgccgctgttgtggccgaacagttgtgtcattggcagcattgaaaaattataatttaaaatcaaattgtttaattactgaaaacgaagaggtaaattaattaaaattactttaaatttatttacgaaatttttggaaaatttgaaacaatttaaattttttgaaattgttggccaagtcatatgaaaaagtttcggacgaattccgtttttttgattggaaacattttttatacaataaattgaaaaatctaaaaaaaatcaattaaaatttaaggcggatttcatttttttgcctgcataaaatttgagacatggcccgaaatttgagaagtatttgttggccaacaaccatcatcattaatgcatacaatttctaaggctttctttgtgtaaacaaaaattttttagtccgtatttttataagtgtgtgggaggtacgccgctctctccgccgtgtttctcctctcattgctatatatatataatatattgttgctaattttgataatgtttttgaaatgaacaggcatggggaacgtgggacagttttaaaatatgaaaaatggccaaatatggacactaaaaatgaactaaaactgccaaaaaatgcatttaacaaaaaactaaaaaaaaaaatctgattttcgggcaaaatgcggtgccgtcaaagttgaaacttgatcatttcaaacaaaaaaattgttgccgtttcccatgattaacgctttttaaattgcaattttaggcggggaggagggggcatttttctattttaagcacatgggaacagctggcataaacatagtaaacgctaactattttaggtttcgacagaggaacaaaaaacgattttatatttttttctttgtggtaattgacggatatttaaaaaaaatttaacaaaaaaaaaaaaaaaaaaaattcgcaggccaaacgaattatggatgaaggactaaaactatacatatttaacgcttttaaaagcagcatcaaaaaacgtacatatgattttgtactatttattgtacatgtgattggagtccagttgaaataattttgtgtaaataatggaccgaccgactcaacccaaatcaataataaaatgactgaaaatgtggacagtgagggggacggagataaaatggaagtggtgagggaaggggagggggcggggaatgaagagaaaagggcaccaccaaagcgccaacgctaacacttttaaaaaactaaaaaatttgtttttgaatttttcgtatacaggcattaaattccattttcacaaaaaaagataatctgatttctgaaagaaatacgaggctttaaaaaaattcagcaatcacaattccggccccagagaaatgccagaattcaaaaaaaattcagcaatcgaattccgaaccaaaaatctcggaattcgggtttttaattacctctctggcatgtgtgagcatgaaccctaatcaatagataactgcgctgcaaaaaattggacaccgagacgtgtggggcggaaacgcataaaaatgaaaatgaagcagcaccacccacggcatgtaataaaattgaggggggggggggggtgcgaggggaatgtgtatgtgtggtgggtaagcgggacgatgaatgatgggcgcggcgcggaatgccatacgacgaacggacagcggcggaaggctaaatgaatgtgaaaggcgtcgccggtgtgggggggggggggcttacattaaagaatgaatgaataagcaaccaactgctgacggacggacggtgtaattaaacatgcacataataattcattactatgtacctgtatattctctaattatcgccccgtcaccattaatccctctgtctccaattatccccccctttctgaagaggttgaacaataatccccc

SEQ ID NO: 12871 - DNA, 1341 bp, Heterodera glycines
caccatgataatgctacactctgtggaagaatataaaggagtgagcgcagtttatggccacataaattcaacccgacaaaatcgcctccaaaattgcttttcagtcgaaatccgatggatttttttttggatcaaattgaaattaatttttgtcgtttgcatttctgtgttcgcaaagtgtcaaagcatttaccattgtgtcgattaatttttgtttttaagttcttcgtcttttggtatgccttcgcttctacatacaatatctacttctggtgtgtctctgctgcggtctcaaccaatttgctgctctattggacgagcttctggacttgcgtcaacttccaagcggaccacacaaatgtgccgttggtcactttggtgtgtttgtttttggcatttgattttgcacattttccaacttttaggtgatcagcatcgtcatggtgtgttcgtccgtctccgagattttcttcatatattcgctgcaccagaagaagaagaacggaagtgctgtcatcatgtgaacaataagcacagagacgaatggaacgatgctggtgccaacaaaacataaccaatgcgatgaaaggacgatgttatgaataaaaatatacatatgatatatcagataacctatttcttcataaactgttgtattccattgtatattctattatatcagtagatatatatgtatgcatcgttgtataaactcactcagaaatctgctgactaatttgttttggagagatcacagcattttatccatatgttgcttattggagaaatcttcacaaaaaaattccggtgtccaatttaccggtccccctattttgcatatttacggatttttgtgcttaatgcctaggcgcctatttttgtgccggtgccctgacatttgcgatccgactgataacaaaaaataaaggattcatgatcagcgtcaaaaattagatttaaaaattagtaaaagaaatttaaggggggggggagtgacaaaacccagaagtagcgaataaagttcggcgtaaatttgaagagaaaaaagggtaatagtacggatggtacccccccccccccctttttcgaaaaacgaaatttttgaaatttttcatcgagaaaagattatattaggggttttaagggtcagagaatccgaatctgacattaattttgacctatgtcgaaccctgaacccgaattcgagcaaaaagtcgaaaaatcaaattatcgaattttttatttttggtctaaaaatggcttacatattgagaaacaaactaaaattggtcaattcactaataaaaaatcatttcaaccatttttagaccaaaaataaaa

SEQ ID NO: 12872 - DNA, 907 bp, Heterodera glycines
taaatatggttctacaatcacaatacaaaataggtaatgaagtcagacattatataattccagtcataatagcaaattaatcttccgcttcggcctttttcttcgcctccaattgcttcaaatcctccttgttcttcgtgagcatttcattggccaattctgcgaagcatttcttctggtcctgaattaaacaattaataatttgtgaagactaaagcaaaaaaaaatctctcattcaatgagaaaccgaacaatacccactgttttctgctctttttttacctcgatctgctgaaagtggtcgcagagtttcgtgactttctccagcaccgccgacaacaattcgttgtattgtgtgtccaaacgatttttgtagtccaaatactgttattaaaattcgaaacatttaatagtctatcactgcgaatgcattttacatttttgtgcttctcggccaattcgtcatggagtttgcccaatctcaggtcaattttgcccagttcgtcgacggtggcctggtgtttctgtctgatcacgtccaaactgtgcttcgcgtcgaccaatgaacgctgattgtccccaaacttgcgcttggcccgctccagttcaagcttgtgctttgacagaagctaaaccaaaagtcaaatatattaagggatttcgtcgcccgaaatttgcggactccaaatcgaattaaaaactaagtttttttcaatccccgatcgcctaaacagcattatatatgtgaagaaagtgattgtgtctaataatttgatagtcagtaaatttttgaaaaaatcatcaattattcaaacaataaatagaattaattatcctaataaactagaagattgtgttttcttaattttaataccgcttaggccatacatgcaaaaaaagggggggg

SEQ ID NO: 12873 - DNA, 1784 bp, Heterodera glycines
  unsure (1)..(1784): unsure at all n locations
tttttgagaaaaccgcgccgcaaaaaaaaaagatttaaaaagcaaaaaaaaaaggtcgtcaaattgcatggctggaccatttcgcaaaattggccgctgaccccccccccnccgcccctcgancccccctccagaccatttcgcaaaaaatttggtcgaccccacccctcctttttcatgtatggcttaggctatcagggttgaaaaattcaactnngaatccaattttggacataggcgtaaatggcgtggctccacggatttatatgtgtttcgatttcattttgactggcctgttctttgctgaactccaactcgttgatttcgttcaccaatttgctgttggtcactcgcattgattcctctgcttgttgcacagcacggatttggcattccatcatcgctttcagttggttgagcaaacgtgtcaatttgttgtcgtcacggcatcgctgaaactcgacaattgcctgttcgacgctgcactgttccaattcggccaggtgctgctgcagttcgtcctcactgaacaacggctcgcagatgacgcgaagacggctcatgaacgcgttgtagtcggaacgaatctgaatgatgtgtgtttaaaaattcttattgaattttttcatcatgtttcaagaaaaaaaattttcagcgactttttcaaaatttatgatgaagttctaattgtaattttttcaaaaaattttcttgtgaaaaaacttactaattgtaagaattttctttgaaaattttctatgtttatgaatttttataatttttcggggagggagaaacgacgcgggggaatgaagtgcaaccaccaaaagtaccttggcggactgcttgaaaatgatgggctgacgttcgtaaatgcgtgcctctgttttgttgaggttttcgtgcagcaacaccaactcttcgcgaacctaaaactcgaaaagtgaattttgtacattttgaaaaaacatttgaccgatttacgcttcgcgaccaatgcacgcgcttgttccccgctaattcgctacgtgctgatcagacgctccctctcccggttttcgttggccaaattctcccgtgccatcaccagttccttgttcgccaatgtgattcattatgtaattagagggatttggtcaaattttatcaagtattcccctcgaaactgaccaatgtgcgttccttggccgacgcaaccatttggatctcctcaatgtatcggtccatgctggcaatgtcattctcgcagtccgcggcttccttttcaagctgttcagaaacgcactgcgcctgtaaatgagatttcaagtgccgaattttatcatgtccccaacgcgcctacctcggcaatggcggcctcgagtttgtgaattttctgctcctgggccacacgccgtgccaccaattcgtcatacgagttgcagtcgatgctcttctccgccattttctgcacacgatattcctcgaatgcctccttgaatgtgtcttcccggtcgtacggttggccatggcctttggacgcaaactttttgaagcacgaaatcagcagactccattgaggatcatcacgaattttgtccaaattttggtacatttcgttctccatctttcaaaaataaaaacttaattttgttggcattttgccaaaaaacctcaatgatatcgatgaaccaatccaacgagccgagcaacagaccccacgaagttggcaaagtaatcgtttgcattgtgctctgcttcagcacataaggatagcccaattggttgagaaattaaaggcctaa

SEQ ID NO: 12874 - DNA, 1535 bp, Heterodera glycines
agtggcagatgcattatcgagagttgcaattaaatgggaacaaatagaaggaaaaagcagagaggacattccctttttattgaccgttgatgaagaaataggtttacatcgaaaaactatagaaaaagagacatttgaagatagtatactgtcccgagtactgtcacagataaaggcaagctgggtggaaccgatcgatgatgatgagttgatgccgtactttagagagagagataaattgtacctcgatgggaaaataattcggaaaaagttggggagacaaataataattccacagaaaatgagaaaaagggttttaaaaatgattcatcgggcacattttggcattgtgagatgcaaagcccgagccagagacttagtgtggtggcctaattggtctgaggaagttgaaaattatgtgaaagagtgtcacatttgtcaacgaaatgcgtcaaatgaaccgcgtgtggaccccgaatataaatggcctgaggccaaatatccattcgaacgggtccacgcagacctcgcgggtccaatttgggggacgaattttcttataattgttgacgcatattctaagtatccatttgtgtgccaaatgaactcaactcattcatctgccatcgtaaattatttacgagaagtattcgcattttttggatcaccacaatgtttggtaactgacaacggcccccaatttgtctcaagtgagacggagcaatttttggaaaatgagggtgtgcggcacttaaaaaccccaatatatcatccttcatccaatgggcaagcggaacgttttgtccgcacattcaaagaaataatggggaaattattggaggaagggatgagccttaaagttgcacaatttgtatttctccaggagtacagagtaactccgtgctcagcaacggagggggaaagcccagcccttagatttttgggcagaggaattcgaacggcacttgacaaaataaaaatgccgccaaatttgccggaggcaaatggtaacggaccctctggtgaggtgaccgaattggaggggccgtcgcgcgcacaaataaaggataaaaatttggatccaggggataatgtttgggtcaaagagcccagtggaaaatgggcaccaggcgttcttttacagcctaaaggagagagaatgtgggaagtaatgttggagggtaatactgtaacgagaaccgcccatttggaccagttaaaaagcaggagaattggacagtcacggcacatttgagaaaatcatcagctaaacacacactcaaatttgtacattatccccataactcctattaaaaaaataataataataattaaaaaaaaaaaaaatttgctttaactttaattcctcgttttgcaattgaatttcgcccagtcgatttagaactgcctttgaaatgaattttgaaaataatgatgcagagaatgtccaccccaatgagttggaaaaatggaaaaagcgctgaaggatggcataaaaaagtcgcgcagccacgagggcgagctaaaaaaggagt

SEQ ID NO: 12875 - DNA, 1652 bp, Heterodera glycines
attaaaaaaaaaataataataataataaataattgtggtgaaaattaatatggaaatgggcaggaacgtgttatggctgcgttggtgcaatcggtcgatgagttcatggcgggcattccagtggaggaaaaggaagagaaggagcagcatttgaagagcccaactccggagccgaagagtccaccgcccgagcaaaacccatccgagaatggagagtcggaagagactttgcgctcagaagagagtgccaaccagccagggccatgtcatggtgcgcctccgatgcggggcaggggtcaaggaggccctgggcgaagaggccctacgatgggaccaggccaaaagcaaaagcgcgtcaattatttggtgcggcaattgggaaaagaattccacaatgggccaaggagctgccaatgttggtcctgtcggcgtggaaagaactgggatggtcgcgggggacgaggaggtggcggcggttcgggccgcggttacgctggaggacgcggaggatacggatgcgctggtggacacgaggcacatggacatgaacgcggtgcacatggacatggacgcggagcacatggacattggcgcggagcgcgggggacataccatcacggaggacaaggccatcacggaacgtgaggccgaaaggggactggggacagttcatggaggaggggagggatgttggatctgcatttttggcttaattcattttttccattatttatttgtttctctttttttcttcgtttctttgacatttcctatgttgtaatttccctggcccttctgctcctcactcactcataaaagtgaccccttcgtccaatccatcggaaaatattcttccaaacaattttgtgtaattccatctgtttggcccctcccatttgtcattggtatttaagtctttgcttattctcttatcctcaggattttactcacccattcgttgactcaggttccctgcctaaagcgatacaactcacttaacaattggctttgttttcttactatttaaaaagcgatcattctttatttaactttgcatttccacttttgatttccattttaataaattgtcttaaaagaagccttgctgaaaagtaaccgggaaaagtccagagtttgggtacggacacaacatcaataaatataattttttttattaatttaaactaattatttgaactggacgccaagagaatattaattattaaatcaaatatttttaatttaattattatctcattttttcatttgctttatgaacaattttatatattatttattagaaatactataaacataaaaaaattccaagaataaatgaatttaaaaaaacaaaatatttttttcctcagcagaataaaaactaaaaattcttcaattgttatattattttaaaaaataaaatagataaaggcgaaatttgtcagttcctactggaatttagcaatgcaataccattaaaactttagctatttagaaataatttttgtttttattattaattaaaacatattaagaatttcgtcataaataatgctgaaatgcatttttgaaaaaaataagttaaaaataaacccaaagtaataaactttttttatttaaatttagttgggatttataatctatgcatctcc

SEQ ID NO: 12876 - DNA, 1369 bp, Heterodera glycines
  unsure (1)..(1369): unsure at all n locations
aacaataaataaaaaagccataatataataagataaactaaacaaaaatataaaatcagcgaaaaatatttgaagaataaatcaaattatttatatactaaatgtttcatcaaaaactttatttaatattattcaaaactaattaaaacaagtaattatttatagaaggtaaataataaattctttataaaatagataaaaaagggtataatatgaaaatattattaaaaactattatattataccttaaaaataattttttgcaattataagcgcattttctcaaaagaatggtgaggaaaaggagccaccactccgacacgacaacttcaagtgaggaatagcaaatagatttataaatctaaaaagtgttaggcaagggcgtagccatccccttggctttgggggtctttcttttttaagtcggtttttaggggtgtatttttggtttttttgaaatcccgaattatggggtgtattttacaaaatttttcgccattttggcctccatttttcaaaaatatgctaaaatggaggtccggcggtgccgataggcgccgccgggaaaatttttgagtattttaatgctattttaatggcataataaatatataaacaaatgtattaacttattatttatgaaaaatatattgtaacaaaattataaataagcaaaatttaataaattttttaatatttaattaaatagattatgtagtaacaaaattaatcattcaaatttttatattaatattattaagtattttgcttaattccgaacaatagttgaaaattaatcaacagcgaacaaaaagaacactaaaatgaatagattaatcaaaaggataatcgaaccattaatatgttaaaataaataattcaaataatgcatattttaagactttaacttgaaaagtagttgaagagatgtaggtgcgcattgatgcatgttaaataatatttaataaaaaagttaaaatcaaaaagaaaattttaaatagtattataaatttaaaacgaaatagtaattgcaaaatagccataaatttaatattgagttaaacccaacaataaattaaaaaaagcataaaataataagataaacaaaaaacaaagaaataaaatcagcgaaaaatatttgaagaataaataagcgattttttagtcagaaaaaaataataaacacaaaatgaaccaaaaactttattaaatatcataattaaacttataattaataaataattctttataataatatatcaatatccgctataatataaaaatgttagaaaaatactattacattatcaaagggtaataaatttttgcaaacacattattaattanaatatctcanaaatgaattatt

SEQ ID NO: 12877 - DNA, 5480 bp, Heterodera glycines
caaactttgataccaattctgcgcaacaggtgcgccgtaatagtgctgaagaagctgaaatgacggttgtcaagcactgaaaagtattacatgatggcatcctaccggttggggttgcggagcaaacggaaaaacgaattcggcactttcctcggcattcttgggatgttcggaggacaagtcctggaacaaagatgacttttaaaaaggttgcaacaaaaaatacctgaaatttgttgctgggggcaccggcaagcgttggaaagtcgcggtcgcttttctgctgctctcgagaagtctgctggctttgggacaagctttgcaggttcaactccggctgaacagagggcggaggttgcggctctgaaggaatgttggtgtacaaaatgatcgacaaaatatctgttcctaaatgccacccaaattggtacttttccgttttgggcctacacatcaaaattttaaaaaagtttcacattcaaaatttatgcgcaagatcgaaagtgtcctttatcgctaatttaatttatgctatgttatggtatacaattgtcgcctaagtgcgccctttgttgacattttataaaatttgaggtgtaggcccaaaacggaaaaataacataaatttttaaaacgttatcattatgaaaccgatgaaaacttgtttgtcatatactctatttattcatttgaggacatctacgaatatagtattatttgatcttcatctattcatttttgtacctcgagctgcagtgtaagtggcctatgcccttctgtggtagtttttatttgacattaaataaataaataaaagggtattacaaaaacatacaatttattacaataatataccacctcacgtttggcgatgccacaaagtgtcaccgcaaattttaaaaactttaattggaatatagtataaacatttggtaagattttccaattaagcggaggaaagatccaacttaacttaacaagaagtttttaggagtagaggtgattttcagactataaaaaggtgcttatgggactggttttcatttttaccagctttgttaatcaaaaatagaacaaaaatagttttaacgcgaaattattcagtttaaatcaaagatattattatgttctccaccgttctgattgtgatatcgacacgttcctataatcttacatgtgcaaggggtgtctcagcccaagggccatacggcaaacaattgggacaaggagggaggggggggggggtgtctcgggaccgattttcatacgaaggtccaaattttttctccggcgtcgacctttttttctgctctaacaacctttttttgcggcgcgttttttccaaaaaaaattttggggaaggggggtggcgggcggtccggcggtgccgacaagcgccgccggaaaaaattcatttttttcgctatgtaaaatttgtcaaaaatcaaactttggttggaattctgcgcaacaggtgcgccgtaatagcgctgaagaagctgaaatgacggttgtcaagcactgaaaagtattacatgatggcatcctaccggttggggttgcggagcaaacggaaaaacgaattcggcactttcctcggcattcttgggatgttcggaggacaagtcctggaacaaagatgactttttaaaaggttgcaacaaaaaatacctgaaatttgttgctgggggcaccggcaagcgttggaaagtcgcggtcgcttttctgctgctctcgagaagtctgctggctttgggacaagctttgcaggttcaactccggctgaacagagggcggaggttgcggctctgaatgggcattggtttaaaaataatttggcaaaaataatatacgttttgtcgtcgtgcgacgtttcgccttcgccccgtttcgttgcgaattgttcccatgttcagtaccaccacttctgctgttagagccacgcattgagtcgcggtcgcctttccgttgttcacgagacaggttcaactccggctgattgtgagcagagggcggagattgcggctcttaaaagacataagttaaaaagtatttttaactagtttttttttttttgattatacatcgtattgtatccatatattgtacagcaatctttgggtttgtcacttacaccctttcaaaattctccaatcaaatgtaattaaaaatcaatcagaaattcttgttaagttttccctgatgcataattgtgatattattattttcaaaatgaaaattttattgttatctattactttatgatgtcaaacccacgctgcatttgagtatcattcttgttggtagttccaataattttttaagtgcctacgttttgtcgtcgtgcgacgtttcgccttcgccccgtttcgttgcgaattgttctcatgttcagtaccacaacttctgctgttagagccacgcattgagtcgcggtcgcttttctgctgctctcgagaattctgctggctttgggacaagctttgaaggttcaactccggctgagcagagggcggagattgcggctctaaaaatacaaaaaaaaaacaatctttttttcggtgtttgcgtttttgggctgtaacataattattgcaatattttttttattagtaacccaaagtctttataaaaagggtgaattgaatgtgtatgcctacgttttgtcgtcgtgcgacgtttcgtcttcgccccgtttctttccgtgttgtttccatgctcagtgtcgacacttctgctactactgccaaccattgatttgacacctctcattcgctgtgtgtttttcttcttctccgttgagtcagtgaaacttttcgactttttttgctggtccaacaaacagttgtagtcttcggcgtggaattcgccaatgtttgagaaactgtcgcccgtttcgtttgagttgcatgcgaatggtttctagacaaagaaacatcttggctacaaaggtttttcaaaatgaaatgagcacctcgtcgtgtttttcttggaccgcggaagacgaattgggtttgcccccactgcggacaaaagtgcgctcacgctcccctttggcatgagtggatcgaccacgtttattacgggaattgacaaattcgcgaggaattgaacctgcgaagtaaatgccattgcaaagaatgtaaaaggtaatggaaaatcacccttttccttggcatctgatgtgcttgttggccttgtaccaaattggtctttgtttcttctattgaacaacgagcgttccgaaggctttcgaaatggcaatgggtcgtcccaatgcgattccaattcgccgcagatcgatgggggattccaatgatcggcatttccgaagcttgtaactaattgaaagtgcaaatggatgacattagataggcaaaaaataaaaggtagaaccgtttgaggcggcgttggtgctgggcggacgggccgagtgctttttctccggctgttccctgtccgtggaaactcttgcgccccgttgcaaaacattgtatttctgagccgaactttggttggaattctgcgcaacaggtgcgccgtaatagcgctgaagaagctgaaatgacggttgtcaagcactgaaaagtattacatgatggcatcctaccggttggggttgcggagcaaacggaaaaacgaattcggcactttcctcggcattcttgggatgttcggaggacaagtcctggaacaaagatgacttttaaaaaggttgcaacaaaaaatacctgaaatttgttgctgggggcaccggcaagcgttggaaagtcgcggtcgcttttctgctgctctcgagaagtctgctggctttgggacaagctttgcaggttcaactccggctgaacagagggcggaggttgcggctctgaatgggcattggtgtacaaaatgatcgacaaaatatggttagccagtgccaacttttcgaaaatttcttaaaattcgttaactcacgctagggccataatttcttcaaaaatgatcaatgaaaatttatgtgtaaaaaataatttttataaaataaatttaattatttattgcacaataaattggctacatggtttcagcgttgggggccggggaggaaatgatcaaacacaaattgagaatgaaaacaataaataataagggcaagctcaatttgggttgccctggctgatcttcgattagaaattgggaactaatttgccgttactcaggatttctgggtttttcgtacaaataaacattcattttgggtgggaaataggtaaatcaacaaaataatggatagttggagaaagatggccattcgaaaagacgcgcggattttttcaacaaatttgaatatgctctcccccaccgctgcaaaataaaatgactattttttattttgctgttcaagcaataaatctttttctcctgaattgtttttcaaaaatttcagcgacgctgaattactcatttttgccttttcagaagcatgacggtggtgccgataggcgccacctggcaaattttttttaatgcaacgacctagtattgaaattccataatagccaaagacaaactttggttggaattctgcgcaacaggtgcgccgtaatagcgctgaagaagctgaaatgacggttgtcaagcactgaaaagtattacatgggcatcctaccggttggggttgcggagcaaacggaaaaacgaattcggcactttcctcggcattcttgggatgttcggaggacaagtcctggaacaaagatgacttttaaaaaggttgcaacaaaaaatacctgaaatttgttgctgggggcaccggcaagcgttggaaagtcgcggtcgcttttctgctgctctcgagaagtctgctggctttgggacaagctttgcaggttcaactccggctgaacagagggcggaggttgcggctctgaatgggcattggtgtattgcttttccccttgacaactttatcatttaaataaataataacgaagcatatttgtaatattttctttttgattaattttaagagaagggcccgttgtaaaaaggaaggagtaccttcgtaattgtctccgacaataattaagaacaaaatataacaaaaaaaacaaaatcaaaaaacaaatcttttggcttattttttggttggggattatctcaatttgtcccactttttcgaataaatattcattgctaatccgtgggctctgcccaccatttcccctttttctattaatccccacaggcattttggtgaattgcactgatttagtcgggaattggcttggcgttcttggccctgttcatcgttctgccccccacggcccgatcgtgcccaactctcgccgttgtcccatctgttgtccgttgctcatccggacactgtcgcccacccaccgcttggcccaccaatcagcattgttcgcctaccaccaatcacccggacacggtggacccgcccatcccgtttggccgaataaaaagaaagaaggatg

SEQ ID NO: 12878 - DNA, 3319 bp, Heterodera glycines
  unsure (1)..(3319): unsure at all n locations
cttcaggtgccctccccgaaatttnnttttctggatacgctcacacaggtacatgttcatgcacagactagtaatttttattttgtcatagtttttaaatattttattttctttgttatattttattttttataaatatgttgattaatcccgttctgattctcagtcctgaatccgcttttttaaataattctggctcaaaaattctcgattacacgatttaattatattttattattcatagaaatttaatattttctctttgattccgcaaaaaattacctaattttaaatcaatgtaggccagaaattgctcatcgttgtatgtggctggcagtgaatgggaggtatggcttgtaaaaccatcagatttgattacgatctaaagatcattatttttgatatcatttaaattactcttacattcttgaaaaaaaatccattttcattttgggcgttggacagaatgtgtccgatttcgtggttacaaattctttccaacttaatatttttgaatgaatgcaattatttaaggctataaatgtaaaaaatacagtgaaaagtgaaagataaggcaactcgggacgggacatctgggaaaactataggtttttgatcagagtgccaactgagtttcgaatcaaaaaatgtctgctttgaggacccaaagttggtgttgactaaaagttaaaaaaattccagcctctgtctctaccccctagcatgggggcttctttttggcatatgcgggacatttgagtcccaggcacataatttgaggggggggggggaaggttcggatccggacggagtagcttatttttctattacttttgaattctttcacatgtttttaattaattaaaaatattttttattttcttaataataaataaatttttaaattcaaatcagatttttctgatgaataaggttttatttaaaataaattaattttttttatttaattttaatgtattatattaattagaatttacaaaccattaatttcatttcgatttcaataaatataaataattatatgcttcaaattatttttaataaataaaagaattaattttttttataatttattaaaattattgttcttttcgagattattaattctttatgcacaatggtatctagttagcgttctccaaaagagtgtatagctttatcaaagtccagggccaactgttacggacccactaattactcatacacttacaagctcgtcggtaagcgttagatcttggtccgcggaaaagtgactcttctcaaaggccttcacctgaattgctatttaatttattttgaataaaatgtcacatgaaaaacagcagcaccttacaaaatactggttacatattttccaacggtttcatatttaatatgaaataaaaatttattcaaactgaccgaaggcatcgaaggtctgccctgaatctcaaagctttgatcaaataagtaaggtccggtttcaaccatctgtttcaatgacttgaagagggattcggactcttaaaaaatattggaagggaaggtattcttatttgcaaagaaatctttatcaaaaacagcaaaaaagcttcatctaaggccaagggttaggggccaatacgagttaaattttaaaaaattcaaaccttttcttaaatttcctaaaaatttaagaaaatactacatcaaacattgaaaattttaaaattgatcttttaaaaaccattttggcaatttttagaaaaaaatttgaaattttatttgaataaaaaatatatacagaatgttatgaaagattggacaaacccaaacgccttccattgagcatgcaaatgatttggccagtcaccaaattgacaccggcatcatgaaatgcgtagttgccgccataaccagaaagccattcgccataagggtgaaatcaatccattgcgatctgggaaatttggagccctatttttctttaatttttggttttaaaccgagacgaacccattgtatcacttgagtcaatgcgagtggatccaagcgcctcttttattttaaatttataatcattctttcttttaatgataaaatgacagttttatcccatttctttctgatataacattttctactgtgggtcgttggtaaatagatcatctaacgtaaaaccaactgttcattatcagttccaaagcgcccggcggctgttcataagtggctgctgtaaaaattataaaaattaacatatcggattctatgaaacaaatttaatatgatttaattttaactctagaaatctaatccaaaaattagaagcccaccgtcatatcggttacagaagtcgacaagggagcaaaacagatacattattgccttttccactccttggcacaaagcaaacttaatattaaatgatttatactgggatataatatagaaatatatttaaagtaatttttatgttttttgcaacattatttatgttttttataggaaattttaatggtagaaacctcttcatattaccacagtagctccagtcgtcgttgaatatctattatttatttttagatattagagtttaaatttaattacttgaaacatatcattttcctcatcctttcctttcgtaatgtcgatcccttcaaggaagctaaaaagaatttaatattacatttactgatagatatttacaacgctattacttacataggtgtacgcggcagtcatatacgcttcgcgatcacttcttcctcctttttttccccgtagtgggccatttcatttgcgatgcccccttaattttctacattatatattgcttccctgggtataagtacatcaggaccgtatctaggggggggggcacgtgccccccgaaatgaaaaatcaaaaattttttcaagcaagaatagccaaattttctgaaatgtttgcaccttcgaagagcaaaaaaaaagctcttcaggtgccctccacgaaatttttttctggatacgggcctgaagtacatgttcatgcacagcctagtaatttttattttgtcataattttaaatatttgattttctttgttatattttattttttataaaaatgttgattaatcccgttctgattcgcagtcctgaatccgctttttaaaaaaattcttgctcaaaaattctcgattacatgatttaattatattttattattaatagaaaattattattttcctttttctctttgattccgcgaaaaatgcctaattttaaatcaatatagaccagaaattactcatcattgtaaaggctggcagtgaatgggaggtacggctcgaaaaacca

SEQ ID NO: 12879 - DNA, 1676 bp, Heterodera glycines
  unsure (1)..(1676): unsure at all n locations
taactgaatttttatanttttttaacaaatatttaataattggcttcgttaaaatcacttgttaagcaatattaaaaatttctttatataatttaggaatctatttacgtgcaaattcctcgccacaattttatgcggcgccctgcaatgtcctattcttattcagaaaaatttggctgttcatcagtaaaaacacttagataacatttttttaagtataaattaagaaccagattcctccggtccctgagcagatggcggcagtcagtgagcacaatgtaaaaaaatgtatttttaaaaagcaattaaattgctaattgccaattttttatggaagattaaataataataaacaattttttcagctcattggacaaatggaggcggctgccaatccgcataacgtaaaaattaaacaatcttttaataatttaattaaaaaatacattttcaaaaatcatcttaacagcaaaatgaatcggtggcggcagccaaccagcagccaaacgtaaaaataacaaaaaaatattctattaatttaaatgatttttattatagaatttaattaattttaaaatttttcaatcattttaaattgtattataatggatttattaaaataatattaatttattttttaggtccttgaagaatcggtggcggcagacaatcagcataacgtaaaaatatttataacaatgttttaaataattaagaattgttaataatttacattttctggttttgtaaatgaatttttattaggaaatgaataaatcggtggcggcagccgatcagcaggaagtaattaaattaaacaatatgacaaagaccgaattttttttcttttttgccttaacttgtgtcccatacaaaattgtaaaatatttgacctcataaatttaacaaaaatacaaattatttttattgtatttcaaactttctatatttgataaaaaatcaaaaaagtttaatcatctgtagtatcttcacaattataaatttggcaaaaatgtgatgtaaatcactataaaacaaaaaaatcgggtcagttcaaaaattttaaaaatttctacggattttcaaatcttgaataattcttgaaaatgtgttaaattttgatccttgatataatgaaattttttcctcggcggcgcttattgtttattgtttattcataaaaaataaaaaagtcatcagaagggcgagaaccacttactctgacgactaaattcatttttctgttcatgtgccgtcaatgcaagtgccatttgaattgcttaacgaatggacaaaggaaaagctgacattgaccaaagcaaatgaattggacaaccgatggataatgaagcgttgtaaaattattggggagaaagaggagaagcagcagaacactgtgttcatttggcttgttgctggcactaattgcattgggtgagcaattaaaaaaagcatttgatttttatccgaatttgaattttgcgcttaatttaggccattgtctccgccaccggaaaaagtggaagaacaaacgggacaaagcatcacaaaagggacgtcttctgctgancaatgagtgacggacaaacgaaacaanatcatgaacagacgcagaagaaatgaatattaattgaaatgaccngacgatcataattcatcagtgatcaagtgcattt

SEQ ID NO: 12880 - DNA, 2983 bp, Heterodera glycines
ttcatgactataaaatgtttgttttttcgcttttcctctcagtttgaaaaaaataaattttctaacgcaataattctgcaattattcttccctctgtgacgacgacatcattcggagctcggccaaattgtgctattgccacaaaaatgaacaaacggtaaaagaattttaaaagtcacacaaattcatcatttatttaactaaactgttttccataatttcagttggatttgcaacgacgtttggatggacattttcccatcgtttgaccatgcccaactcggcctcaaattggcacttctttcgccacgtttcaatgcgttggtggacaaacatttcaacggcaaaagcgaatcgttttctgctgacaaaatgagtgatggacaaaacaacaaaaacagtgatcaaccgcagaagaaatgtattaattaagaatgaccgaccgatcataatcatcagtgatcaagtgcattttatgaagaacaacctctcaatttcggtaaataaatcggacgcataaaaatggcaaaaaatgtacgaaaacaacaacttagatttgcacaaaataatgaacaacaaaaaaaaacaacttgtttttcgtgcgtttcattccactgggagctcaggaaaaaaatagggcaaaaacctaaaaatataagccctattttcaatacgattgtttgaaatttgccgaaattccctgagaaattcaatgattttgaaaaaatcattgaatgggatttgcggaactcaggctatatgctccggctataaattttacaaagagtttaacaacccacgcataacacaaaaatttttgctatctatcgaatgtatgaatttctccttgaaaagttatgacttgggctgggaattatatggaaatccatattttttttcctgtacagtgggatgcctgaaacggacgacacccaactcgtactgctccaactcgtactgctccaactcgtactgctccaactcgtactgctccaactcgtactgctccaactcgtactgctccaactcgtactgctccaactcgtactgctccaactcgtactgctccaactcgtactgctcaactcgtactgctccaactcgtactgctccaactcatactgctccaactcgtactgctccaactcgtactgctccaactcgtactgtttttcgacaaaaaaaaatgtcataacttttgttaaggtcgaccaaattaaaaacattcttggtatcattcaatagcctttaaaattctctataaaatgagtattagctgcgttttgtttttttcctctaaaataatttttaacaccatatttagccaacttttgaaaacaaaaaaaaaaaagattttttcgaaaaaaggaggcgagacaaagcgaaaaaaacaaatattcaaatttttggaccataactctttttttttctcaaccaaattaaacatattttgtgaaatactctattactaagccaaaatcggacgtattaagttgctggcttattgtgacttcttaatattaattcatttcttctgcggctgatcactgtttttgttgttctcaacccaacagcattccaatcactggcactcaattctcctgcattctaatcactgggactcaacccaccagcattccaatcactggcactcaattctcctgcattctaatcactgggactcaaccaccagcatttcaatcactgggactcaattttacatttcagaataaaagaagccaatctataggttttcggggtcgctgatcgcgaatccggcatcgatttcggccaatcccaaatcccggaccctaattcgaacaagaagtcgtaaaagtaaatttttttatttttcatttttagtctaaaaatggtttaaatgatttttaattgaagcactgatgactttcaattagtttccgtgtatttaaacaattttgaccaaaataatatgaaaacaaaaattttaatttaaacggcgcgctccgcggcgcaccgacggccgttggcactgccgtcggatgggcagcagccgcaacgacgataaaagagtcaaattttcaaaaatgataaaataggggttctgcggtgccgttaggtgcctgccgagaaaatttttatttctaaattttaatccatttgctaagaatattgcttaatttttcacaaaatgtgtccatttgtaaaattttccatttccaggtttccgtcatatcagtacgccaaaattgtataaaaacccaattcatttttggccaattcgttttttgaaatgacaaaatatttttgatttttctaaattttaggaaaatttggatcctggccgatttttggtctcataattataatatttagaccgttgttttttatcgccccttattagctgatcagattttccaagcccttgtgccacggttggttgccattgtgcacgatttcaccgccagttttcgctggtcgaaattggcaatttccatcccatcaaaagctttgtgcctccgctaccccacgacattttgctgtatttttacatttcgtccgtcaaaagtgtgtgtgccgcaaatcaggtggcattgtcgccggcggggacggcatcaaacggcgcgcgccgcggcgcaccgacggccgttggcactgccgccggcggatgggctgcaacgacattgacacagcagccaaacagtaacggtggtttggcgtcaagttaggtgtggtaaatggtgggttttcgaaatttcactcatccctcggtttgtgtttttctacctttctctactggcacgcccgtagcttaaaaaatgacaactggaggaggactagtggcaaaaacaatgtccgtaaaaagcgtcaatgattgtttcaatgaattatcaataatgttgatcatttgtttatcttttttcacatttttttctatccccgattttgatcgttttcaaaaaatccgactacccaagtgccattattctgtgttgcgaaattg

SEQ ID NO: 12881 - DNA, 1613 bp, Heterodera glycines
  unsure (1)..(1613): unsure at all n locations
acataactttaccnttttagacaaatatccaatagggatccccaccccgcgctcgaattaatcacttttgaattgtccttcccaattaaccataaccgcccctcattcccttatggaccgaccctcttgacattcgtggttgtgtccctaatcatttggttcatgttccggtgcctaaaaaatcgtccaaaaaaaaggacgaattgggccccacctccttcaatgatcgccctgcttttccttttcctcatctttaacccaatcgaatgccgccctaagggcttctcaaaaactgccaaaaataatcctggcgccctccgccgttttggaaaacccgtactcgcccacggtgcccccgttttgtccaccatggccctttatctaggctttgacgccttggcagaatttatccaaaaagaagaaccggagtcgaactctttcctttacttgaccggttgcttggccttgatcattcttttcgcccttctcaaattgattatttcaatttgccgttcacccccctgcacctcggcacccacgggccagcaacatcataccaccgaacctccgtcgatcgaattgagcgaaatccgatcgaccgtatccgaattgcttaaaagatccgaccctccccgtcgcacgaactcatgaaccccccccccttgttttccgttatttattttcaacgcgacaatttatttacagaatgaaaactcgccaaggccctaaattatcccaaaattctctcaaccaagtcctttcacacctccaaatcgcggcaccaatggaagagccaattcagagtgactccgtccaaaaccccacccttccacacgaaacccaggcgactactgagtcatcatttcccgaaaatgccccaacccaaacccccatcagcaacaaaattcccgaacacaacaattcccccgtttcccccctctcggtctgctcttccaaccccgagcatcctcatgtgaaattcgtcccccgctcgcctccctcccgatcccagtcctgcccgccttcaaaattagcgcaattcaccgctcacggtcaggtaaaaattttgaagcgtttggccccctcaataaatcctcccacccctcgggttcaacgcaaattgtgcgtgccacttgcacgccgcctgcacatcccacaccccgtccccgcggcactgatcaaattcgtgccacattggaaccgaacccgtcaacagcagggcaacgaaagaaaggaactggtctcgcggaagaggaagatgacagaaaacccaattttgatcagaaaaccgatccctcttaattctatctcattcccgcctccaattcgtccgctcttcccgttgagttcttttgcctacgttccttgtaccccctctcatcactcgcgccctccaaattatccccccttccgtcgccgggccggagtgtcgcgtcccgaaaattaaacgctaaatttcgtcccccgagtgagtcatccattccctccctttgtgaatcgccgcctattttttcctttgtattggccctaaggacaggtgcagacaaaaatgaacccccttttttctcacgancaactccccccccccgccccccctttttctctacatataa

SEQ ID NO: 12882 - DNA, 3005 bp, Heterodera glycines
tttttcaatgcaaaatagtgtaaacaaaacgtttaagttacgaaaacagcacacattgacagcatattagggtttgcaaatactgaatttccttacagagcccccgggggattttgctatattatgatatctgagattgagaaatccctaaattttggcaactattttgggcatagaaaataaatattcggagcacaaaaagcgattcacgatcaaaatcaattgttttccgagaaaaggacgtggatgattgattcattaaagaaaaaaatttttttttcacaattttaagtttaattaaggattttttaaatatttaaataataaggcccacattttttgtccacaaccccctaaaaattctcattttttggacaatttgttaaaattcaattcaaagcagacccggatcatgctcaatgagcagttcaacaacatgcgacggtggcatcgaaattgtgttcggcagcaccaattgtttgtccaaaatcagcttgcgcacagcgtacggcgccttttgcacctgcgtattgatggcggaaagcagtgcgtccaacacctaaaacagcgcaattttttgttgttgagaaaatggcattttatatttctggaaaattgaataaaaaaattagaatccaggaaaatgaggagtttaaaaaaacatatttaaaatgccaaaacaaaatcggcgtatgtaaactttttgtttcgtgaggttgggtccggtttttttacagaaatgtgaattttctgaatttttgacttttttcgagtccgggtttggggttcaaaatggatctaaacgaatgtcagaatcagttgcccgacacttacaatccctaaaacgaattgtctcgagaaaaatctaagaatttttatttcaaaaagggtaggtggtgtaccacaggtattatttattaccaaaaatggtaaaaaaaaaatatggcacaaacaaatgccaaagggttaaattctgaaaaacaaatgctgcatttaaaaaaaaatgccgtgcctttctgtccacagcgtcattttcgttgatcgctgtccgtacatacagctccaatcggtccaacagatcggagtacgagttgatctcttggcttggcacggtcagtggcgagggtttgctgggcccagcagcggtgacggaggaggacgagatgggcactgctggctaaattaattgttgtaaaattggggacattaaagcatatgagtcggacataaaataggaaaatttttaaaaattttagggggtgggtggaaaatggaacataaaaaatgaaagaaaatggtgccacggtcgaacaattctaatttgaaagacatagttttttcgtgcatttgaaccggttttgttgcatattttgaattttgttggaattggttcgaatccgggatttagaatagatgttcgagtcgtattctctggccggttcggaaatttagaaattttttttttttgaaaaaagggggacaccatcggtagtattaccaatatttctttctaatattaggcataaaaatcccccaaaaatcaacttctcttgaagttttggggtcctcgggaaccggacttcggttgaccggtggctgtggccccggatgatcagtgggccgtgcctttttcggcactggctcttcaatcaggcgaatctcatcgtcatcattattgttggtgccgttctcctcctcctcgtccaacagaatacagtccacgttggctttgtctgcaagaaaaaaggcacaaaatgaaaatgattcaaaattgaaaaaatatttctattagaaaaactaattagctttcaaacagttaattccctgggttcgcatttttttaaagaccaaggcctcaaatttaaaattttgacaccaaaattacaatatttctaataaaaaaacttttggcacttttcttagatgtttgagcaccgaaataaacagcaaaagtgccaaataaatttgtctggcgccgatacttcaaaatcaaaattaagaaactgataaaatcttcaaaagtttgtccaacatgcgaaaataaaaaatgtaaaaaaaggtttttttctgtaaattctaattaaatgagtcaatttccccgaagggctgaattgttggcattttcctcctctacctgtgccatttttcttggcatcttcattttgcccgacaaccatgacatcatccccattttcattgtcctttcgatcgccgcttttgttcaaatgttgctggggaagagagaccgtttgatcgccaacaatggccaatccttcgccaaaaccattatcaacctttgaaattcatattttaatctttttatcatcctttttaatcacattgctcagttccaccacttccatggtgttgtttacgtggtgattttgtgtctcaaaatgattgcccgagggctgacgaagttttgttgaagaggaggccgatgaggccatatttttgaagcagaattcttagcctaaacgtgttgtcccaatgaagaacggaagtacaaacaaattattaagccttccaataaaattatccaaatttaaaattggttttaaattggatttttagggttaattaaatttaaattacatgctaattaacgtggttcagtaaaccgtacaaatacatataaatacgagattttaggcaggtaaaaatagtgaatttttcactcaactatttttgttggtggtggtgtggagtcgcggctcttaaaacacaagacggacgcggaataccgccggtgttacagtatgccaccgcttgccagcagtagtaataggaacagcggttgtgaaaatggtggtggtggtggtggctttgattccatggtttccatcatacacatacatacatacatacatactcttctgctgcctcgcaagcgttcatccgccatccgttgttatcgatttgtctttctattgctgccccacactctctcgtcggtggcccacatttctttttctctcctttctctcgccctctctcattcatta

SEQ ID NO: 12883 - DNA, 4152 bp, Heterodera glycines
attttcaattttacagtaccccatgctgtaacccaccattgctgtaagtttttctgatttagtcgaaaaaaaacttaattttttttcagcataaaactgcccaggttaaatttttgacagtttcgataattttgaatccccaaaaaattgaatttgaacaacagaacatgcccctgctgctgcaaatgctggtaaaaaaaacaaattcaagaatatttcttaaaatttcgactaaacattattttttttcacagctgtccctgctgttgctgctgtctgttttttttaattttttgaattttcaattttaattttaattttgcgttcaatcttaaaggcggtggtggtggcggaggccgaaagaggtggaataaaaaaaaaacaaccatatgcattttaattttaaaattcacacaaattttggacccttaaatgattggtccaaattcaaaatttcaccaaaatttatattttttagctgaaattacatttttttaaatttaaattttcctaattccaatcagacgtgatgttcgcctgctgtggaaacgtgccgtgccatttccccaactgaaaatgccggcttcatcttctcccgcttctccattggattgccaatgcaagaacaatggcagcgccacggatgcgcgaccggcgacgacaaaacgcggcattgtcatgctgaatggcttcatggcatcaccatccaacgacaacaacaagtcgaactgatcgaatttgtgtggtgtgtggtggtggtgaaaacgaaaattcatatttattcatcgaaatttatatatattttttgaattaggacaattttttattgcaaattttttgttggtgttattgtttcatttgttaaatgacatgttgttttcggagatgcgtaccacctatatttattgtatcttattgtaatattttaaatacattaatttatttggacaaataaattttaaagcaaatgaaaatgggactaaatcttcagaacccgaacgggcatacactttttgaaaaaccgaaaattcaatttttccgaaacaatgcttcacgggtagacatcagtttacaaaataattttgcaaatcaagaggtccccttttttgaatttgaattttgaatgggcgccatttttaaattagcgccaatatttgaatagaaaatgtttggtgatttcgcgtctaacgggaaaagagtcttttcagagacgctgcaatgaagccgctctctcttagggcagagacgcacatggtcatactcactggtcactcgctgcatcaggtcccagtgcagtgaatgttcactggtcacatacgtctctgccctatgagagagccgtaaatcattcactcgttttggtcaatttggtatcgatttgttttgtacatgctattccattccgatgctaagaaaatttcgaccatttctgttcccggaccctccaaaaaattgagacttcaaatttcattggtgactttcaatttgtttccatgtatttacataagccgtttgaaccaaaaatgtgttatttgaaaaattaaagtttctattttttttgttcaaattcggacctgggattgaattggcggatgaaattggtactgtattcgtgatcagcgatccctaaaacccttaaaaaaaatttccacatctttttaaaatttctaaaaatttaagggtggtttaccatcggcgtcattcttgcctttgtttttctaaaaaataatttaacaaggcttaatccaattttacatattgcacattttttttctcttctgttgtattacatattaacaattcttctacacataacccttgaaatgggggagtcaattcgggtgatcgctttgatcgatatgggtaaggaagggaaagcatttttttggcttttttccaatttatgcattcaatcactgtttacgcgtcctcaatttccttttggccataatattcctacttggtcaatcaatgtctaaaaaacaaacacaaaatttggtgtttttccggtatattcattgaataattttttttgtcaattgcatttaacaaagaatttaattatatagaaaaaaaaatctatagactttaagccttcgattgacaccaagattttttttttttaaaaaaagggcggggtttccacgtttgagaaattttgcaaattttaatgaaattaaaaaatcgaccattttttttttgatttttcatttcataggcatacatacccctgccgaattgaggaaatttttttgccaaactttgtagatactttttacacccaagtggaggagcgtgaacagccccatctccgcggccgaccgttggccgtcgttccgttcagtcgcggtacaaccatcacgggacagtaagcaaatatttctagtttttgaattattatttttttttctaaatccgtccttttgcacctagcgctcacaacatcgtctctcgaattttttgattttttttaaaatttaaccctccattgtttttcagggccattgccgtcaactatccagcccgagccttcggaatcaaacggggaatggacagcaacgaggtttgagtttcaacaatcaccaaattcaatttaatggtaccgaaaaagtgccggtggtgtaaaaaaacggatgaaattttgcgcattaattttactattttactcggagcggattatatataaccccgttcatagttttacaaaccggacccattaggtaccattcgatagcactaagtgtaaattttgtaattaaatagagaaaccattgggctatggaatgacatcaaattcatctaattcggacaaatacggggggtcttttgaataaaaaatggaccccattttttaacaaatttttgtttattaaatttcatttttttcgatgcgccatctttgtccgatcatccatttgtgccgtgtgcctgcaattgaaggcgtggagaagggagacatcagcaaataccggtgagaattttttttttttttttgatgggggtagaaaatttcatttccttgtaaatttccgccatttacgaatcaatttggtattttttaagtgcaaaatactagataaagcaaccgctctcaaatccgagctaaattactcaaaaatagttgtgaaaaaatttttgcaatcaaatttgattcccaaaatggacgttttctaagaattttttcaaaaattaatgaaaatttatcaaaaattcgcgaaaaataatcaaattctgtaatttatgtaattttacagggacgcaagtggtgaaatcttcaaagtgctggtcgatttttcggatcaaattgtggtggaaaaggcgtcagttgacgaggtcggaccatttttgggcaaaaaaaattttcttttatttttttaaaggcatttttggatttgactgcgcactgtgagatggaattaaacagccaaccaatggaggaattggttcaaaaggtactcattgctaatatctttttttagctgaaatttctatgttttttgcaaaaaagtggatttgacaaaaatttataaccgaaaaactcaaaaaatgaaccaaaaaattcaaaagtagtctttttgagatttacgggtattgtgtcgagggacggtcccaatgggttccccaaaaaatgtcgtaaatcgcaattcttacaccaaaaatattggaaattttttttgtacaatttttaccaacaaaaaaaaaaaatcattttagctgaacgatgaaattgcgcagctgttcccgagcacatttttggtcaacgaaagcgacaaacaacagacagtgatcgcggaggaacggttgaacagcttgaaggagtggttgagcaacgactgtcgcgtctccaggcaacaggtagggcgggtgcataacatgaaaaaatgggtgggtgcgtttttttgcaaaaaaaaaaaaagattgggtaacaggacgggacccgtattgtcatttgtccggaaaattttaattttagggccaggctccaattgacgaaacaaatttttaaatttgttaacaataaatttaaaaaaacttctttttttttctgaattgtggttggggaccctgtgaaaatttttggctttttgctaataaattttcaaaaaaaaaaattgttttatttcattttgttgtatttttttaacaagttgg

SEQ ID NO: 12884 - DNA, 3661 bp, Heterodera glycines
tttccacaagcactttattcattgatggaaaactttcagcctccaatttacttagtggcccttccaaacacgatacaactcgaacatactcttcgaatgcaggaaaataaaggcgcaacttaatatatttttaaaatgaaaaaactttaaaatactaactctgtccaatttttcaatgaaatgagcagcatgtaaatttaaagtagtctcgataagctccaaatcactttctataaacgttttgacaattcgcaacattgacagccatcgagtggcaaccggcaccgataaaataccccgcaaagcatgacgtacgggagttatgcgcatgaaatttaattatttttaatttaattattttattttaatcacattaatttattttctattttaactattattttttaattaattaagtattatgacctcaattctccaataaatacatgcaactcctttatgaattcattcattgtgttaacaatctgctttttttcgtttgttaaattcgcattgacataaggttcagtgatccgccgacaaattgtagaaatgatatgcgcaaggcaaaaatgatgactttctcgatcacccaaatgagataaattgctgccttcatcagttacgtaataaattcggcaatttttgatggcataaagttctaacacgtcatcaataaatcccgaaatattttcacgatttttttggatgtccccaggccatggaacacagtgaagtacaaaatgattaaggttccttaaccttaaaaaattatttttcacataatagtaacagaccagtttttgcaaataaaatgtatgactacaactgcataatcaacacccaatttttgtgaaaaatcgagtgacaatgtgcaagcactttgtctgacgtcaattaattttttgtccagttccgattcctttgtctgcagagtttcaatcacttttctgccaattgttctctcatttggcaaaagatcagctgagagtactgatcgcttttgcagatgccgttcaatactaaaacttttcccttatactcattcaaaaccggttacattaattcggcataagcatccatgaaatgcttgaatccttcgcccttgataattgaaaagggacgtccatcagcaacacaaaattcaaccaatgctaattccattttgtcatgtttgtcatttgtgccaaattttatcccatgccaattttccaaatgtctcctcaaatccaaaaatatttaaattaaagtctttaatataccgcaaattatgaaacccggcataattaaatgtaacaggtttcgcaggtggcacgcaggatttgcatattacataattagtcaaatttccatttccatccaaaataatatcgtagtattgacggaagattcgactttcagcccactctcgccgttgtctgggactttgaaggtcaatccctgcaataatttcgcattttttcgactttggacgtggctcgccgtcatcataggcaatgttatccaaccaaaattcatcaatttcgtattcatcggaatgactcgccataaattctaaattattatgttaacaaggcaaatccgcagaaaaatgaagagaggaaaagcaacaagaagaagcattctcgaagaaatcgctgtaaacgatcgaaatgattgtcaacggacggagagacggctgtaggcgatcggaaaataggagatgagtcaatgtttcaattgaaagacaacaaattgattgacaacatatttttttgctttcatatttatttttatttccttcaattccgtttatagctaatgagatatactaaataatggaattcatttttaaatttttaaaaattacgttgatatttaagttgatggcgtaatgtttgttgatttaaataaatatcaacattgaggttgattctccgcaaaaaaaatatttctaagtgaaaaatgttgatttgccattctctaggcgtatataaaaaaaaatttgaaaaagaagaagaaaatgaaattgccaaaacattgaaaattcaccaaaataccattataagatggaagaaacaatttggagaagaaataaacgaggaatgaaaaagggataattaaatttaaaaaattgtggcattttgttgtcctccttatttaattttattttcaccccatcagtttttgtgttcaccttattatattcattctcataatttgtgaatccattcaaagatgtcttttatgtatattaaacataatttcatgtaaatatttccaaatttcgtctgacgatagcgaaatgaaatttaaagtccgaaaataaaaacgaaatgaaaatttttatatttcatcttatgatttctgttgcagttctttcacttgtgttccaatttgattaattttgatgatcaaaaatataattaaaatgaataattggtggcgtttcattttcttcaaaaattctcataaataatttgatatttatttttctcaaaaatataattttaacaatttttatttttataaataataaaaatcttaaacctactgatttcttacaattaagaaaaaacctacttaatcgataataaaaaataattaaggttttattaaattttattccactgaacaaattattggcaagaataagtaaaataatgattaattttttttatattttttcaattaattcacattttattagagtggtcaccggaaatgattaaaatcctaaatcaatagtttccttcagctttgtttagatgagaaaggcagaaaaatattttttcgcgcggaaattctccaatttaactgcaataaaaattatttacggaatatgttgaaattattagcaatttttggttaatgctttcatatttttcttaaaattcatcagaaacatgctttaaaaacgattaagaaaacacttttggaaggagcagttttttttaatacgcccctaaaaataggaattttcaaaaggctattcacaaacttgggtaacttaattggaaaattttttgttatatatataatatacacacatatatatatatatatatatatatatatatatatcaggggtgtgacttgtctcagaaaagacgagagcgagagtttggcgagaggcgagagtccccaaaaagacgagagcgagagtttggcgagaggcgagagtccccaaaaacacgagagttggcgagaggcgagaggacgagaggcgagagtttttcaattttttctgtagccttatttttaatttaaaaaacttcaaaatcgtatattaaattaggggtacgggcctgggtatttgggcaaataccgggtcagggtattgccgggtacagaaagccgggtcagagtcctagtttttaaaccgagtccaagtcatgaaaaatctaaacaaaaatctttaaaattttttcatgaaaattaaaaaatattttcatgaaatatatttattttagaaacaaactttattatttgtccattttttccaccttttttttgcggtgcgttttttaaaacttcggggacagttggggtcgggcggtgccgggaggcgccgccgaaaaaattttgaaaaatgtcctccgattttgtaacaagattttattcaaaaaatgaacaaaaacttgttttttaaaatttttttgttttttaagtcgcttttttt

SEQ ID NO: 12885 - DNA, 547 bp, Heterodera glycines
ccgccggaaaaattctaaaattttgagtgtaatatattaacagaacttgtcaaaaaatgatcaaagttttggttaaatttgcagttttaggctgtttaaaaaaagaaaaaataataatttttaaattgaaatattttttattaattaaaatttcaattgaaaataatttaaagaaattattaaaaaaattctgtaccgttggggaattgaacccaagagaaaaataatgaaaggcagaaggtttagccagcagaccatatttgaattgtagctatccaaaaaatagagaaaacattaaggaaggaaagaaagagatttaagattttttttcgcgtaaatttgaaaatttttctggctgctcaaaagttcaatctttaggggtgtattttcaactctcgcctctcgtcccaaaaaacgagaggcgagagacgagaggcgagagtaccaaaaatgacgagagttggcgagaggcgagagacgagaggcgagagttgtcccacccctgatatatatataaattcaaatattcaagtttcgtgaacagcaa

SEQ ID NO: 12886 - DNA, 1205 bp, Heterodera glycines
taaaaaaatttcaaaaaatttgatcgtccataaatattgtaaattgatcagcggctcaccaaattttgcagagatacgtatcggagcactacaaatgcttactaattttcctagatttattaaacccggtgaaaaagttaagcctaaactttttcggcctgtttaaaaaggaattagaaatttttaaaatatttattcatctccctttttgataatataagagtcagagtgccttattcaacttgtaaataaattttggtgcgtttcagagcagtttctgaaaaaaatttatgaattaattttgcaaaaataaatattttcctagattttttaaacccggtgaaaattttttgcagacacccaccacttttgcacttaaaaaaatttcaaaaaatttgatcgtccataaataatttgtaattgatcaggggctcaccaaattttgcagagagacgtatcggaacactacaaaagcttactaattttcctagattttttaaacccggtgaaaattttttgcagacacctaccacttttgcacttaaaaaaatttcaaaaaatttgatcgtccataaataatttgtaattgatcaggggctcaccaaattttgcagagatacgtatcggaacactacaaaagcttacttattttcctagatttattaaacccggtgaaaattttttgcagacacccaccacttttgcacttaaaaaaatttcaaaaaatttgatcgtccataaataatttgtaattgatcaggggctcaccaaattttgcagagatacgtatcggaacactacaaaagcttactaattttcctagattttttaaacccggtgaaaattttttgcagacacccaccacttttgcacttaaaaaaatttcaaaaaatttgatcgtccataaataatttgtaattgatcaggggctcaccaaattttgcagagatacgtatcggaacactacaaaagcttactaattttcctagattttttaaacccggtgaaaattttttgcagacacccaccacttttgcacttaaaaaaatttcaaaaaatttgatcgtccataaataatttgtaattgatcaggggctcaccaattttgcagagatacgtatcggaacactacaaaagcttacttattttcctagattttttaaacccggtgaaaattttttgcagacacccacacttttgcactt

SEQ ID NO: 12887 - DNA, 1345 bp, Heterodera glycines
aattgccttttccgacggctgatcagattttcatgccctccccacatcctttgtctcgcatgactaatcccgaattttatccaaaaatatgagattgcggacagagaccagcaggaaaatcccgcacgcgtgcgtttcccgtcccgagacaatctctgtggttttacgtcgaaatcaattacagtgtgcgtgctcggtcatagtcttccttcagcatttctttatcgcaatacaagtcacggtagcacagcatacggttggagttcggtacagtatcgcaaggggcggctcttaattttataatacaatttgtttcatttttacagtttattaattgttcaattttgtgcaacaatttcttgatcacttgacaatcttccccatattcgtcccagatggttgattgtccctaaaatttttgctattttaaattttggtcagactcgaagcgaaacaatgcccaccgatataaatgtgatcggaattaatttaatttatttgtaaactttttttaaaaaattttctttaaatacggataaatattttttgaaaaatttaaaaaaaaatttgtctccatttcaagtctcggcttaaattagaagtgatgctctgacgcatcccctttgccggcttttgctcatttcttactacttttttcggatcattttcatatggtttcaaatccgtttggacattgatctgtttgtttaactgaggcgttggaatttggaagaacgcaagcatccgatcagcaaaaggcggcaccaaatgaatcattttggccaaattttcattgaatttttctgctttgatgtcattgaaaacggtgccaatgccaatgtcctaaatttcaattcaattaatttttgaaataaataaaaatcgatttgtttcacattttcattcaatgctccgctgatcactttcccattggctttttctcgattgcgctttgctgctggtgattggtgccaaattcgagaaagaaaatggaaatagtttcctttgtctcaataatttgttcaatggaaattggaaagctgcgcgtcattttgatgcttaattaatccaattaattaattaattacatgatctaaattcattaataggcgtacaattcatctgtggtggaaaggttgaaagatgttgtagcaaaaacaagcttctgttccttttcatcccgatgtatgcaaatttgtacagcaaatccggcaacattcgactcaccaagatgatcttggcataatttggcgatggcactgtcgtttggcataaacaaaatataagaatttagcaaacaaattttgtcattttgcacaatttaatgatgccgttttgtttagct

SEQ ID NO: 12888 - DNA, 771 bp, Heterodera glycines
tcccccccccccccccccgaaatgaaaatttttaaaaattttccagcaaataatggaaaattttttcgaattcccccccccccaaacgaaaattaaaaaatttaataggcaattttcgtaacaaatagcactcaaatttccaaaaaattttcccggcggcgcctatcggcaccgccggacctccattttccacaatttttacaagttttttgccttaaaacggccaaaattgggtcatttttagtgaaaaagtgcagttgttacccagcagtgcaaaaaaagttattggttaaacagcaaaaaaaaaaaaaggtcttcaggtcgggtcccccccccccccgaaaaatgtttctagatacgcccctgaattccatctactatttgttgtacaacatccacccaatttagcgtctctctttcagcctcatgctccacgaagaattccttcagcaatttgttttgaattcggtacccttgtcggagaaaatgcgatgggggatcattggcatttgctcaataagctccttgaatgcctccaacatctcctcggccttcttatttttgagtggaacgacaaacaggcgttttgagagaacatcaaccgctatgagcaggtaccggtgtccgcgattgtgacgagaaagcgcttgaaagtcagcaaatccacttggacctcggtcatgaagccagcagctacagttttggcccttggaaagcgcacccgcctgggacgcatcagagtgtaggtgcggtgcccttccaaataatgct

SEQ ID NO: 12889 - DNA, 2983 bp, Heterodera glycines
tttttttattttgatcagccataactcgcttcattcccaaataaactaaatagatttttagtatctaaaaaagtttttgaaaaggagaacctttttctgagcgaatgctaagcaatttgtcatctaaggaaaaaaagttgagtttcaattttcattacgttataactcaagtcataaactgctgatttcaatcaaaacgctaaacatcatgaaatgcggtcataatcgccacccaagaagaaatatctgaacaagactttatggtcaacgacaacagagcaccatcatcaacaatacgaaattgacgcatgaaaacatcaaaatcaacggtcacttctttttcgtgatgcgcgatttctttgctcctccgttcttctttttcttcggtgcgaccaccttctgccctccactgtctttggttttgccaccttcctttgctccaccaacttgtgccgacgaagtgctgggacgacggaaacaacctgcgagatcattgtagtgcaaagagtgtagacgtaagtctaaaggaaagagtaagaaaaaggtgtattcagcagagttcgtggatttgagtgaccgaagcaaatattgggtatagtttggtttgtccactcccccccccttttttaaataaaaattttcaaaaaatcgtgttaaacaagtttttatggggttttcgaggtcgatactcatttcgacctattccggaacccgtacctgaattctgttcagattctaacataaaagtgaattttgctgcaaaattaattttgatttttgttcgaattcgggtcatgggttcgcaatgggtattagaatcgtgatcagcgacctcgaaaaacaccataaaaccaaaattaaataacccgcatattttcactattcggggaggggcatcatttttcagatattttcccattttcactaaaaattttgttttcggtttcggggcattagccccctcccactacgcccttggggataacaataattggggccgcaacgacaaaacttacaacgagtcgcttgcccaaacatttggacgtcccagtgttctgacaccatctcacatagatggtccacccgtttttcaaaaatggctgctggatcggtcagccccaagtcatgaacaatctgaacaccgacgctcgagtccaagccgaaatgggcactcacagctaaaattttaactgcagaaattaggcatgtaaagcatagaattgaaatagggaatcagtcgactctgcccccttcccctcctctgcccgacaaaaaaagaactgcggccccgatggcttacagctgaaggtaccgtccagtgagtggtttggaagtgtcatgacagcgcgtttaaactggcccttagctctgccaaagtcagccctctaaattcaatcatatcaaatcaaaattttgatggtttaaagcttggattatataaaccatctggcgaagggtttcccaggaagtcaattcaacccgaatccaggcgaattgttttttgagcataaagtggtcaaaaatttccgaaactcggacagacgcccaccggacatcgaaacggagtgcgttggtcaattcaaaaagcaattcgaggggtaggattttctttttttgtaccattttgtggagaagactaatttatggaagaaaaactgatatttctcaaccccaaccccattaatgggcactttgtgtgcaattaggtcatgggaaaggtgaattgtggtcataatcgctaatttaattagtggaagaatgcatgatactctcatgtttacaattaggcccaaaatcagaccacttaaaactggaaaaacatttacaaaatccaagcctcaattttgccaactctagctaagatacttacagcctctgcaagtgtggtaattggtggaccgccgctcataatcgttagatgcgtgtacacaaatggcagatacaacttaaatgtacaaaaggataggtaagtggaaaaacaatccataaaaaaagaaaaatggcatctctgccaaagcataaagtcaaatgaggaatgaatgacgagaaagaattcaaaatggagcatggacggtaaaaaacgaaaaaaattgccaaaaaataattggcgtaaaacaaaacgccaacacacgcaaaaacaaagtatatgcacttacactggtaaatgccttttttgtattttttattttgatcagccataacacgcttcattcccaacaaaaatgaacaaatttggtatctaaaaaaagattttgaaaaggagaatctttttctaagtgaatgctaagcaatttgacatctcagaaaaaagttgtgggaattccaaatttttattacgttataactcaagtcctaggcagctctttctaaccaaaatgctaatttattcttttttctattgattctaaatgttcaaagtgattttgtacccttataaccaaaattattagaatttgcgaatttcatgatttttaatgtgttagagacatgaaaatagtacgccaaaaggagaggaaaataaatacttttttattattatttaataacttttgagtttgactatagacaaaattaatttcactatagaaagatgcagaattcttttctctatcgatatgcaaaatttgatgtggatttaacaagtaggaaaaaagttaaacaggatgaagtaaatctcctgtttcacgcataattggaagaaagaagggaaagataaaatattcaaaaagtaaaatccatgggacgcgtaataatttaaatcggaattccgaccccaaaaacgtcggaattcggaagtcggaaatttttcaaaaaacataaaaaataataaaaaattttctaaatattttaaataatgcaagaattgaattaatacaacacaacgtaagaaaaagcaattgggaaaataaatataattttgggtgcttttggtaagtgatttgattggacggtttttactgtgttcggattattcgtttgttat

SEQ ID NO: 12890 - DNA, 1266 bp, Heterodera glycines
  unsure (1)..(1266): unsure at all n locations
acaataattggggcgcaacgacaaaaacttacacgagtcgctttgcccnaacattnggacgtcncagtgttctgacaccatctcacatagatggtccacccgtttttcaaaaatggctgctggatcggtcagccccaagtcatgaacaatctgaacaccgacgctcgagtccaagccgaaataggcactcaaagctaaaatttcaactgcagaaattaggcatgtaaagcatagaattgaaatagggaatcagtcgactctgcccccttcccctcctccgcccgacaaaaaaagaactgcggccccgatggcttacagctgaaggtaccgtccagtgagtggtttggaagtgccatgacagcacgtttaaactggcccttagctctgccaaagtcagccctctaaattcaatcatatcaaatcaaaattttgatggtttaaagcttggattatataaaccatctggcgaagggtttcccaggaagccaattcaacccgaatccaggcgaattgttttttgagcataaagtggtcaaaaatttccgaaactcggacagacgcccaccggacatcgaaacggagtgcgttggtcaattcaaaaagcaattcgaggggtaggattttctttttttgtaccattttgtggagaagactaatttatggaagaaaaactgatatttctcaaccccaaccccattaatgggcactttgtgtgcaattaggtcatgggaaaggtgaattgtggtcataatcgccaatttacttagtggaagaatgcatgatactctcatgtttacaattaggcccaaaatcggaccacttaaaactggaaaaacatttacaaaatccaagcctcaattttgccaactctagctaagatacttacagcctctgcaagtgtggttgaggaatgaatgacaagaaagaattcaaaatggagggcaaactgacaataccgtagtctcttctcgttgcatgagaagagaaaacacagacagagaaaaaaagggccgacacataaacaaatgaaaatgcaaaaaaaatttatatgtcattttctctaacaccacaaaaccaacaaacacggactgggcgaaggtcggcaaaaaatttgcgacattgcaccgcgggcggaagcgcgacggatgccaccaaatcaaacgggggcacacgtcgttgtcactggtggaggtggagaaaaatcggaggcggcgtccaaatggggcggtggcaatgtcgcggaatacgactgcggcaactcgctct

SEQ ID NO: 12891 - DNA, 4222 bp, Heterodera glycines
tttcctatgtaatgattgacgccttttttctttataaacatacgagcaaataaaattttatttgttcactttttatttagtttaatttttagctttttttattatatttattgaatttaaataaaaattagttaaattaaatttaaaaaaattaattatttcctaaggcaatgtgtagtgtaaaatttggcattttgtttcttcttcttctgacaattatgccgttcatatttggaaatgacaaaacaaatttgccggttgagaaactgacagcacgacaaattcgatcagaaaaaccaattaacgggtaaaaaagaggcaattaacggacaaattttggaactttttttgttttgttttaaataccacaattaatttattataggataaataaggacaaatctttgaaaaatttttctgggtttttaagattcaattcctttaaataaaaaattttcaggaacaaggcctaatgccacctccatttttcagctaaaaatttaaagatttaatcgaatgatttttctccggtagaaaatttaaaagttcatttaattttgatttgaaaataaatactttttaaaattagaaagtatcgtcgccgtctccatcgtcgtggcatcctaaaaggggcagtgatcggtgccacaattggcgccggcgcggcactgttgtccaacgcattcagtggtcatcgtgggcatcacgattattacggctttaatggatgatgatgaatgattgatttttaataaggagcatagcgaaattgttattaaattttataaattgttatttttgtaaaatttcgttttttaaatttttatgttgcgtaattgtcagttatcataattttactctgaattttttggtataagaaacttacttattttgtataatttgatgattttttcaatgcatatttcaatcttttttttacttacctataaaacgcacaaaaaataaaccaatcaaaaaaaaattaaaaaattcgaaagaaaagacaaatgaaatttttactcgtgccatgaggaggataataacaaaaaatgtatccaagccaaaatagtaatttttaatttaattaattttcttacatgcaaatatatttaaaattgaaaaatttttcactccataataattgaaatatttttgaaaattcccaaaaagtcagctttatggaggtttatttttcagatttaggtatgtaaaacaatacaaaccctatccatggcatagaaaaagtgccaaaattcgagtgattaaaaaggaattaggtgattttttgaaaccgaaccgttttgagggttatcttttgaaagcttacttcaaaggcctgattcaactgagaaaatattttttcataaactcaatgaagaaactttaattaaaaaattattgaaaattcaaaaacgaaacacaattttattttttaaaaacctatatttatacaactctaataaaaaaaaattttaaaaatttaaatttatatgaacatataacacctcaaaaaactttaatttttgaccgattcccctctcaaatttttgtttttctcgctcggattgctgcggatgattcatccattttttactttttcccgttcagtgaatctcgggattgggggatccgattatgtggtgggtgcgcgactcggaagaatataatggggccccacaaatgtgtaaacattgtgaaacagacagctctcgtcgtgctgctggttaaatcacaattttaaaaaatggaaaaagtgaacggaatgaattaaaattccgttatttttttttagaattaaattatatatttagttttagcatttaattttttcaatttcattatttcgtttataaataaaaaaatattttcttttcagaaaatcctttaaaaaatgataatgccccaatttttatgcatttttctgctccttattgctcttctaatgccaattacattttgccaaatgcccgaaaaaggcgtgaattcaaatacaaatttaattcgctccaacaatgaccagcttttgcaagcacagcaccttgccaccacgttcatcctaaagtaaaaagattttacaaaaattaagagcaaatttactaaaataaataatattttttataataataattttctttaattttccacccgttatttaaattttcattaattaattcagacgccgtcgccgcggcacttttttgagggctgcgctgggcggcgctgcggtgggcggtggcgtggcattgttgacaaaggcatttcgccaacgaaaaccgcctggagctgctccgcaacggaatttcatgcagaaattgggctgaactaagaacccagcaggactcaagttatttgtccttgaaaacaccaaggatgtccttgcgatacacttttatccttgaaattcgtaaaaggatggatcttgcagatcatcatttcatatttcttttccattttctttgatatttgttgacttttttcgtttgaaacagctaataacaaatcacggctaatttttgattgttggcaaattgattttagctgaattgtcgtcaaataatttgcattgattttttttattggatgtatgaagacgcaattttttttttatattaattttatgaaaaacataaaaatattatagaattttattaattccaaaaaataatacattaattataatattcattaaattatttttataacaattaataaaaaaaaacatctattaagaaagtatgcatttcaatttgtttccgcttatttgtattgttattattcttcaatttaaattgggtaataaaaaatataaaataataataataaatattcattattacagaagaggtcgtttttgcgccgtccttttcgcgccagctcgagtttttggcttctaacttttttcattgacgaccaaatctaacaatcttggcatcattcgaaagcccttcacatgcactattagcctaataaaaagcaaaaagattttctgatctataaaaaagttattaagaaaaattttccaaaatttcgatttttttgaaaatttgcagttataactttcttagtaattccaagcaattgtttataaaaaaaaatcttctaaacatgtaaagctttcgaataataccaagattgttagatttggtcaacaatgaagaaagtttgaagcaaaaaactcaggctgacacgaaaatgacccctaccgcatttattaccttttacagtatgccttgcccctgacagtaacggtggtcaatttgaacttcgcatcgaaaatttttcaaaatttgccaatggaccaattagaacaataaagttgggtcaacccaagtacattagagggttgcactggcgattgaatgcatttgttaatgagcaaaacggaaagaaatctttgaactgtttaattgcaataattaatagtggtaaattttatttatttattttaaattttatgtgccattttagggattatttttgaaaaaaaaaaaattaatgaaaaaccacgattatttatcccatactcattcagcatagcttagattaaatgtgtcaaaaaacatctcgaaatatatttgccaaaactaaaaatgcaaaaatatgtacataaaattatacaaaaagtgccaaaaaatagtcaaaactctgcgtttttctaccaaaaaaagcttaaattgagcttcaaaattatattcttaatgttaattaaattcttacaacaaaaaaaaatcccccgactcagtaccgaaataccggttccgggctctagttttcatgttctaatactcaatcggatactctctgttatttttagacacaaattggcattgtgccgtccatgcgacggcagaaattattgtcggagaaaagaaaataaaaacagaaaattttcaaggctttgtgaaccgggatgaaatcattagggaatggaatttcactgaagaaattgatgtaagcggagaattttaaattacggggaaaaaaatttttttttttttaattatgggaaatttagaaattgttggaacattgtcaatcatccaaaagtgatgttgtccttttgagtgtcaatctgaagatggacccaccaactggcagaaggtgtgacagatcgccaaaatttaaatgaaaaaatttatgaaaaatttttagttttcctatttaatgacattttactggtgaagaatgatgaatatgattcggcagttgcaataaaaattaa

SEQ ID NO: 12892 - DNA, 852 bp, Heterodera glycines
tatgtagaaaccctgtttaatttatgaattagtcaattcaaataaaacaactaaatcaaaaataggatgggtcacggtcgtttaaccgaactgaaaccgaaagttcttttttatatttgaatcaattttatcatgtaatattttgtttattattattattatttttgttgatcctttgtccgtgagtcttttgtctttgtgggtcctctgtccgtgggtcttttgctgctggtgtgggcccccccccccctgtcagtggctcctttgtcagtgagtcatttgtctttgttggtcctctgtccgtgggccttttgctactggtgtgggtcacttgtcagtgggtcctttatccgtgagtcatttgtctttgtgggtgctctgtccgtgaaccttttgtctgtggggggtcgtttttcactgcaccgaattagagccccccccctgattttgtttcagatacgaatgttgaagacattcttcgtctggctgtcaaatatgaaattgaacaggtccaaggcaaatgtgccaaatttttgctcgatccaaaatgtcaaaagacaaaattgggaagttttcgcattgctttcaatcatggcttaaacataacaaaggtggttttaatacaattaaccagggttgccaactgaaaatttttaaaatcagcattttttgcgatattagccaaatttttatgaaaaaatacacatacagacttcatttatttacatgtgattttatataaaatcacagaatatgttttttatttcgtcatttaatatgatatccaatgatggaaattatagataagcaaaaatctatcacagtcttttttttttgtctttctcgggtttt

SEQ ID NO: 12893 - DNA, 3115 bp, Heterodera glycines
  unsure (1)..(3115): unsure at all n locations
tgttttactttctcagttctttcatcgcagtcgctcaattntggaggagaaacatccgctaatggtcgaccagcaacagaattctcaacttcttctgacgcgtcggtttgaacctgtcactttcgagggcacaatggatgaacttcgcttggaatttgagcaggtcattttaacaaaccaacaacagtcatttggttcaaattttaaaccactgccaattttgctggaatggctaaatattgttagagttgctttcgttttaaatcaaaaatcaattctctgaaatgacattttgaccagttccctttgctctggcaggtgttgcggcactattaccatgggaatgcgttgcaattggcctctctaatggccaattacgtgcgctacgaatacgaattgcgttggcaacagtccatgttcggcatcccgccgcatctgatgaagtccgcctaccttctattgtcgcgccattttcacatgaagaatctgcgcctcactgatgtcaacgatggtttggccgcgatggacgtaaacgtcggtattttactttatttaataaaaatttggcaaaatggtttaaaaaaatacaaaatttatatattttttgccttttctcacacgaaaatgccattcttaggggtgtatatttaaccccgaccccgagtcggggttaagggtcggggatcggggtcgtcggggttcgggtcggggttaaccccgaaaaatggccaaaaatgtcggggcggggtcggggttgcaaccctaagcaaaaagaaaaaaaatcgaataaatgatattttgatcactgattttattccgattgttcgcattttctgcgtccgtcccttctaattatcgtccgttccttcgatcttcttcagcgcatctttggtcttgtaatattcgaccaatcggtattttgcaaaactctgaattttggtgttatttctttcttttaataatattaccgtgtaatcgaattcttcaattgatgggcttgcgcccttgaacaggccccaaattccccaaagcaaatgtgaaacgggcacaaaaggggcagtttcctgaaaaaaaccgctgacattggtaaccaagggccaaaactcacttcgaccatcgtccgtgcactttcctgcaaatgttcctcactggcattagggcaaccttccttctcgtaattgtacatgaactcaagcatttgtccttccgtgggaaaattctttgggagaatttcgtaaaaaggtgtcgtttttttgccataattgatggcgcgctcaataaaatggttggcaaaatcaaaacccctataaaaaatgtgagaaattcattatattatttgccatcgatcccaacaattgcaaaagaatcagcgaaagcactcacctgtaattgtaactggcgtactcaaattcaatgaacacaatgtccttttggttggaagcggttgatgcggagcagcttcggatattgccagaatgtgcttcgggcaagaggatgttgccggccaaaaggtcattatgacagaaagtgaccacacaaccgttcatgtcaagtttccttaaaaatgggatttatgattatagctcacgaaaacacacctaaaattgtcaatttctttctgtaaagcttcgcaatttatggtcgcaggagcccattcgtgattttcaggcggcaaatcgaaggaagtggagccgctgggggaccgtttcagttgaataagccaccttaaataatttgtaaaacaaaaaaagactgaaaagcacctttcaagcgcgtcacaaataccagcctaaagacaaaaattttaaaaaatatgtaaagaaattcaaatacatctttcccaacaggtcgtgactgcataatttaattgtataactacgattttacacataaaattattttctcaccggaatgtattcttcaagacggcctccggtgaatgttcccaacagtttcgggcccatgtgtagttccgacaaaataccaaaaagaactgaatcggccaccacatccgcttcggtgtttaaataaacacgcaggagcacttcgtccggctcccctttgagtggtgagtgattttcaggcagacgacaaaggaaaagcatgttgctcacaaagggaggtggccaagtgtccgtgggatttcggaatgagattttttgggtagatagagcacacctgggttcttaagaaaaatgttttcaatttctgccaaatggacccctgtgccgagataaaaaaatgccaaactttttaatgatgaaataaaagaaatacttatttgtgcctcggcacagtgtccagtggtatagcggtagtgcactagtcagcatcaggcaacccagggttcggatcccctacatgtaaattaattttttaaatttttgtctattatgccaagtcaattatcaaaatattttttattaaaaaaactttatttttaatttttttgaaattatttagtgcataaaatactcaataaaaatattagacaaaaatatatttttttaattcgacaggttttttattacatctttatgtttaatgcaatttttaatggaataaaattaaaataaagattttgataaagaaataaaatttgctaattgaagtgctcataaaaaggaaaattaaaaattaaaaaatggatttacacaaaggggattcgaacttgtgaccaataaaaattttgactaacacattacctctacaccaaacaacacattgaaaatatgtaaataattaattattttctttaattataaaaaactaaaaactttggcacgtcataactcggcactcgtgctcatttggcagaaaataaaaccatttttcttaagaacccatgggtgctctatccatccaaccaagtttcatttggaaatcccacggacacttggccacctccctttgtcagtccgcctctgaagagcttggtaaatctatacagatgccgttttttttacttaattctgtgaatcttcatgtcgtctaatgtgacggtcttccaagcaccacccaaaaagcgggcacaaagaatgtgcgtcttctgcttgaattcaatgtgcgaattggggtcgaccttcgggttcatcgtgctgagaagctctttcat

SEQ ID NO: 12894 - DNA, 2564 bp, Heterodera glycines
ccgacgaggaccctggggaaatgaaacggaattatacagatggaaaacattggcacaaaagcggcaccattttattgtgggggaccaaaagaacaccgtttttggccctgctgggtgattccacgcgggtttggcaaaggctggcagaatcggatagacgagctgaaaaaccattcaaggctcatcgaacacagcatggagaaatagtaaagtactcacattatcacccaatttacacaaagttttatataaagccgatgccatagagtgcaaaactgaaagccaaagaaaaagtatcgaatggaaaaaaattgattaggtaggctgacagaagcagataatattcaaagggtcagaaattagattatgttttctttaataggtatttatgatgctgacttgatcgacaaatttgtcaaagatacagatttgtgagaaatctttgatttatccacagagggaggggagggggggggggaaggggcgtgagtttctgacggtgcggtcttttttcactttcgcattccgttggtcaaattcagcaacagttgctcgcacgtcctaacggcgcaccaccgggagagcttggcgaactgggcgggtgttgaggaccgagtttgatgccgttggcctacgattgaaaattcctttttaaagttacaaaaaagaaaataaatttaaaaaatcgaatttcaaagcggattctcaaagaaaatggggatcgatcacctattgataatgatagttcacctcattgttaatgtcaaacacgccctcctggatcttcctgtaaatttccttggccgtatcaatgaatgcctcctccacattggcagccgttttcgccgacgtttccataaagacaagtccattctcgcgagcgaactgctccccctcctcctttttgacctcacgcctcgcttcgagatcacttaaaatcaagcaaatattaaaagcatgtttttagttgacggattgcattttcaaaaccttttgttgccaatcagcattatcaccatgttggaattggagtgttgacgagcgtcttccagccacgaggtcaaatggttgaacgtgtcgcgtctgaaaagggtaaaaatgaaaccaactaatttggtatttcttggaccgagtgatgtcgtaaacgagcaaagcgccagccgcgccccggtaataggaacgggtgatggagcgaaaggattcctggccttaagaagcaaagtcaacttacccagtcaaaaagttgtctcgctgacctgcagtgtcccaaatttgcaatttgatttgttttccgtcaattgtgatcatccgtgctccaaacttaacttttcgttttcacgtgtttttcccgccccgcccctcttttatcgataaaatgggatgatcagctgacctcaacgccaatggtcaggtcgtgaactggctgaaatctcttgtccgtaaactgcagcaacaaacatgacttgccgacccctaaaaggaaaaaatcgcagagaagattttgccctgtctattatggcttcactacctgtgtccccgataatgatgtatttgaacaaataggaatatgacatttggaagcacaccaaattaaagtttctggtcactgtgaaaatattaaatcgttatttttgctaaaaatgagttcagaaaataattgcatcctaattaaattacaagtaaaatttaaatacaaaaaaaaggaatcgtataaggaattttattaagtcaataaagaaaatagcacgtgattttattggaagatagagtactttttaagtacctatttacctacttaatttttggaaaagtcaattggtttctaatacaaaatttatttaattattaattgtatcctattgactttaatcgactacgtagaaaatttttttgaaaatgtgttggttatccgcccgttccaacccttacaaaaatgtgacatcctttcagccggcattaattgtgtcaatatacatacaaaggtccgacactgccctcaataggctaaagtattccgtcccatctcttttccttttatgccctatggccaacagaatcaattttctatgcccaaggctcagagaaaggacaaaaagcacgcgagtgactgactaacaggcaccaaaaaacggagggaatggaaaaatgaaagtgaacacaaaaacaaagggaaattcaattaggggggacataatggaaaagtaatttattaaaataaaaacgaaacaaaaagaagtattttatcgaattcgtttaatgcgttcgtttgctgaactgccatctttctttccaatttgcgcaaagtcttcctttgaaaaaactgaagagcattgtttcgttttgcggggacgaccatagagtatcacttgaaaaaacaatcaaataaatatattttaaaaatttattatttgatttctcacatttcgcattgtttcgctctttcctccgcttttctgccattttttgtcgctgcttcgctttccggtcaaacaaaaccatcgaagagaaattttgtattccaacacgacgttctctcaattgtttttccaccataaagtaatcct

SEQ ID NO: 12895 - DNA, 1649 bp, Heterodera glycines
cgattccatttgcagtgtaatttcttccttttcccactttctctttctctccctttcatttgtttgattgtttcccaaattcataatttttccgcactttatgttaattcaattttttttttcgtattatttattcactatttaattattaatttaggcttttaatttatcctttattcaaacataaatcatggtctgtctttgcttttaaaatgaaataactaagaattttaggccgattcttctaaggtccctggcggtggcaaagtcgtcccacgctctgctgctggcggtggcttaagacaacggttcagtttttcaaatttagatagatttcttttttcatatattttctaacaatttaaggcgagctggtggggcggcaaacactggtcgtactcgaactgctggcggaggagggggcggaggaatgaacagcggcggactgtggcgcttttatactgaggactcgaccgggttgaaaatgtttgtgcaaatgatacttttaattggtccaaatgtgaaatcgaaattctgactttctatttagctttttcgggtaatttgtgacctcacaatattcgaaatatttttctattctgaaatcaaatttagtggacctgttcccgtgttggtcatgtcgttggtgttcatcgcttctgtgttcgtcctccacatttggggaaaatacagtcggactcattgaattctcactttgccgattcattcggtctatcggcaaaaatgcgattttattcatagtttttacaaatcacttccatttaatggaatatttgttttgtatgtaattctgataaagtctttgttataattattttctatggtgtaagagtttttaaaatctaaaaaattagctcaccttttaggaagcgcaaattcttcgtacggtaaggtttttgctgccttcggaaaaatatattccttttaaataatttcctcttttcttttttcccttcaccacaatttcctcaattaatttcccgtgttttctttttctttacgattttcgaccataaaacaggctttaaattgcgttggctcttccctccttttattgtatgtgcatggaaatttcgcgcaattctcttacatattttccccggccgctttgcttgagtcattgctttaatggaaagtttttctttgcttcattttgaaaattatttaataattattacatgtgtattgaaatattggtaatccttcagaattgcggtcccgacgaaaaattaatgttttgcttttaaatgatattccaataattaatgaccagtcactaattgcccccctcggcgatatccatttgttaaccgtaggaaatgaccttcaaaggcgtttccgccctttgtttgtgctcggtccctccccgtcccaattttacaattttcccgcggttaaacgattaaaatttcatttgcgctgttaatcaaaacaaaatttatctgctattttttctccgatgtcccgcaaccatttgaacaacgccaatttccatcagcagccgaatgggcgaagagagttttacacgcgacagaacccgcgggggacggggcgacacattgtgaccacgacagtccaagtcagtggagagagaggacggacggtgttaagacaacgggggggggggg

SEQ ID NO: 12896 - DNA, 3919 bp, Heterodera glycines
ttccttttcttctgctttttctcccccccattttcattccgtcaatttccctcctccaccccttttttccttctctttccgaaagtgattagcggtgattactaacattgctctgctgctgttgctgacacttttcgtcctcctccgatggtccctccgcttcttcttccccaattatcattaaacaaatatttctcaccccccaattttatttatcgcttttctttctcttagcaaattccttccccgtttcactcaagcaatttttttcaatgtgaaggtgtacaaataaaaaaagctgattaatctaatttttacaaaattttaacagtttccgtagattcattttgtccccattattctcttttttcatttgtccttaaaattggctgttttatttgtgagaatttgaaaggcttaatcggggacctcaattcggagtatagaacataaaaaaggttactcgccccccgccggtgggactagaacccacggcactccataccgtggaatgctctaaccgacgaagctacggcctcttattctttatttttcccccacaattcgggggttgattgtttgccatttgtttttgttttttgcctttgttgttcagcagattatgtgtttatcagttggttatcgcagatgcaatggaattggagaaatatgaaaaaaccaaagctcaaaattattctcacgagaagccgaatttaccgaaagttttgagtgtccaattggaccaccttatctattgtttatgcatttctttctctttttattatcttttatcaatcgtcaacattttattagcagaatttaattaatgaatattttccaattaaaatgctccaaaatgacaatctcacagaattttagttccagccaattagataaattaattgaattttctgttgacgaatttattgaaataatcttacatacatttgtgaggattttgatttgtttttgtggttctcttctctgctcattattactgatactgtttttgttgttgtgatttcattagaaattcaaatttggcattgtaaataaaacgccaaatctcacagcaatcactgattttcaacttgatgcattgagaggagggggccaaagccccaattcgcccctttctcctgccaaatcgcccttctattcaattagcactgtgtcagctttcaaagtcatctccaactgctcacattcggtggaataattgcatttaaacgcggtattctttcacagttttctttttgaacttttgcatttctaacggataaaacataaagccttaactttttttgttgttggaatttattagcacggatttcgtgttttttaactaaattctgcagttttttcagaactttcatcccctgtctttaaactatgaattttcgatgaattatttatcagttttgttggttttaatcattcccttttctcagatgccttcggctaacctttcggaccattcgcggctgttaaagggcggccgcgggttggcccaccacaaattgggccccggcgtggtggccttgcactcgtccgccttccaggagatggacgagtacgcgccctatcgcatcgtcttccttttgctgtttattgtttcttccgtggcgctgtgggcgtcctacaaaatcatttggtacgctccattaattacgaatcatcgtaatttacataaatccgtttaatgagacgccatttcaaagatccaaaatatgggcaaaaaaagatacatgtaaattcttttgccttgaaattgctcagaagacacaatattgtgtagttagtctttttcgaaaaatgggaaagtgagcagggagcggcgttgccggggaaaaatgggaaattgtggccctattttacaaaacagtttaccaaaacatatatattttttcagtcaaatcttgaaaaactaatgttataattttggagttcggtggtgccaacaagcgacgcctggaaaaattggggttttaatgaaaatgttaaaaaacagtcaaaatttggttttttgttcgtatgggatatttaaataccatcaaagaggacaaatggcattgtttcgtgtgcttgaacacagtcagtagaacaggcacaacatttacaacagaatttaaaaccccttcgcccttcagcgaaagtgacggggcgtcggaggagggcaccgccggcggtgccgcgtatcggccgctctctcagccgaccgacggcgacgcgtggacggccgacttttgggaggacgacgagtcgctttgttcacatgacacggggggactttctcgcaaatgaatgtgccggctgacaatgagtgattttgtgtgccttttccgcaccgccctttttccccaaatgttcggatttccctttcctttccgtcgtactcattcagccaattaattaattagagtccaattttgagttttgtaagaatttccccggacggtcgcacaacttgttaacgttgggcgttttttaacacaaaatttttggattaattagatgacccaagattggactaatgagcactaattaccgacttttcctgttttcctttgtcaaaatgtgatgccttttgtctctccccctctgatcagttactttcttttctttgtgtcttttagtcgcttttcggttagttagtttctgatgaagatcttctaaatgctctctcaaataaaaaatactcatttaaatttctattcgcccattcatttgcaatcgaattcgaaaaacaaattcaaaatttagaaaaagtttgcgttttccctaaatctattcgaattcgtcgctttggtctcttccttcgctggtcctttcccttctcatttacaatattttatgctctcactcacccaaattctgctgatgatcacaacattcaaatctgcgatacatttttctgacttttctcttttcgtatctcaaaaagtctgtcctccgcgaatatttttcggtcgatgctcattttttaaacatttttcaatataactctatcaaaaataaataatttgatccaataaattttttggttcttttgcaaatctaaattaaaaaacaaacaaatggatcgaattaaaccgcataattttaaataattaatgttatccttccgtccgtcaatccgtccgaaaatgttttgtaatttcccgatcaatgtgccttagttgatctctccactttcaatgctctcaaaaatggcggaactttctctgtactgcttcacatcgcctgtcaaatgcgtccgtctcttttgttttgctaggctcgagaaattacaaaataaataaatgatttattcaaacaaagggcaattggattttgattttcactatttgaatttgtctcgagtaaaaacgttgtcggtggaatggcctaaggccaaaacaatggatgttcttcggactttaagagagagtcgcacgggttcgcttatttgggaaagaccgggcttgggtattgccgggtccgagttttacaacatggaaaagggtccaaccgaatcctgaaattattcgtaattaaatttttccaaattaaagtttttttgttgatttttgtgaggaatttaaaatttatcagaatttgaagtccagcgtaaactaaacatattatacacagcggcccaattttgggctctcagtgcaaataggtttattatttatttagtaatcagaacgccaaaactttgcaaaacttaaaatttttttgggattttcccttgtaaaattagaagagccgatctcgagttaaaaacttaagttccataaaataaacttggaatcgctagaggaggtcaaaatattggcctatgcaaaattttaagaaaattaaacaataggaaaaaattttttacaagggcaaacatttcaatactttaattcttttttagccaagtccacaattt

SEQ ID NO: 12897 - DNA, 4044 bp, Heterodera glycines
  unsure (1)..(4044): unsure at all n locations
agcgcggcgaatgatctgctcataccattggacgcaggcatctcgttcaaagccgtgaaagcgtgaaagcggtcgttcgcgnnccagggacatgacgtttgggcaccgacgtgggcaatgaagcgtctgaagaggaagctggcggagggggcaaattttgagtgggtgggcgagggacagactcgcgcacttgtctgtaccgacgtgcgtgcccttgttgagggtcgacttcaagcgttggcaaaaagtggtgagaggaaaataaataattttttaaatttataacaaaggccgtctgcaactccatcaggaatttgtctcccaaattgtgttggtgctgacgggtgacaagggggcgacggcgtggcagcaacaacaaaattggtactagtgatcggcaacgttgatcacccaaattccccaaaaaatctgtccattttgggcatgatgaccgaaaaaaattggagaacaaatttggcttgatttttgcgcaattgaaccagctggaaaccgttgcattcgaaattgccgggaggaagcggaccattccagttcaaatgtaaaaaataaaaatcaggaatgttaatttttattttcaggcttctctgtgccgacctcaaattcacttcggcgctgatggggcaccagggatctgcggcgaccttcccttgtccgctttgtacagctcggcgggaccaattgtcggacaaaattgtggatgcccgcccgtcgcctcccccaccccaaaattcgtacaccggctctccactcgtcaacattgctttggtgaatgttgtaccgccgagtttccatctcttgcatggtgaagaaaacgaaaaaaacgattcagaatttacaggcaaatgcccagcgaataattgacgccatttgttcggaagcggacgctcgtggaaagggggactttgttcggaaacgactgtttgatgtcggcgtgcgacggcaccctcggacaaaacaattcaagggtagaatgatggggatggggtgggggttattgaggccaacttttgacaggtgcgacatctacaaaatcctcgaccacgaaaacttcgcttcattcacggcaccaattcctgctggaccgttgaaatttttgctggtcgacgccatgaatgacctccgccacatttaccgcctatcgcatgccaaaattcttcatctagaggatctcaattcgcttgaacattggacgaagttgttctacgcgcactggcagcaactccgatcaattgacatcgcccgttaccccgtccgcccgaagctgaaccttctcactgcccatgtcgtcccttttgcgcgctctcatctttggtggggtctgatcagcgaacaaggaatggaacacatgcacagaatgtgcaacaatttggtgtttcaattcgacgatgttgaatgcactgcaggaccgtggcgtagagaacaaccaagaaaatgacaactacccagatttttgaccaaattttcacctcacttttataaatatttttttaactttttcatttcaaaaaatttgagtgatttgaaacgagctaaattgcttaacattcgctttgaaaaagactctccttttcaaaaacaatttttagatacaaattttattcaatttagttggaaatgaagaaggttatgactgatcaaaataaacaatcaaaatggcagtgatcagcgtaaatttgaattcgcgcgaaataatttacgccaattacgctatttggttatgagcaattttgtctaacactgggcttgacccatagtggccagttccgtcttgggccagttccgtcttagtactcaaaggcccggttccgtctcaaatatttttgggctcaaatttttttaaatcaataactaatagtagttacagcggagtcggggtcgttttggcgcccacgttttggcgccgacgttttggcgcccacgttttggcgccaaggtcgttttggcgccgacgttttggcgcccacgttttggcgccagggtcaggtttttaaattttgtctatgtttgaataaatgaaaatatgtattcgtcagttttctgagtcgctaatcacgaatattgtattcattttgacaattgcgaagcccggactcgatttaaatgaaatacaatttttgaacatattagatcaggccttctatctgttttgttttatcaaatgttttaatatggtgggtccaaatctgagaaaatgatttaccagattctgatttagggatagtgactattatttattaaatataccgttaaggttatgtttataatcactaactcttttgaaatttcaaccgaaaaaatttaagagtttaaaaatattcaaaatgttttgacttgaagcatagcgaagagaaaaatttgaaaaaattcttgctaagtcaatttttcatgttgaccaacaaaatgttcacagcaagttgatcatatcactccttcatgttgatctacactagagatcaacattttgaaaaaaccgtagttgtacctgtttcaaaaaatggcctgtacctattttttctgtacataagtacaggaaaataaatgtacaggaaaaatccaggttgccgaaaaatggcctgtgcctgtacctggatccaggaaaaatacagggctggatccaggtacatgttgatctctaatctacacccataaaacacgtcaaaatcgggaagtttgaaaaaaaattctagggggttgtgaattttttgaaaatttgaaaaacccattggaaggtaaaagtttttcacttttttttgtaaaatttttgatcaaatttttaccttttttaatttttggcttcgcgccaaaacgtgggcgccaaaacgaccctggcgccaaaacgtgggcgccaaatcgtcggcgccaaaacgtgggcgccaaaacgacccagtcccaattttaggcaatcgaaatttcggcttttctaattttaaatttgaactcacaaatcagtcaattcgtgtctgaaattgtgtcctatttaatgacaaaattacctgtgcaaagcgtaatacgccctcttcaccgtcccgttcataaactgtcaacagttcgcctccctgttggacacccacccatctgtacatgctggtcttctcacgttccctgttatggtaatcacactgttgtaagcgaattatggtaatcattattataagggaatacgctaataatcactattgtacatgaaggcggttaatttccagactaattgtaacattaatttatcatatttttttacctgtattggttggaccaacggtcgtccgggtcagccccagctgcgctgtccccagaattgtcattgccccaaattcgggcaaaaattgagcctattttcatcgaataaaataacctaaatcatttttaaaatattgaaaaaataataatattttaatctttgatcataaaattagataagaatattaaaaactatctttttaattataaaaaaattttttgttgtaataaaattaagtaagaaatcttctctctgattccacaaaatttgaagtgaattatcattttcatttattaaagcaattggagacataatgtgtcggcggcacacctaaatacacacaggcggccaaaatatgccatcgaatgtgagggcggctccttggaaacgcacaaacccacggcattgtgtaatgggaaaattgaatgaattttggtgccattaataaaggagaggccaattggctttgttggcgttctttgtttaggaattagctgttgaaaatcattaaaataaataaagttgatgtagaaatttaaatattttgttaatgcaaaaaattgcttaaaaaattttgaaagaattttttaatttattaaataattaaatttaaattaactcataaaatcatgaatttaaaggttttatttatattaaatttatataaaattttacctagttgggtttttgtataaaaatattcagcgcctttatttttaccttcatcattatatatttttattttaattaaaaaaatgttttataaattaaatttctttgttttt

SEQ ID NO: 12898 - DNA, 4157 bp, Heterodera glycines
  unsure (1)..(4157): unsure at all n locations
cactatgggtcaactccactgtgcagagaaaagcctagtactatctcgtcgtttctctttttctttgtaatttctctcactttggcgtactatctcttcttttttattatgtaaaaaacaacattcacttcactacgtttaactttttttctatacgttaaattagggttaagccccgagccctcggggggcaaaaagtcgggggtcggggaccccggtcgggtatgaccaaatttatattgtaaccaaaaaataataatttttctttttcaatgctagtaaataaagtcatcaaaactcaaaaatcgtctttttctttactttcctcatctgattcaaattcatttgttggtgccagtaaaagtgcgtccaaattggccttcacaatcaaaatttggcgcacagtattgccggaaagccttaaattataaaataaattaatacattattgatttctgacctatttcgaagtgaattggcaaaaataagtccagctttgnagaacagtctttcagaactgactgatgtagcgggaatgctgtggaccattcttgcaagttttgacaattcgggaagacggccagtattttcattccaccaggaaaataagtctccgttcacttccatcctttggcctgccttaaaacaagtaagttcagcctcaatttttgataaaaaatcagagtcaggatctccggaaattgttgagggaatagaaataccacatggtgattttggttgggcccagatatcatctaaaaagaaaataaagtatttatgtgatgcaattgtcaatacatttctctatgctctcgttgctgcttggactcaattcttgatcagcaaatgtacggtcaattcctgattcaacctgaccaaagttgttcacatcaaaattatcgtccatttctattgttgggagaccaattctaaagggattcatattttaattaccaaatattctaataattcaaccaactctcttttgcaaattcgattaattgctgttcgacaaccctccaattttgctgagaaaacagttctgtgtaagcaaatcgaggatcaagtagcattgcgactcgcaacagtgggttgctgcaaaattcacgaactcgttcatttaaagactccactatgaccctagcacgcccaaaatgcgatttgagaaagttttttcttgcaaaaaatcacgcaatgtttttatagtcgaaataatggttgatgctgacgatttttcattagaaaactgaaattgtttacaattgtttagtttttacatatttcacttgcttttaaagtctctcgatgaaaaattaccaataaagggcacagttcgcgcaaaaatcaaagtcggtaatttccaaatttggtaaattttcagggacaatatctaggcgcgacttttttgatgagccaacaccaaatcctcgtctttctccttcaatagttaaaagaacgtttttttgttcacgaaatgtcatcatcatttcaaaggtcgagttccaccgggtcgggcaggccttaatttaaaagaataattgtgaaaacaataatttatgaaaccattgtgagtttttttgcttaaaatttgtcttttcttgatagtcgcggagcaaggacaggcctttacttgtacgaaaaaaagtaacccaagaccgaattttggaaatgagtcctgccaactcaggcagtcccaatacgtctcccataacaagatgaagaaaatggcacacacattgaaagcttaaaaaaataattataaaaaacaaaaattaggtaaaacctattcaagttcaaaatattgtggcccttatcatgttttttgcgttgtcgcgaaccaaacaaataattttttctgggtttaatccatttgtccgaagagcgtttccaatttcttccgctatgtctgctcctgtgtgatttgtcattggaatcacatcaagtacaaaatcggcgcgtacaaattgttgatttatatggtgtacagtaacgctaaagtctgtttttataaactatgaaaaggaatagagaaccttaagagtgcgggtgattttgtaatttgcgaccatccatcagaggtcacagaaaaaaaatccggaccaattccctgaacaattttttgttgaatttcatcggccattttgggaattacatttctccgaaaataatctttgcggcgaagcttaaaaaatatgacaatagtaaaaatgggtgaaaaatattacttggagtttcgggtaggccaaagagaacaaattctgtaattccggtgcctcaacaaataaaaaagagcaattcgttcttatcatcagccttgcaatttgttcatccgcctttttttgtgggtcttcattgccaaaaaattttgtaatgccttggtttttctgaatttttttatattcaatacaaaaggaagcttgtattaccgttgacgggtcggatttttgcaaatagttttcaaattctttagcgtgtttcgctttaaaatgcccccacaatccttttgtgcacgatttcttacacgctaattggttttcacaaagccggcacttagcaacctctgaagaaattttcgtgaaaaaattccaaatattagatgcttttgaagccattaaaagtaatcaattgagtgaaaatctattaaatttcctggaaaattgtaaatctgtgcaaagtttaatttggcaaattatatattattaatttttctaaaagagtgagaaaaaaacttttattttggcttagtgataggtaaaatttaaatgttttggttgcataacttttaaatttttaaaacgctcggagtccccaatcccccgaattagtgtcggggggtcggggggcaaaaagtcgggggccggggacctcggggggcgacatgtcgggggtcgggtcggggaataggtcccaaaaatgtcgggggtcgggggtcggggtcgggggtcggggggctcggggtcggggcttaaccctagtttagaacatatttttaagccttttctaagagattaagcaacccataaaatgttaaagctggaaaaaactgcagaaaagtcagaatttttgtatatattttatttttaattatttactctttgaaaacacagtgaattttggttatcgttaagagctttttaatgataccaagtttgcttgatttcgcaaaacaaaaagattttgtaatattgtgtattaaaaaaaataaagaaagcaatttattttttaaacccccccccgccccttaccattcgaaatttgattcttttaggtgattttttttcaatttaacatattttggaaatcggaaaactatatataaattgttactatacatattttttttactaaggtattgcaagaatttaaaaatttatataatttatttattttaagatcctatggtggttaaatttcttagagattctgaaatttcctttagcaataaaaaataaaatgaataaaacggtcgcgcgaataaaaacagaaaattcaccctaaaacgaaatttggttaattttaactctctctctctctccataaaatgtggcggctgatgatgacaacattgacgaaaattaatttataccttttataaaattgtttacaaagaaacttggtctttattttctagttttttcctttaaacttttgccaattaataagtcaattggtcaacaaataaatcataaaattaaacaggattagttgccagagaatattgcctttagcattgaaaatccatttggccttccaattgtatcttttaagtcgtatttcaatttaagtctattttgagggtttgttcacatcctaatcctgtttgaggattgtttgtttttttctggggaaaaatttgttggtgtgaaccaaacgacccccaaacaaaaagcagaccatttcaattaaatgtcgggacggcaatctgtgccgctttctgctccgccttttgaaacattcataaaaaggcaaactaatagcagcacagtgaccaaaaaatgccgatctggacttgtgccgatgaatattcctgcgtgttgatgagggataaatcatcaaacgcaaaaatcatgctttaaagtttaaaccatcaaccgaccttttcatgatgaacaacggcgtgtgcggcacggaagagtcattgtcataaactagagttg

SEQ ID NO: 12899 - DNA, 1590 bp, Heterodera glycines
  unsure (1)..(1590): unsure at all n locations
ccaatcatacataaaaaggggggtgggtcggaaaaaatttttgcgaaggggggtcggccgccgatgacctttttttttgcttttcaaaaaccgtctttttttcggcgcgctttttccaaaaaatttcgggaatagggaggccggcggtgccgacaggcgccgccggggaaaatttttaaattttgggtgtgctttgttaacagattttcacctaaaaaggccaattttttcgattttgagccaatttttaaagaaaaatcggaatnttttggggtccggcggtgccgataggcgccgccggggaaattttgtgcctttaatgaatttgttaagaaaatttccaaaattgcgacccccaactncgccgcgcgcgaacccctccccctacctatttacaccggcccccccttcgctgcgaaccccccccctcgctggccccctttgcgagcgagggggggggggggggtcgaccccctcccctaaaaaatgtttggaaaacaatataaaaaatttccgctttttcatgaaaatttcaactcattttagaaactaagtgttaataaaactaattgcagaattcccagaaaaaaaacttgaaacttttttacatttccttgaatttaataaaaaaaaaattcgaatttatttatgatttttttttgatttaggctagataactaaatttttaataattttttaaaattaaaagaaaaatttgcggcgacattttgccctgctcccccctccctccgcaccacacctccttgaaactgttgacccaatcgaagtccgcttgtgcgttcaaatttctgaataaacgacgaatttgtgacttttcaaattcattaccgtcggttcatttttggcaattagcacaattttggccgagttccgaatgatgtcaaacaaaagagcagaataataattcgttggaaactttatttttatataatgagaaaagcggaaaacaaaagatttttatagtcatgaaaagggaattggtgaatattttttgtatatgaatagagagagccctgatttttttagatttttcctattttttacggattgtacttgatgaaagaaacacgaaaatcacattttattaaaacaatttttgattttttttgccttaaatggggttggacaatgtttaaatgggaaacgaaaaatcattgacaaaaacggaaggggcggaaacattttggcataaaatgaccgattggaagaggaagaaaaagggaacgcaacagaggaggaccaccaaagaggagaatattttgcaaaatgatgaccaaaatgaccttaaaatgacttcaaaagcgatttttagtccatattttatggccatatttcgcgattttatatccatatttttaccatccctagttatgaaaaagtcaaactatctaaacgattaaaatggaaaatcatacataactcgtgctatgccaactcgtaaggctccctgatgtttcgtcactgaaataaaaaaataaaaataaacactatgccatatacttaataaaatttttgaacaaaaaagcattaaatttgttgttaagtggtgtgatatttcacatacataac

SEQ ID NO: 12900 - DNA, 2045 bp, Heterodera glycines
  unsure (1)..(2045): unsure at all n locations
aagaanngangaaaaaaagnggggaaaaananaggnnggagaanggannnaaaaangnnnaaaaaanagannaggaagaaagggnnaaaaaaannnnggaaaaanagnaggnggagaanggannnaaaaannnnnaaaaaaaanangccaaagaatcggccaaaaaaatttcggaaaaatacacccctgagaattgacctaaaaattttcaaaaaatacacccctaagaatcgaccaaaaaaatttcggaaaaatacacccctgagaattgacctaaaaattttcaaaaaatacacccctaagaatcggccaaaaaaatttcggaaaaatacacccctgagaattgacctaaaaattttcaaaaaatacacccctaagaatcggccaaaaaaatttcggaaaaatacacccctgagattgacctaaaaattttcaaaaaatacactcctaagaatcgacccaaaaaatttcggaaaaatacgcccctgagaatcgacccttaaatcctgaaaatttctaaatgtacttcatttctaactgcaatcagtaaataaaattgtttgacttaattttaactaatttacatagagaaaacagcaattttaacaaatttcacctctacatttggaattttttcatgcttattttcgcacttatttcgcgcttttttcgcccttatttaagcacttattttggactttttcgcgcttaaaaatccgttccctaattaagacaaattgagaaaaataatttttaaaatcaaaaattctcgtaaataggtaaaaatctaaaaatgtaagccctatttattattacgttggtcagttttcaaatttcaaaaaacaaatgcgcgtctaacatttgcaaatgaaagttggataaaaataatccgtcaaattgattttttattgattgatttgggggtaggggctaaaacgcccggcaaatgtcatcattttgcaaaatatattctcctctgttgcgttccttccattccaaagcactgccattccctttttctgctcgctttttgtcaatgattttcgtctccaattggcatattgtccaacccccgggcccatttgcaacaatttaaggcaaacaaaattcaaaagttgttttgataaaatgtgattttcgttagaatttttggttttccgcttttctcattatataaaaataaagtttccaacgcaattaattcttctgctatttgtgtgacatcattcggaactcgtccaaattgtgctaattgctgccaaaaatgaaccgacggtaaaagaattttaaaagtctaaattcagcattatttagctaaactgttttcccatttcagttggatttgcaacgacgtttggatggacattttcccatcctttgaccgtcctcaactcggcctcaaaatggcacttctttcgccacgtttcaatgcgttggtggacaaacatttcaatggcaaaagcgaattgacaatttggagatcaatcgaaattcgtcgcaaggacaaaggaccagaaccgaagctgtctgtacgaatcgatgacaaatttgtgccatttccaatgcctgacgaccgtccgttgcccagcaaaatccgttttaagcaccttcggatgtggtaattaaaatcagagctatgacaataaaagcattcattcctttttcaggtacatcgatcactccgtcatcgcttttcttcgttcaaatcaccaaattttcgacaaaagaggcacctatttacacttgcggattcaatcatcacacaccacggaagagcagccaatttgggacatttttgttcgtgaaatttggccaattttttcggtaaatattcgccatttggactttgtcaatgctgctgatttggaccatttgcgtcttcgcacttcgacgacaattctcactgatctcaaccaattggtttcaatcgattcctgtgatttgttgcctgattcgattggtgcagagtttgatgcaacaatttctgctggccaagcatgtccaaaaggggcacacaccgagaaaagatggccaacccaaacgat

SEQ ID NO: 12901 - DNA, 3961 bp, Heterodera glycines
  unsure (1)..(3961): unsure at all n locations
acataagtgaatgaagcaaatgggaagcttgttcaactgaacggcagcggatgatgatgttcatcaatgggtgaccatcaatgggcgcccgaaggctgatcagaacgatggacgtgatcagaagtgatgaggcaaaagccaggaggctttttttcgaggaggagagaaatgctgtatccgcagcattcaaaatttcatattttgtgcataatgtacattgccctactttctcccgaccaatcccgtcgtaaacttatccatctgttcatcccatcccaagccaatcctatccctctcatttccaatgttatcgtgccatttcttcctattcacctctgttgcatatgccatccatttctcttattcccttttgtgttttccgtcattacccctcatcctatccaaagtccatccccattgtaccagtatataagtccatccaatttccccctcgggggctgcgagatgtctgcggtgggtcagtctgtgccatttcttgcctttggcaatcctttcccaaataaccaattgcactgacccacccaaaatgctctgaggttgttgttgagccaaacatattcccggttttcaattcataattatttgtcaatgcttttccttataataaattcctctctcctaaaacggtaatttgaaatggctgaaagccttaaacccggggacacaacactgaccaaaaagtgccattgcccgacccaagggcgatcctctgaacgggaaatgcatctgcatgagtagtccgagaacagctcccgcgtcccatttatcccccaaatcgtcaccccgaaaaaatctttaaaattgttcttaaacctagaaatttcacgaaaaacattttttgtaaaattttgagaaaacatagaaattcaccatggaattttaaaaaatcgctaaaaatctttcaaacattcatgaaattttctcacaaaaagttgaaaatgggcggagttgggcgagtacacggactctctctcacccgtccgatggacccgtccgagcgctcgtattgcaatgagcggtactgcagcgcggcgtgctgcttggagcagctgggatggtcgacggggaagtcggcaattttgcgatcacgaccgatcagataagcggactgacgatgtatgtaaaacaccggtaaagtatcgtcaccctggggagaagtgaatgaataagtgacagagcaccgattgtcaccagacccacaaatttaggaggcaggaaaaatcagcgaaattttttttttttgagaaatgtaaaattgtgccaatccatgggattgaatttatttttgaaaaaaactggctgaatttcaaaatgaaaacgcattgtttttaccttaaacggatataagcgccagcggagtttgggaaatttggcttccggtggttcattgtactgaaaaaagtgaaattaatagaccacaaataacagggagacctaaattttgcatatggagataaaccaagtctttttaaagattccatgaaattcccaatatttcggaaattttccaaagcggtatatttcgactccagcggaccattattgtcttnnagtgtctatttatcgtccacccagccacgaaaaattttttcctggatacgaaacggcatttgcgtcaatttgagttttggcagcgggatggagtgtccaagtctggcgagactgaattgtcggatacaaaaaaaaacaaatggggaaacccatttttgggttggtcggtccaaactcaagttgagtgtactttttcctgttttttacaattgtcaaaaatttaaaaaagtctaaaatttttcattaaaaaaattccaagaattttttttttttaatttttcaacgaattttgcataattttatgatgaataggagatggatcttgcccccccccccgaaatgaaaattttacaaaattttccaacaaataatggaaaattttttcgaatttccccccccaaacgaaaatttaaaaattttataggctattttcgtaacaaatagcacttagattttcaaaatttttcccggcggcgcctatcggcaccgccgtacctccattttgcactattttttacatgtttttttgccgtaaaacggccaaaattgggtcatttttcggtgggggtcaactgggccccaagggccggtcacatttttcttttcaaattgtcaaatactcaacaattatgataattaagggtgcaaatttatgtaaatacatatttaatatttcttcagcaaatgtttcatttcactgttagttatacagtctgttccaaaattatacgttcaaaaattgaaaacatgtaactttttatagggcaagaaaaaatctgaaaaaattcatgtaagtataacttttgatgtttatcaaaaaaagtccattgcaccaacgtgatcagatcactcattcggggtgacctgaaaaccgtaaaatggcttgaaaccatcctagggggttggaaaaatttttcatgaaaggcaaatatgacagacagaaagggcgcaaaatttgttacaaaagcaaaagattccatgtctctacaacttttctacatggagaaatgaaaggtcgaaaaccgagcatccaaaaagtacaggaatccaagggaaaatggcttaaaaatgtttttatctgtaaattatcagatggatgcttagaattttatgaataaatttttgagagatcaaataatttttgacagtatgaaatggaaaatgtgaccggcccttggggcccagtcggcggggcccagtcgacccggtccgtcatttttagtgaaaaagtggatttttttacccagcagcgggaaaattttttttttcattgggtaaatagaaaggtcttcagttgaagagcaaaaaaaaaacggtctcaggtcgggtcgtcccccccccccgaaaaatttttctagatacgcccctgaccttgatcaacactcctttgtacgtgttggtgtccttggccaacttcccgctgggcacaaatgacggattttccttctcctcctccccttctcccctgcgcttttgctgcttctccgcttcttctcctcccccctcctcctcctttttgaccgtgtcgtccccatttcggcttgtcccagccgcccggcggtggctctccctctcctcctcctctccgtccacttttccgtcgatgttcatggtgatgatggtggtgttgctcccgctgttctcgtcccctgtcccgctcccggcgatcttcgtcagcatgactgttgcaaaaaaaaaataaaaaaatttatgcgatagagaattttgaaaaagcaatttttgccgctatttagaaaatgtcagttttaaaaaccacatgggccacttttagtttgccaaaactttttttaagatgatagatttgtaatcagcaatccccaaaactccaagggtcaaatttcatgactaaacatgataaaaaaaaattttttttttaaacttaaagggtaccccccttaacaaaaaaaattttttttttttttgtttgacggcgttttttaagcccttttgtcagtttttttgccaacttttctttccgattgctgccgctttccttggccaacgctccgctgggcacaaacgacggccgttccttcgcctcctctttgtcgctccgcttcttcattagcttgtgccgcaactcctcctcctcttccgcctcccatttctatgaaaaaaaacatatttttttcgaagacaacaagaattaaagttttgggttgaaataaatgcaaaaaaggcaggtttctgtgaccaccgaaattttttttttttttttttgaaaagactattttcaatggaccaaaacacagttaaccgcacatgtttgatagaacctagtcccaattttaacatttttttcactataanacgggttttttgggaagcggtccaggcgttattgtgagacaattgaccgggcccggga

SEQ ID NO: 12902 - DNA, 4354 bp, Heterodera glycines
catgatcacttttgccatcttcttctgatcatctatcacaatgatcacttttgccatcttcttatgatcatatatctcaatgatcacttttgccatcttcttctgatcatctatccccatgatcacttctgccatcttcttctgatcatctatcccaatgatcacttttgccatcttcttctgatcatctatccccatgatcacttttgccatcttctatccccatgatcacttttgccatcttcttctgatcatctatcccaatgatcacttttgccatcttcttctgatcatctatccccatgatcacttttgccatcttcttctgatcatctatccccatgatcacttttgccatcttcttctgatcatctatccccatgatcacttttgccgccttctgctgatcaccttcctcatgatcacaatcaagccctgatcacctctcctctctgatcgcatcctgcgtgccgtttcccatcgccaccccgccactgtgcccccggtgcagttcctgcaatattttcagcagcactccctccaccgacatcgccgttcggctgaactcctgcgccactgtcactgtcctcagtgtctcgaagatgtactcgtcttcgttggttgagctgttgttgttgttgttgctgctgctgtttgtccccgtcggtggtggcaaagggccggtaagtgaccgacgggcggagcaatcggtgggatctttttgaagtgaaatgcatctgctgatgttaacatttgaccaaccctggaaaaggttgacgcgattgcccactctgtcgccaagtccgatgtaaatcaaaatccgagccgcatgatgtttcacgtaatggccaaatttggtgctgtgatttgtgtagtacctgagggttaagccaaaagtcgatctcaattcagagaaaagaaacgactgaccaatcgtcggcggggagaagcatttggatgagcgggtcgtccacttgcatttcgatcaaattgcgatgcgtcgacgagtccaacgccaccagcgcaacactttggagcagcaaacagagcaattgtgggtccaaagtcggctccaaaaggttgaccaatgttttgagttggtggcgctccgacaatttgagacggaactctttgaaactggtgaggaagaggagaagacgagcaactgtggtcggaaagaagcggaatgagcttaagagtttcaatgagacgcaccgagaagttgagtacagtgctgaaagaacggttactataatgtgtggggtcaaggggaggtacggtatgggactcttacatggtagcactggcgccaacgatgggccggcgaacagaccgaacgagtgccagcctgccgattttgcattgtgattgcgttgtgcagcgaagtgatcacttcaatgggggaatgagtcgtaaacagtaaaaaatctatgattaatcaataaatgatatgatcaattggagcgatcgattggttaatccctctctctgcttattcaccgaaactcggctgaatggaggcgaatgccttgtgtaagtcaccgaggcgtacgggctgagtactggtcgtatttacgccatgtttacggtagaaactctgaagaatcagcgccggggctgagctactgtcgccggtctggcggcgatcgaatttgtcctcttgtgggatggacggcctcgaagcttttgttggagtctaacagaaacaaaagacacatttaataacggataaacacaccgtccgaaaaaacgagatgtgtaccaataaatagagagtgccagagaaaaacattatcttttttcctctaattttttgtctccttttggcgtactatctaatatttttattactaggaaaaacaacatttacttcgctatgtttagcttcttttctatatgttagatccataggaaattttgcatatcgttagagaaaaaaattctgcatcgattaatgctgaatttatttttgttaatgctctatttcaaaagttataagaaaaacaaaattttaaagcctcataacttttctctggtacaccaaatcgcttagcatttgcttagaaaaagcttctccttatcaagagctttcgaaagataccaagcttatccaatttggctgacaaaaaccttcaaaaataattcccaaatatcgtgattttttaatattttgacaaaaataaatgaaaatattcatgttgcacaacggactcgaaccaccaccctttgtccctttactatcttacaaaaaccactgagccacacatgcaaatcttttctggcacaggagctcatttcccggacgctgtgtatatggaccaaaaaccttcaataaatcaaaagattttacataaaaatgctatttttgagcctctttcttcataacattgcgcaaaaataattaaatccaatatttccaaaatgaacagcaaccttaaaaaaagagtccggcgggattttacgggagtcccgctcccgactcccgcttttttcggtgaacgggatttttaacgggagcgggatttttacgggattcccgttcgggactcccgtcccggaagattttgaactcccgatcccgctcccggaaatttttacccaaaaacgggagtaaaaatgcactggtaagaattgatttttttggtaaaaataagatttttcattgaaaatctgttaaatatatagccaaaatttcaaaaaaatttcccggcggcgcctatcggcaccgccggatccttaaaatccttaattttattaaaaaacttgctcaatttgcaaaaattggtcatttttgaacagaatctaacaatgtattgtattaaaattttcaatttttttcccggcggcgcctaccggcaccgccggcctccctcctcttccttggtcgccaaaaagtttttcaagaaatacaccgcaaaaaattttgtaaaattaataaagggagtcaaaaatataaagttaataaatgttttgctcgaattaattataaaaaataatttatttaagcaatttgaaaaaattttctgatttttgactcaaaaataagattttttaatttcaaatttctcctttataaatttttctatatatttttaatttaataaattgattgtcctttaaatttgtgcattaaaaatatttttgtgagtttttaattaaattttcgaattactcccgctcccgcccgggactcccgtgtaaaaatggacgggattttaacgggagcgggatttttacgggaatcccgttcactcccgtcccggaaaattttgaactcccgatcctgctcccgctcccgtaaattttttttaccggactctaatttatatattaatgaagcgaaataaattatgtaatttaataatttcatcaaatgatacatttgtttcaactgaaaaatttgttatgagcctttcatcaccaatttaaatgtttttttaaattaaattttgtttatttgaaccataatatttttcatagtccaaattttagagattaattaattaaatagaattttgcttattgacaatttggttgtttttaaaattaattattaattggaacatttaatattttaacaacccaataattgataaatcattatatttaattttaattatattttctctgataatatatttcattaattaaattttttgaaaatttaaaattttcgttggatataggatgcttcgatatgttttgtgaaaatataattgttttgcatgcagtcatcaatgagtgcgagttggccgaacgtccgttgtgcgagcagcgctgtgttgaccaactgatcggctacaaatgcgactgtgatcagggctatcagctgaacaagcaggacatgaagacatgtgtggacattgatgaatgctctggtgaggagaccagaaaggcggagagcaagtcttccccaaaaagaaaatttttaaaaattatcaaaatcgaataatttttcaaaaaaaaaaggtcttgaaaaatttattgagtaaaatttaaagagattttttctatctatttgtaagccaaaaatatacaccataaaaatttgaagttttttaaagatgaagaagaattattagaaattttaaaacgatgaaaaatttatcattttttgaattttcaaatttttcccttacaaattaggtttcaaatttctttgcgaaaaaaaactagctttttttctgaaaaaatctatattttggttatatttttaaaaattttctcgggtggggggatatagcgtaaaattagttaccagtccaattaaaaaaatttttatttatttatttttttttacatttttcagaaggtctctcaatgtgtgccaaattgtgtgataacaaacatggcg

SEQ ID NO: 12903 - DNA, 1198 bp, Heterodera glycines
aaattttgatcatttataaacaggttttcactgaaaattagccaatttataggtaaaatttttaaaaattttttgggaatttaatccaattcttaggggtgtaaaagtcgcttttcgcgccaaaaagcgaaatgcgaaacgccaaaaaatgcgaaaggcgaaacctaggcacatccctggtgtcagcccttacttaattagggtaattgaaaccccgcaaagtacaattcgctttaagcaaaaaaaaaaaaaaaaatcaaaatgaaaaatgctacaagcagttcaattggcacaaacaaattatgtgatgattgcttattgtggtcattcatatatttatgtatgcaacgcaagcgaatcgcggcacggcacggaccaccactcatccggcggcactgctggcggagcacacgcaaaaaaacaaaacaaaaaaacatagagtataaaaatgggggggggaaggacaacgaggagaaaaccatgacatattgaatatataagggccacacaacgacaacaacaaaataaatcaaatccgttcattcattcattttttattggaaaatttcatcaacatcatcattaggtagctgctttttttgtgtgtgtgtgtgtttaaataattttatcagtgctgttgcaacaactgctgctgctgctgttcattgttgagcgatgtcgtgtccgccagtgcggcgatgccgttttttggaggcgttgacgaaccaccaccgccgccgccaccggtgtcaatggcaccgccaatgccttcaccagcgacgtcaccgcctccagcaatgatgccatcgagagtgccggccggtacggcaccaccgacgacagcaccagtcacaaggcacatcaaatctgtaatgttaaggggggagatgtgatgggaaaattcggtcatgtcataaatatgacattactccaattcgagttggcatatgttttaaattttcatgttttttgattgtatccaatcatttgatcgtcaatgaatttttgaaaaaaaacaaaattttaaaacaacagaattaatgttcctaataaaccaaaagaacgagttttcttaaatttaatgctatttaggcgctatcaaggcttgaaaaaaatttcagaacttttaatccgattttggacataggcgcaaatgtcgccatttgaacgtttttttttgagggggtggggggggggg

SEQ ID NO: 12904 - DNA, 2905 bp, Heterodera glycines
gggtggtccatcgcctccctggcggtcaaccgttcctggtgatcgtagcgcaacaatcggtccaaaaagctgatcgcctccggcgtcaccaaatgctggttctcactgtgcacaaagcgttcccaccgtttgcggttatgtctggaataaaagagagattaattgttgattcagttttgaaaaaaattttggtaaggaaacatttttgtaaggaaaaaatctgggaataaaatttggtttttaagaaataaattcaattaccaatctgttacgatttttatttcaaaacgaagccgcaacatgtattcatattttttcaagagtcagaacagatttttattataaatttcacctaaccgatttgtatctccaaattttttgccacagttaaaaatgcctcttaaaaattcagaaaatttgaacaaatctccatcaaagaaatgggtatggaattatttgagttatagaatgacaaatcctttttttcatcagaaattggaaggggctcgggcactcgacggacggacttttgttttttactggccgtccgaggctattcccaaaaatttctttgaaaataccatgccctggcccacggtaaaacgggctttttttatcggaccacccgagcttggtcaactgtcgaacaaaaagcctcggccagacaatcccaaaacccagatctctctaattgtcatggtgccacatttgcattcccctgtctaactttgatgacctgcccaatatgtcattgaagcgcgggtccagctcaatctggtacttgtcaaggtattcaaacagttcatcagtgcccagcactttggcaatgcgaaccaacttaaacagaacagcaaatttggtttaaattttggacaaaaatttcttaaaattttatggacctgacctgatcataattgtcgtgtccatggaagaagggctcctttcgaaaaatcattgacgcgaacatacagccaagtgaccacatgtccaacgagtagtcataacactgtggggagggaagatggatgaacgcattgttacataattataaaaaaatgcagtgaagttttttttaaacaaaattgattgtgagcattatttaactgggccataattgtgtcattttatacgctgcgaatgatctacccttgaagacttgcttggcactttatttgtcccaaagattcaagaccaacgaattggaaaaaaacacacgaaacgttcgaagaattacaagagccggtcgaatgattaaggtggggggaacgggccaaaatctcgccgcaaacaaaaaaactaacctgaaaactcacataggcttggctaggcctaagccttaggctttgttttttaaacttttttattgtacgagttgccattgactcattgtcacgatcgaaaaatgaatggattttttagctgaacacatatttgaaatttcgggcggcgagattttggggtgcacccgattaaggcaccaaacaaaaattaaaaccactcaattcattcattacattgagactttaacgcacgcacaaaaaaaaaaaaaaaaattttttttgggttttagtgtcaacttttgtacacgtagtagcagttcaaccaaacaattcgaagctgtcccccacacaaccaacctggtagtccaccaacagttcgggccccttgaagtagcgggacgccacccgcacattgtactcctgtcggggatggtaaaactcggccaggccccagtcaatgagccgcagctggcgcttctcatggtcaatcatcacattgtgcggcttcacgtcccggtgcatgatgcccatggaatggcagtactccaacgccttgagcaactcgtacagatagtagcgaatctcgtagtccgacagtgtttggtacaattgctggacaaaatgggggaggtataagcaaatttttcgaagaaaaatttttcggattcccattttttggaatggattttcgtacaaagcatggtaacacgtgttttgcactgaaaataagcaacattttgggccctaaaaatttaaaatttcgggtgcggacactcaatgaatgcaattttcaacaaaaaaaaaacgatgaatcattgtatttcagcacaatttctaatttcgacgtaacaaataaattaagaaacaattttccattggcattattggacgtatccaatatgcaaaacggtactattgttatgtctttcttgcccaaatatacgaaaaaaacaatgtgcgtgccaattcagtaccaaatgagaaaattgccgcgagtttccaagggaatatggcacaggaggaggtaaagtaaagtgaaaattccaattttcatacaaatttcctcaacaaattttgcagtatcggcacaaatttcaattttttttttcaaaaaagggtttaggtccaacaaaaattgttagtctgtcaaagcgtgtctctctcattgtttctgtttttttatttctgttgatgaaaatgctctttgccaatgccaaaaaattaaatgccaaaaccttgaagtccgtgttgttcacatactcaaacacgagtgccggcgttctggacaccggatctttgaccacgtccagcagtccgatcacgttggttccgccccgtaaattctccagaattttgatctctcgcttgattttctttttcttcactggctgaaaaggaaaagttttttaagtcaaaatactaaaatctattaaatccaaaattagaaattttttgtatttatttttgtctgttttcaagggtgtccttttttaagggcagggaaatattggaaaatctttacaagacaaggcgcataccgagacaatcggagaaaatgcgtcattaaaaccccaaaatttgcacggaattttgcattaaaatttttggttgggctatgatgcatg

SEQ ID NO: 12905 - DNA, 1621 bp, Heterodera glycines
agcagttgctgtgttgaggaatcaactgaatactgcagttgagcagcagccaatgcagcgattgggaccgttggaactattccttggcacaatgacctatttggtgatcatcggcatcacaattctcgggttcgcattaatttaccatctttattatattaattattagtaaattaacggacggttttcgaggaaacttattttattatattttatcgagagaaatttcataatatccatatacagtatcacaacatgtaaccatatcttactgatgcgtttttaagtataacattgatataaactagtattttatgatagtattaatcatgttttgggtaacatcgatacagtattcatggaactacaaatttacattataccgtccaattataccgtatattttaaaattttcagcaacactttggtcatcctggccgtgttcagctacagaccgttgaaaaaggtgcaaaactactttattgtttcacttgctgcatcggacatgatggtcgcaatgctcgtaatgccattgcatgtcgtcaaattcttggccagtgcgtacagtttaacaatttttactttattttttttgaataattttaaaatttataaattcatttttattttctttatatcccctttaaattgagatttttccatcaaatttaaatcgtttgacatctaatttttttttgttaaatgtatttaaaattttaattaaaaataactattttttaaaatttctgggtgagcccttcaacttttcctccaatttttgtttataaacagccatgtgccaaaaaaaatgcgtgacgaattggtcaaataagcgccattttatgctcgtgggaaaataaggggtcagctgagcgagtgctgacaaaagcattcaaatatttgtttaattaaaaatatattttcgaaattaaatggaaatgataaaaaatttaaacaaaaataaaataaaaatcattttgtcataatttttttttgttaaaatcgtaataattctttctcaactttataatttaagagatttttttgaattattaaaatttaagagttttttaaatatgtcggtctttaaaggcaaaaaaatttaaaagaatactaaatcaatttcattttctgataaaatttcaaaaatacaaaagaattgactttgaaaaaatagtgcaatattatgaaagtgaaggagctgtataaaaatatatattcaaatcataaaaataaccaaatatatcattctcgatttactattttcatgcctgacttttttttaatttgaagttggcacaacaaaatgccaaacaattttttttagatggccaatggttgctcggtgtcactgtgtgccaactgttcactacggcggacattttgttgtgcacatcatccattttaaatctgtgtgccattgccattgatcgctactgggccatccataatccaattgcttatgcgcaaaagcgttcgttgaagctggtcggcggaatgatcattatggtagtttactgtaactttttgaacagtaattctcagtgcatattttctcttagttattttttttaaatttaacggaattgagctatctaatcatattagaaaacacaattgt

SEQ ID NO: 12906 - DNA, 1331 bp, Heterodera glycines
  unsure (1)..(1331): unsure at all n locations
atcatatagaaacacaanttgtaattaatttctggaaatgcgtatttcagttgggtttttacaattgtatnntaattccggaaaaataggcatttcnatttcatactttacaattgtaatntaatttctggaaatgcgtattttcagtttgggttttacaattgtaattttaatttctggaaaatacgcatttcatttcatatacaagtgtaattaaatttatggtaaaacttttttcatttcatactttacaattgtaatataatttctggaaatgcgtattttaagtttgtgttttatattgtaatttaatttccggaaaaatacgcattttatttcatactttacaattgtaatttaattccggaaaaataggcattttcatttcatactttacaattgtaatttaatttctggaaatgcgtattttcagtttgggttttacaattttaatttaattccggaaaaataggcattttcatttcatactttacaattgtaattttaatttctggaaaatacgcatttcatttcatatacaagtgtaattttaatttctggaaaatacgcatttcatttcatatacaagtgtaattaaatttatggtaaaacttttttcatttcatatgcgtattttcaatttgtattttacaaatgtattttgatttctggaaatgggtattttcagtttgtattttacaaatgtattttgatttctggaaatgcgtattttcagtttgtattttacatttgtaatttgatttccggaaaaaaacgcatttcctttatactttaaaatggtaatttaattcccggaaaaacgcattatcatttcttactttctataattgccaattttgcataggtttgggtggccagtgcggtgatctctgtcccgccactgatcggctggaatgattggacctcgcaacagctggtcgatcactgtgagctgacatcggacaaagcattcgttgtgttctccgcttgtggctcattttttctcccattgctcgtcatggtcattgtgtacatgaaaatttttttgagcgcccgaaaacggatcagaaaaaatcggggtaagcgatttggatattatgaacctaaacaagagaattgtttcaagtgaatattttttagtttctagcaataaaattaaaaaaaaatgcaaatttactaaatttttaaaaatacgtcataataaaaattgtttgctgtaactatgctaaaaatcaaccaatttttaattacccatgtcattcgattctctattagcctgccaaatttcaaaaattccttttttccaaagttatcacaaccaaaactggttt

SEQ ID NO: 12907 - DNA, 2155 bp, Heterodera glycines
  unsure (1)..(2155): unsure at all n locations
tttcaaggattttaaacttagggttattcttgagcaaggttatgaaaaaaatttttgtcaaaaattttccatttttatgacttttaactaattacttacaaattagcaccaaatcaatccttttctcaatttaaaataagaaagatttgccataggtcgcagtgcgctgttcaaaatgtcttgcgagctggcggatatgcagccgaagcacaagcgttcccatcgccttccggtggcggcaacgtcagtgattgcgctggccagcgcgaccggtgcacaaattttacggaagcgaacactgacgaaagctccatttccggacaaaaggggcgtggtcagcgttccggacgttgtgggcgtgcccattccgcacacagtgggcggagtcaacgcaaaaatgcctcagggaggcggcggaatttgccgcttgaccgcgtgtagtgcctcaatgcactcttccgtgttgtcctcatgttgtagtgtgcagcagccgcagttgtacgtgccgaagctggcgctgtacattgatggcattcaagcggaggaggaattggacggggacagcggacacgggggctcaaatgtatgttgggcatgaaaattataaattaattttgttgccgatattttataaataattttaataggtaaaacattctagtttggtttaatttaccaattcccattgtagaaagacagtcccgagaatacggtaactgtcccagcgtctacggtgctaaccaccgctccagctgcaattagtcattcgcctgctgcaaaaagtcactcgctggtgccaacagtcgctgccgctccatcaatggtcgcactgacgagctccgcgagtatgatggcaatggcgagtggtggcgagaggacgccagctgagagcggcacggaagtggcggcccacaaaaaggcaacaagtgatacggtggagctgaaaacgcacctaaaagcgagttttcgagaaaatatcaaagaccgaaatttgtaaaaactctgctgggctagagggttgggaattttctgattggccatgctctggaattctgagaaaaaatctatgaaaatgcctggaccaggggcaaaaattctgacttacgcctatgaaaaaattctaatttggaaccaataaaccccaagatctaagtccagtccaaggatgagctatggaaagtatattccagtacactgaaatatacaatttaattattcaatttgaataacaattttatttatatttaaggagcgcgaaaagatcagtgtggccaaggaaaagcgtgccgccaaaacaattgcagtcatcatttttgtgttcacattttgctggttgccattcttctgcgcttatgtgatcatgcctttctgtacaagctgctatttgcacccaaaggtcaaaccaagatggcatttatttaaaaaaatatatttaaaagaaattcgaaattaatcctaaaaaaacatgggcctccgggattgagttttcctatgtacgggattcgaaattaaaaagcctgtacctcagtggctgggttttacaggcccagggtagggatttcctttctcaagggtcgtaggggtattttggtaaccgaatttttccggaacttaacgtgaaaattttttaaattttgaaaatttattaaaatattttaattttccattttcttttatcaatagttattttgatcaaacattaatttttcttttctcaggttcaccaagcgtttgtttggctcggctatatcaacagctcgttgaacccatttttatatggcattttgaacttggaatttcggcgggcatttcgcaaaattttgtgcccaaagcgtgtgcaaaatgcgcagcgacgtcggctgtcagaacaagcatctgtcaggaagaaacccgcgccaaactcatgatcaaactcattaattttatgtgttattttaacaaattaatttttacttcaaataaaataataaatttcaaattctattaatattttgatgtgtcttaatgtttgcgataattagtatagctaattgcaacagaacgaaataattaacaaaatattgtaattatatagtaaaacattgtctagaaaaggatttttttaatttaaccaggaaatcctaattanacctannatcataaaatctatttttcc

SEQ ID NO: 12908 - DNA, 2420 bp, Heterodera glycines
cagacagagagaacagaaaatttgtggatggatggaacacttaaataaaaaataaattagagttgggaatgccaatgccatgcgctcgctgctgtttactgttcccgccttctcaaattgattgaatttgtgcactcagaaattttgtacaatgaccatgaagccaatcaaaaaagtcgacagtatacccaagaaaaaataaacacaacaaataccaatggtacaggcaataatcccatggtgattaagtgatgactgagattaatgatgatgatgatgaaagcacacaacaatgcatgacaacaacaacaacaacagatttatgtgtgtataatataaatacgaataagtgataatttatggggggaaataagggggggggcgaataatttacagacgacgacgacgacgacgacgaccacgaccagtacaccaattaaatcgtttatttatttatgtgtcattgattgattgatgatgccgcccatggcaatgccgtcgttgttgtcgtcgtccaagtccaacaccagcgcactctcgtcgtcatggttgtctgttgccattgccaacgccaggcatgggatgatgtgggcacaaaagcggtccaacagcgcatcaaatgagggacgtttgtcgggccggaactgcggtttagaaaaacaaaagtgaaatatgaaatggcattttacgagccaaatttcgagagttataaatctcaattttatagacaaaaatttcagaaaaaatccttctaaaaaacacaaaattggtcatgattggagaaaaatttatatataaaaaaatttcaaatattaaaatttacaaaaaaataaaaaaaaatttttaaatagaaattttgtttttaaaaattttctgttccctttcaaaataaataaacactcacgcgacagcacattttggcacatttcagcagctcaattggcacatccgttgggcacttttgctcaaatttagcaaaatccttaaatggacattaaattaaataaaatgtgaaaaaagcaaattaatgacaattatatagtaagtagatcatgcattaaagtactactgacaatgccaaaagatttggtgcgaaacacgcccttgtccgggtcagcgtcagtggcggcaatcatttggcacagaatgatgccgaaggagaagagatcagactgaaaattggggcacatgctcatttaaacaattagttattaatatgaaaaaacaaaaacaataaattattgaaaaaggccgaaatttcacccaactgcccctttttgatggggttgtaaaaatttaaacattttttttaaccaactttttcgtcatagtactgctcgctgagcacctcgggcgccttccaatccgcggtgcccacctgctgcagttttgtgtcaaaattgtccggtattcgggtggccagcccaaagtccgcaacgacagccatcggcaacatggtggacggttgagatttgagcaacacattctgtgaaagttgccaacttttttgttttatttatctatcctcggcgcaattgaatggaattatatgggcgcccaaaatttaagtaaaaaattttgtagaaaaaatagtaatttgaaaagtcactctgcaggggaatgacgcctaaaaaattgtccaaatttccccaattatgaaattttcaaaaaaaaatttttatttgggagggaaagatgttggagaggtgccaataaaaaatcaaacaattgcagcaaaaatctttccggaagcaactcattttaccttgcaaaattaaaaaaaaatcagttggaaattttcaaaaaaaaaatttttttttaaaataatttttgactttttaaaaacttccacacgaggagggggggggaggacttattgcacaactcctcccgcctcttaccatgctggtcaggtcgcggtggaaaaatcctttgccatgcatgaaggccattgcgtcgctgatgtcgcgagaaatgtgcgcaatgtgaagccacggcattgcgggcgccgccggtgccaatgccaacggcggatcagtgccgacaacacaagcgccgccgccgatgatcgcctgctgcaaagtgccacggtcacagaactcgaccaacaaattcagttgccaatgtccgctggtctgatccacgcaaaggcctctgatttaaaaaaaattttttttttgaaaaaatttatattctctgtaatgctattttcgaatatttggtggtggtacttgattggatatacttcgttttcccccatcccgcgtcttttgccccaaccccaaaaaaacaaaaatttattttataaaatataaaagaaattttcaagaaaaaaaaatttaaaaatttttctatggctttaaaaaaaatttttttttttgtcttgcatcaaaacacttttaaaattaaattttattact

SEQ ID NO: 12909 - DNA, 1115 bp, Heterodera glycines
agtaacactgccaagtgtgcgaatggcctaatggctagtctccttgactttcccttcttctttcccctggttcaatccctctacagaaattaaattattttcaattttttttttgtatactcgtgggtttcctataaagaaaatatgattcctcatagttttttaaatggcacatattttatcattttttaaatgaaaatcctaccaattgagcttaataatcgcaaaaaccaacctttttttgttgaaaatctgttaacaaattgcacccaaattttcaaaatttcccccggcggcgcctatcggcaccgccggaccccttctcccaaaagttttttggaaaagcgctccgaaaaaaagtgatgtgaaaatcaaatctgaatttctattaatattcgatgatttagtccaaaaatgattaattgtttgaaataattgaagaaaattttcattaatttaatttattaaataaaaaaccaaattattttgtattattttcacttgatataaattaaaatttgaatttttttttaatttttaaaatttttttgaatttttaaaatttcccggttggtcccggttcccggtttttcttgcggtcccggtcccggtcccgaaaaaaaatcgaggtcccggtcccggcttctcaggtcccggcaagtcccggtcccggttttggcaaaaattcccggtcccgtggcactctaaatagaccaaataaaaccattttatgctcattttgaagggaaaattctgaagaatatttcttaattagtcaaaagtttaaaaaaattgtttattggcaaaaaaatgaaccatgtgttatttgaaaatgaaatggcgaatgctgctggtcgcaaaaatgggccaaatttcacgggcaaaaacatcccaaattggctgggcatctttggttttttgtatgatgacacagacaaatgtaaattggaggtgccctttctgtcccaatgttgcatgttataagcgcgaagcgcccgtatgagttcaatggatttaaaaaacgggcgcgaagcgcccgtccaaggccaacaaaattagaaaaacgggcgcgaagaggcccgactgaggccgcgaagcggcctaacaaactaaaa

SEQ ID NO: 12910 - DNA, 1511 bp, Heterodera glycines
gggagcaaaattgaagagctggttggggtttgaaaattgtgctgaagaaccaacaaaaaaggttcactgccgagccaatttcgtttgtccttcctcaagcaagagcactacacgatgagttgtatgaaatgaaaatcattaaccgaacagtggagacaattagaaagacactttactatgcggttgaacggcgcttttttgagctagcgaacttgaagtaaaaaatttaacttaatttaaattaattttttgtcttagggaatatgcgctggccacttttttggatgtgcgattcaaggacaaagtgctgactgaaaattccgcaacttttcgcgctcgagtcactgtctggatcaaaaatgaagtgaaagaatggcaagtggaaaatgacatagacgaactgcaaaatgaatttgttcgtcctgtaatttcgccacagcccgaaaacccgccagctaaacgacgaatgtcattttttgaacgtctgaaaaatataacaggagcaagcacaagtgcacagggtgatttggtctctaaacattgaatttataatgaatttaagacgtccaaacatcgcaagacgatgacattgaaaaagaaattaaggaatttctcgcgctggaaattgcgaacccagaagcaaatccgttagacgaatggaagaaaattgctccgcgattttcaatccttgccaaatttgcagaaaaatatctttcagcacccgccaccagtgtcccaagtgaacaaacattcaaagtcgcccgtgatgtttttgattatcgccgttccaaattatcacccgaaacggcagaaaaacttattttttttgaacaagtctcgtccccagatgaactacaattattgaaactatttatttgttcatttttataaactgttatactattttgtacttattattatgacactgcgggttttttcccaaattaacttggaaagtttaaatttttaccaatccggttccggatccggcaatttgaaaaatagggattgaccggattacatagattgaccggattatgagagaccggatcccgaatccggtcatttttgaaaataccagtccggtccggtccggtatttttgagaattccggtctctagaatatatacacctttttggaatttttatgggtttaaaacatatattttggagtttttagtccatattttggtccatatttggccatttttgagctttttaatccatatttcgggcctttttagtccatataatttacaacactaataatagcacagtttttaatgtgaaattactgtttttcactgttcatataccttctctaaattttgtgttttttttgctctctcatttttcctaattgtctatgctttaagttaacacagtttttttttgccctttgtgacacacaaattaaattgaaaaaattggtgagacctgtgctgattgaaccacaaaatgaaccgacggacagcaaatatttgaaaaattacggattttcatttaaaatt

SEQ ID NO: 12911 - DNA, 2114 bp, Heterodera glycines
aaaacgatatgatgaaatgactttaaaataattgaataggaaaaaatccaaaaatcattctttgtttttcatatttctttttcttattatatttaaatattctatctttctacatatcaaaatactttttggaacacaggtcgcatcagtaatgccaagtgcaatcaccgatgttatgacatgcgttgccaacaatcttatcaatgaggcggtagattattagtgttattgaatcaatttcaattcaaaagcagttatttcaataattaaggatactcaacgtatggaaaagttattgaaagaactggtatatgtggctatactgaatttagtgcacaattattggacacttcgttggggcataaaatttttaataataatattttttaaggtcgtcgtccatcgaatatttcgcatttattgacgatgtaattcttataaatatggtttggtcacttgaatctcctcaattccacgctaatggttctttggcaatacgcctacatgactgcataccccagcagcaaaatgctatcatattacatgacttcacgttttttattcaaattttctatcgctgtaattagtcagtttttttttattttttttctattttgataatattttttttcattagtttatttgatttatctcagtagttgtattcaattcttacgtataatttttgaaatatttatcattgtctgaagatgtgcgggatttcaggcgggggccgaaggccccccacgaggccgcgaagcggccgagtgagtaccttgggcgcagaaaaattattaaggaggagggttcattatttatttattttttacaaaattaattcataagtatatttacagaaactgctctgaaacgcaccaaaatttatttacaagttgaataaggcactctgactcttatattatcaaaaagggagatgaataaatattttaaaaatttttaattcctttttaaacatgccaaaaagtttaggcttaactttttttatataacctgatcagaagcgcaccagattttgcaagggcatcaaaaagacaaggaaaagcaccgctatgatgctaacgccagtaactctttatttaaaaatttttattaatttttaaaacttcactattttatttttttaatagatttttaaatgtttggattttttttggcttaccaaaacttcatcgaacctggttctttctattctctttcaaatcgccccaaattttttttacagcttaactaggccctattaagcttatttccagaaaatctcgcatgaattctcatttttaaattttttatagatttttaaatgtttggattttttttggcttaccaaaacttcatcgaacctggttctttctattctctttcaaatcgccccaaattttttttacagcttaactaggccctattaagcttatttccagaaaatctcgcatgaattctcatttttaaattttttatagatttttaaatgtttggatttttttttggcttaccaaaacttcatcgaacctggctctttttaaacatgccaaaaagtttaggcttaactttttttaattaaactgatcagaagcgcaccagattttgcaagggcatcaaaaagacaaggaaaagcaccgctatgatgctaacgccagtaactcttaatttaaaaatttttattaatttttaaaacttcactattttatttttttaatagatttttaaatgtttggattttttttggcttaccaaaacttcatcgaacctggttctttctattctctttcaaatcgccccaaattttttttacagcttaactaggccctattaagcttatttccagaaaatctcgcatgaattctcatttttaaattttttatagatttttaaatgtttggattttttttggcttaccaaaacttcatcgaacctggttctttctattctctttcaaatcgccccaaattttttttacagcttaactaggccctataaagcttatttcagaaaatctcgcatgaattctcatttttaaatttttatagatttttaaatggttgcattttttttggcttacaaaactccatcgaacctgggtctttctattctctttc

SEQ ID NO: 12912 - DNA, 2124 bp, Heterodera glycines
tcgctgctgtggcggcccgtcgcagcacacctaccaggagcgcgttgtccgcccgcgtgtacgtgcacaaccctgccgaggcactgtacttgtgcaggtaatgatgatggaatggcattaaaacgcataattaatcggaatagagcaattctatattagttttttaagattttttggtcttgagtcccgggattgaccgaattatatgcccggtttttaaagaatattcaatttcctcggcacttttttgatcattcgctttggcgccaactttttgaacaacgcaaacattgccgggggcaacaaagaggagacgcagcgccggaggggccgcgcggccatttgtgcccttttggtaacagctaatccacataagtttgctgcatgaacccgttggttttcggggtcgtttatcacgaatcaggcacccaaaaatataaaatgccattatcatgcaattatatttaaaaaatatatattttcaagtccttaaattgacaattgccaaaatgaatttatatatttgatagctctaagaattctccatttatctttaaaatttcgatgaatttcactggatttcaaaaaagttctaaacaaaaaattcatgtttaagttttggaatttaataagcataacttttttatactaattaaaaattttaaaatataatattatgatagaaaacaccttgagttattgaatgctaccatgaaatattaatttggttgaattcgagacaagatatgattttatttgctttacatttttttattttcataccccttggcggtttttaggaaacgacctatcaccatttacggagtgagcattcctggctcgagtccctaatccgtttttttcgtgtgctcaatggccattcagttttatcacttttcaatttttccagattatttctcatcgacttttaaaataaaatgagcaatattttttagctctgaattttgtggtcaaaaatttaaatctaccccattttaatggatgatgcccaaatttattggcacttgccaaatgaacgggggaactgttcaatttacaaaatttacaacaataataataaattccaacaaatttcaacattttgcattgtttttgatcggcccaaaattttatggacggtaaatgcgcaatttcttcacaatttgtgctcgacaaattggacactttttgtccgcactcttctcaatcagttcagcgcattgttcacatgcgcacaaatggccgcaggggtcaaaagcgaaaaggcgctaaatttttcaaatttattttggcatttatttcaaaaaaaattattattttaaaaattttatcttttttttagattaaatttcaattttgtttattctatgttaaaaaatcttttaatattatatataaattcaaaaatatttttgagtgaacatgatctttaatttaattttatttttgatttaccaagaattctttttttggcatttatttatgagatttttacatttgtttggctttaaaataattattattttaaaaatttcccattttattaacaaaaaaatgtttaaaaataatttattttaagcaactaataaaaattttattgtataaatttttacccaaaaaattcattttttgggtaaaaaagaattatttttctcgaaaaaaataattgttataattaattaaagaaattttcttttttgtacctctcttctcatgcaaattacacattttgttggtgggcaaaactaaagttgtttatgtgctaattgtacgtttaattttttttccccacaaatttttacccgaaattttccattttcacagttttttctttcccaataaccaattgtttctttcaaatttccaaccggcaaatttttgaatgacatattgttattaatattttcacaaattttgtccaacaattctttggtgccgccaatgccattaatttggtccaatgtgagggcaaacaattctttggcatttgcaaacactgagcctaaataaaataacgcaatggcattggatgattcaaaattaatatttttagtaaaaaaaaaacaaaaaaaaaagaattttcggcgctctgtggaaagtgacctattttgaaaagtgtttcac

SEQ ID NO: 12913 - DNA, 2340 bp, Heterodera glycines
  unsure (1)..(2340): unsure at all n locations
aagtgacctattttgaaaattttttcactttnttgttcatcattctatatcaaaacaaacaaaaaaaattttgtcaaaaaagtgaaaaaattttcaaaataggtcactttccacagagcgccgaattttctattttttaagttataaaaatacgattaaaattttttttttgtcttcgtatttacccacattggaaatttatctcctttttgccctatgtattatgtgcttcacaggaatagaagcggttcgaaaatttttaaaaatttttggaccagaattctgggtttttaatgaaaattctggaattctaaattgctaaagaaatgctttgtttgttaatataagtaatttcatttttttgtggtgagaaaatttaacaattaatcgaaaatcacattctaaatttacttcatagacatcaatcatctgtaattttgtctcaatcgatctttttctaagaaatattgaaaaatatttattaatggaaaaattttgtagattagcaacagcaaaaatgtaaaaaaaaattctgttttgttttttgccattttaggatatattaaaaaaaattcttcgatgaattcatttaaataataataattataataatagcattactgttctaccaatgcaactaaaaatgttcatctcatttgtcctccatttccaccacgtgtccattaaatttgcgcctgttcgagcagcgaaaagttcgaccgacgcgtgcacaatttgggcactttccgtgccgagttgggcgcgcggcaaaaacacccaacggcgaaacgcctcaatgacccgcgcattgtcggcaaaatgttcggctttttgttgcacatttggccacagagtgcaaaaggggtctatcattaaaaagtgctaaatggaggagaaaaaagataatgatggaaatggacaatttataaatttagattttaaaaatatatgggggcaaatgcaccaaaaatcggaaaaaatgcaaaatattcaattatttgtcaaaaatgaatttaattaatttaaaacatcggaaagtgccaaaacatgtttcttgcaaaaaattgagcattaatgcttttgaaaaccaaaaaaacaaaaaaattaatccgttatttaaattttatttttacgctcttttttttaattactcaatatggctctgatttacatgggaaaattgcttataaaatagacgaacatactaaacatttggaatccaaagaagttaaataaaatgattattatatatttcactttttttacaaatttacgaagattaaataacgaaaaattgaatttataaatttatgagaattaaattttaaaattcctttttaaccaactttcaacttacttttgtactttcttctatgctttcatatttcattaatttgtgccattttattttgcataattcgttgatgatcggcacaatttgttgctggtcaaccaatcgcaaccgtttccataattgcccctcatttgccgattgtgccaaattatgccaaaacaagtcgattaggttggcatctttcaagctgatttttgtgtcattttgccgatttttagttgccacttcaattaaatagtcaaaattggcggtaagaaaaaagtgttccttaacaattcagttaagattagaatacaagctgaaatttttttttattatattgtatcaaccacctaaaaaagcatcaaaagtgccagaataaggataaattaataaaaaaaattatttataaaactttttatttattaaataataaatgtttttcaacgaaatacataagtaaatttttgatacatcttcattttttaattagggatatattgttattgaatgtcatatttttgggattggtgaaaaactcttaaacaacttatagaaagacaaatcgtacaagttttactaagcctaaaggcttaagcttatgcctaagctttatgctccgtttcggctttgcttgttaatttattattgtacgaattcccattgactcataaaaattaaatgttcggtaaaaggcacaaaaattgtcaaaactttttcagaagtgcgaaattctttggaattttttaagctaattgaaaatacactttgtaaggcctttcgaaggatatcgagaagattaattttggttgcatttgctaactttttttttaccttatcggctaatgtccaactgaacttatcataaagccagtgattcagtgcgcttgttgcgctgtttttccactgatcagtgctctcaaaatatctgatcagacaatgatcgccagaaaattcgcacaacgaatcgacgggcatccaatttttaagcagaaaaaatgactcta

SEQ ID NO: 12914 - DNA, 1727 bp, Heterodera glycines
  unsure (1)..(1727): unsure at all n locations
gggggggggtcagccaagaggtcttacgatcgtctttgaccccccccccatgggggttcagagcccatttccattacgatcgaccatttttcaaattttttttctagtgagaccttttttttgcttttaagctacaaaaattgacgccgcgatgaaaaataggccgagttttcaacaaatttatagttttttgatgatcacactaataataataaaaaaaattcaatctttctccgcttcaatgaaatttaaaaaaaacaatcatttaaagtaagatggtttaaagaaggccatttggcaagtggaactgaattgggtgctagaaaaaagtttgaagggttaagaaatgaaccaatgctctctgaaccaattttgatgtttcctgacatggaaaactacgatgaggatggttaccctgtaacggaagaaattgatgctcattttaaagaccccgaaagaaatgttgtttcacaaatttttatatagaattttgcataccgggaaaatttttaacatttgagtgtacttttgtaaagattttcaccaaaaaagaccattttttgaattttaagccatcttttttaataaaaatataggattttatagaagatagggaaaaattgagattagtcgatcgtagaaattttttcaaaacacgcaaaattatctcctcttacgatcgacaattttcctcacaaatcggtattagtcgatcgtaaaaattttgaatttttaatgaaatttgttaaaataaggcaattttccgaattgccaatgagaaaattttataaatttctgttttttttattaacgatcgactttttcgctgacttttttttctctccctcatttttcttttctccctcttcctcccttcacccaccccccaactttcctctctcctttcgaaattcattttttcaaatcgcattctcttccaccagttctaatcttttttctatttcagaaattaatgaaacaaaatctttcgaccttttaggaaattagttttttgattaattgtcattttacaaaaaaatgccttaaagatgaaagggtcggggtctggtgtaatcacttcatgtaatccatttaatgctaataatggcatttagttaaaattgaaaaaatataaatgttaaaccaattttggcctctggctcatcccatgccctttgctttgggttctttaattatcggataatcccaattttaccaattgtcttatattatatctatcaatttgttggcacagtcactgatgtgctgatgcacatgatcactctgctcaatgacaaaaacgactggcgagtgcgtgccgcgttcttcgaggcgtgcccggtgctggcccagcacatgggccagaacaggaacagcaaactgatgccattccttcagcaagtgtgttcagggcgccggggcaaaatctcgcattcgagaccgggtgcttttggcgggatttgctcctgatttccgggccccctttttggaggaacagattgggaccagaagtcccagtaaaacgattcttttacctagtcccggggcccggagcagttcgtttcccgccccgaaaattaaaaaaaaatgcattacataattttttttttttaaatcttagaaactttttttctaagaaaatatcacaaaaaaattttttaaattttttttcttaagttttcaaaattttatgattactaatttttccaaaatatctctnagaataa

SEQ ID NO: 12915 - DNA, 3340 bp, Heterodera glycines
  unsure (1)..(3340): unsure at all n locations
ccaaagaatccaaaaatacccattttcatcgaaatttttgtctcggtgttacaaaaactcggagctttctcatccaccgcttacatcgctgcagtccaacggactcaaaagagtggcgagcattttggcgtgggcggtcacccgattcttgagccgttgccgctcgttgaacacattgtcacagaccatggcatactcacgcaacgacagcacaaaacagcgccgaatgccggacaaacattggagatggacgtaggcaaagtccgattgggggtccaactaaattttaaaaaatggaaatataagacaatgtatattgaaatgggcaaaaatttaaatttttaaatcagaattacctcaagtgagcacgaggggacggggccgacggacgattgggccgcgcttctgcaaaacattcggcattaaattcacggaaatccaatcgcaaattagaaaaattcgttaaaaaatataaatttttggaataggaaaaagcaactaacttgaaaatgtgcatcaaactcttcgtggccagccgacagaacacttcgccgtccggccccaaattttcgcgtgccctcagccggtcaaaaaactgacggcacagtttcacttttgcgtaagccgaccgcgcggaggaagaggcggacagcatcaaaccgtcttcggtcggttgcaacagaatttgctcactgaacttggctaaaacggtgataaccgaggcgaagtgctaaaagtgggaaaaattgacaattttagaaactctcaaaaacttttgacgagcggaagaaacctttaagttctgctcaataacataagtgtagccattctccaagtgaatctcatgcactgaacgatctttgaaggtcacttctggggttgggctgggcatattcctaggactaaaaaaagaagttgtttttttgttggatttaaagtaaatcaaataaattaaagctaacaacaagaaacatctctattaattatggaaatttgtgggtattttctcatcagcaaaaaaaacaaacaaaaaaaaaaacaatgtataggtgagataaggacgaaatttgtaaagtatagaaaatgaaggatttaaaggatttatgtgaaacaaacaaaaaaaaaaagaaagaaaattaaacttggctaaatgtaattaaaattttgaaaaattataaaaaaatttgaagggctctcgaatgatagcaaaattgttggatttggttgacaaagaaaaaggttatagtccaaaacatgctggtgcccaactgaggtaaacggttaatgaccatttgaaaaaacgtgaattagaatagccttatcattttaaaaaaaaatgtaattttctattttttcaccgagaattgcatcagactataaaaaaacgacgtggctttttgcttcctctaaaaattaattatttaaatgttaattcataaattgatttgttacttccctttattttgacttcatttcataaaatttctatctttataatataaattattatgactatttcaatttttgttatacatatataaaaaatggttgtatttttctttggaaattatgaattttcctttttttttttgcttttgagttttctacgttttggcctacctgaatttttttttttgaatatttttcctgcgtaaaagtggactatgatcacgaattttatattttagatcagtgatcagtgataaattttatgccaggaaaaatatttcaggaaaactcaaaagaagcttttctatcaaaatttccaagacaaaccaaaaatatttattactttatacaattttagcggaaaaatattaaattaaaattttttaaatttcttaaatatattaaggataggaaatggaaaagtttgtaaactttttttatcctcaattttttaaattaattnttgtcacagaagaataaatggaattcaaaataaagaaacgaaaaatgctttcttttaatttattatttttaataatttttatttttattatttcttcgaattttgcgttcgctggcaaaagcaaaaaaggcaaagaaaataataatgcatttttggcacatgaaaaggagcagcaggaagtggcagaaacaagcacaaaatatcaatgcccggaaaagacagaaagaattttaatagataaaaattgtgaaaataaataaaaataatttaatttaataaaataaaaaaggctttaaaaggaatttcaattaaatttttaatttttaaaaatatttgttaatcaaaatgttttttttgagatgagagtgatgacttagttcatttggtgacccttttcaaaagtttaattgtcaaatttattgcggctgaaaatgaatttatgaaaagggatttgaaaatttttcaattgaaatcactgtatttttttatgaagcaaataattggcgaaatgttcgcttttgcgattgaaatcggcacgaaaatggccacagaaagcaataccaaccaatggttttttgatgcaattgaaacaatgcgaaggcgatggcaaaaaattatggacaaaaagcaaaacagtgaatttgaaagcattggcgacggcacaatttgcaatttgtacaaatttgggaagtcatttgtccaattgttggaaaaaagcactgaaaatgaggcaaaatttgagaaaaaagtgcaaaaatatttggagaaaaagcgcataacgcaattctttgcttcggtgaattgaattttaatcgaattaaaaaaatttttggaatttattttgaataaaaaatatttaaaacaagtagaattttctttcaacatttaaaaatgactaaaatattgacttaaaactagagtgcgccgggaccgggccgggaattcccggtcctcagaggtcccggttcccggtcccggattttgaaaagctcaggtcccggtcccggtcccgatagggcaaccgggaaccgggaaaaacaagcactggtaagaatgggggtctgagtgaaaaattagtgatgaaaattggagttaaagggaaaaaattttaaaaatatattaatatattctttaaaagtaaccctgagaattgtgcgaatggcctaatggctagtctccctgatcttcccttcttctttcccctgggttcaatccctctacagaaagtaaaatattttgaattttctttttgtaggctcatggctttcttatcgacaaaatatgattcctcatagtttttttagattgatacatattttatcattttttaaatgaaaatcctaccaattgagcttaataatcccaaaaaccaatctttttttgttgaaaatctgttaacaaattacacccaaatttcaaaatttcccc

SEQ ID NO: 12916 - DNA, 4622 bp, Heterodera glycines
  unsure (1)..(4622): unsure at all n locations
ataggttttcaaacataaaaaactttaaaataaattttttaaaattttttcttgaaaaaatgaaattttatttatttttttttcggcgacattgtcttatcgacggcgactttctgatgaaccgaatttctacatataattgatgacattttgctggttttttccaaattaacatgtgaaaatttaaacttttaccaatccggaatccggttccgaatccggcaatttgaaaatctgggttgaccggattttgagagaccggacccagaatccggcacttttagttgaaaattttgggggttttagagcctaaaaatatcagcctaaaagtcataatgcgtagtgttcctataagcatgaaagtaaaccatctttaataattatatttaggaatttaactgcaaataatcaatttaaaattatggaaatgaattttctgaaaacaatacaaataattgcgtcggcagaaaacaaattgatcagtgaaaagtgtccatcatatattaataaagaaagtaataatgattttttcaaattgctcttcacattggcactccgtctgggtttgttcatcggatcaaatgaatttgttgaacaatatttgccggctttattaagtcaattagaattacgcccaaaaaacaataatgataagttagtaaattaaaaaatatataaataatattaaattaatatgagattaattattgggtaagaaaaatacgcaaaatatgtaaataaatattaaaatttccggattaaactcataaatgaacttttgataaagtaaaataaaagattttttaataagtttttgttttaaaaaggcaaaaaatgactaattttatctttaattacgtttttcaatcactcagttaatgtcaaatctggcatcatttgaaatatctaagtgtgtttccacatttacatgtcaaaatataaaggaatttcaatagtaaaaaagttatggcatgtggcgccgaaaaagcaaaaaaaaaaaaagtcaatttttgatgtttttagacataactttttttttgtaaattgacgatgtaatttgtaggctaatagagaatgctatcgcatgatatcaaattggttgctaatgagaaaagttattaccaacagtgccgaagtgggcgggttccccttcgtttgggaaaaaggcaaaaattatttcttttattctacaaaaaaaaaaaaaaattttcagatccaaatcccggattttccccccgaattccttcccgacactttttttttgaaaaagaaaaattttggacatttggccaagaatttgagtgccaaaaaacatgtaaatccgggcctggcgatgtccatttatgcgatatccccgtttggtttagatatatttacgcctacaatatgttcaattacaaaatcaacgttgtgaataatgttgtccaaatcaatatgccgaattggaatttgccatattttgtgtttttggatgatccaaacgaattaattgatcagaaatcaaatgaattattagtttatgaacatcattcgaaacaaaaatgttttgtcacacaagattataaatttgataaagcattgcccaaatgtgatccaattactttgtatgaattgatcaaaatgacaaaaatcattgtcgaaatgcaaaatgatcaaatttggattagcccaaaggacccggaaattttgaaaatcattgtaaaatttttgaattatttcgatattgaaaaaacaattacggaaagaatggcattttctgccgaaggcaattattgcattttggcacaatttgtgatggatttgttggagacagcaaacggagcaaattatttgccagacattgatattatcgaaatatttgttgtacagacgaaggaatggtgtacagatcaacggtgggaattaaaaaaaaactttaattaataattcaaacggtgctatgacgttacaaaatggatgtttgtcaaaaaccgtcaaaatgaaagattttttcatataactttgtttaaaatggaccaaattttcattttttatatcatttgatagccctaagtgttttctataaacatgcaaaatttcaaaaaattcgttaagcttcaagaaagttatgaccaaaaatgttcaaaataaaacttttttgttttttgagttcctcagttcattttttttgaaatttggaagtctaatagagaatacataaagctacctaattatatcaagatttgaaaatttggttaattttgtgcagagttctgaagaattttctgtcaaaaaattttccatttggttgttttttgactaacgcccgccccagcaccactcaaataaataaaataattaattgattgtgttggaaatttaatgagtatttagaataaatgatgaaatcggcaaaaacaatcacggaaagaaaatcatggaaataacaggaaatattaagatcaattaccacctccaaaatggtatgtaaaaatatataatgcgattgtaattaaattcaaaatttttcaaaatagaaaatgagttttatatttctataaatttatctacataataattagggttcgaaattgtatggttttacatattttttctgcgcatatgctatgaagaaaggggctcaataaaacatttttacgttaacattttttgaattggtgaaggtttttagtgcatataaaagcatattttgggggttttcaagaataaatccgtattttgccatttttgcatttttaaagcaaattttgggaattttttggtaaattttctcaagaaaaatgcaaaaaaaaaaacgaaaaataacacacctaaggatcgatgttctgatttttacacaatttttggcacttcttttttttaagggttaaaagcaattttgggcaatttttaagacaaatttgagggatttttagtacatattttatgcgcatttatggcattttatagtgcatacaagttcgaaccctaataatgacattttcacagatataactcgaataattctccctaatttgattgggtgctgggacgtttcttaaaaaccgccacattgggcgtttcttaaaaccgccagggcgtttcttaaaaccgccacattgggcgtttcttaaaaccgccagggcgtttcttaaaaccgccagggcgtttcttaaaaccgccaggtgggcgtttcttaaaaccgccactttgggcgtttcttaaaaccgccagggcgtttcttaaaaccgccaactcatatgattatgtatataaatatatatatattagaagtttacataacaataaaaaatttaaaatacatatgcatatctattgacggtaaaataaaataattatttttatccttctttaaaagttctcaaaaaatatgaactgaccagcataatatattctaaaaaataaaatatttaagatatgagttggagaacagacttttgttagaaagcaattaggatattcattaaggcaattgcaaaatttaatatcacaatcgtaacgtttctgatatttatttatgtagcacacatcgtggttatagcaacaattatcaactgcaaaattttcgaatataaaattgctaattcgtaattcgtacaaccaaataaaaattaagtaaataattgtaaattaatttaataaagatttttagtctgtcactgctagactaataatatttccggctgacacttacttgcacaacaaataaaaattaatagatattattgaatatttaatttaacggatatacatacataatcatatgagttggcggttttaagaaacgccctggcggttttaagaaacgcccaaagtggcggttttaagaaacgcccacctggcggttttaagaaacgccctggcggttttaaaaaacgccctggcggttttaagaaacgcccaatgtggcggcttttaagaaacgacctagcaccaaaaaaataacgtttagtttaaatgctttttatttatgcatcaaaaataatgaacatttatatatacttattaaaaatttatatttgttttcctgctggctttatcataatgttcctcctataatagtgcaaaaaattttgggtcagattttaaaatgtttttgtatttttaattaattttttaatttaataattaattcctccaatcccgtcataaatttttttaccaagatttgaattttattttttattaagacagtatttaaaatcctccataatataaataaattttgtgtaattgaatatattcttttacatgatatgatttttccactttatttgatttataagctttttaattttgtttttgtgagtccgttgtcgctgatattcttccttaatatttttgggaaaattatttttgttggtcattcattggtcctttgttaaacttttgatgttagaaatactcaggaaaatttaattaatgttaaacataagtaattttaccgattcttattttataaatttgatttttttcttaatttcggtataattttttacccatttcatgtcattatttgtaaaaaaaaattattgcgattnattttanaagactttctgatatttgtattttaacaaaaatcttatgtttccttatattaaaattaaatggntaattatttt

SEQ ID NO: 12917 - DNA, 1553 bp, Heterodera glycines
acaaaacgctcggccttttccatccgccgcaattgcgcctcctgcgaatgccatcggaaaacgactgtacgtgctgcttagcatgttgccagtttaaattccaaattttgaatgttttcagtttcgtttgaccattcaaatgagcttgacgagcgcgtctattcgctggcgtttccgctcaaacgcaccgacaaaatggacgccgacagttgcggcgaaccgtccatcattgacacatttgcggaggacgacgccgaaggcggtgaatcgctggcggagaaaatgcgtcaagcggaagtgcagaaaacactgtttgccaaatgcaaattcttcctgaaccgggaagtgcccaaggaggcgcttgcctttgtcatccgctccgggtgagcattaaaaagtcggggaaaccctttggaatcaaaattttctcggcgtcattttataaagaattatcggtctgtgttttgcaaattgaaaaagacattgaactgagtacctaagcctatgtacgagttgtcatgacaccaatgaaaaatggtttttttcgtatttgacaatttttgagattaccgttgactcttttttcgtttcaaaggcgcggtttcttatacaacaaaaattttaattttttcgctttttaaagttttcctcattgaaattcgagaaaaaaaaatcctagcatgataattataagttaactcttttagtgggggcttcgtctgttgggacggatgcgccccgaattcggttgacgaacacagcgaacagatcactcaccaaattgtggacagaaaagtggagaagaccaacattaacaggtcatccataacccatctcttatgaaataaattcttgcggttacacggtctgtggataacacacaaaataattcgtgcaggcgttgaaaaaccgagttttgacccttacaaattagtttttcaaaaaacctaaaacaactaaattttttgaaattaaaaaaaacaaattttttttgttccgacatttagtctcggcgacgttttgaggtgtacccagggtagggaacgtaatgcactttgcccagttcattcattgccctgtcaccccccttatcaaattgcttattcgccctgttcagagtgtacgtgcagccccagtgggtgttcgactgtttcaatgcgcggcgcattttaccgccggccaaatacgcgccgatggccacgctgccgccccatctttcgccctttgtcgatgcacaacatttggaagtcggcgccggtgcttacattcccttggagcgcattgaacacgcaaaacaacagaatggaacgggtcagtcactaacaaccgtatttgctctttttatcccccatatccattaatcccccaatctccaattatcccccagtctacgaggcgtttgaaaaataatcccccatgggggataaaaagagcaaatacggtaaccagttttggggaaaaatttttcaaaaatttttttggggaattaaaaattaaaaatttaaaaaaaattccaaaaaattggcacaaaaattttttgaaaaattctgaaa

SEQ ID NO: 12918 - DNA, 1957 bp, Heterodera glycines
aactagcgggtgcgtgaaccgtcggctatttagctgggaaaaagcgcttcgcgctttgggagcttcgctacctagataagcattgagtttttttagagatttggaatttattttaaaatcttaaggggttttaaggccgcttcgcggcctcagacgggcgcttcgcgcccgttttttaaattgttgagctcatacgggcgcttcacgcccgttttttaaattgttgagctcatacgggcgcttcgcgcccgtttttaaattttgatgtgcattttcggccgcttcgcggcctcagacgggcgcttcgcgcccgtttttaaaattttgttggaccttttcggccgcttggcgcccttttccaaagtttgttgagcttggacgggcgctacgcgcccgtttttaaatatggtttggaatggacgggtgcttcgggcccgtttttgaaattttgttggactcatacgggcgcttcgcgcccgtttttaaattttggttatcagaagaggtacaaaaatgattagaagaggtataaaagtgattatgagaggtacaacagtgattagaagaggtacaacagcgattagaagaggtacaacagcgattagaagagtgattagaagaggttcaacagtgattagaagtggtacaacagtgattagaagaggtacaacagcgattagaagaggtacaaccactgtcgaaaaggtacaataattgttggagaggtacaaaaattgttcgaatggtacaataatggttaaaaagggtacaatcatggttttaaaattaaataattaaggaaatcgtttattaaaaagtaagattaaaaattgatgtaattaataaatttttaaaaataaaataaatttccttttattaattaaaaagagagtttaaaatgtacagggattgaatatttatttaaattgaaattaagaaattaatattacaaattctaatttaaaaaatacaggagttctttaataaaagtaaataaattattattttaatttaaaacatttttcacaaaaaaataatttaatttaaattaaaaatttttattttttatggattaaacaaaactatttatatttattaaaatgaaaattaataatataatatttatttaatttgaaatgaaattaaacatgcaaaagtaatcaaaaaatgcacataaaaataatgtacaccggccggattcgaacttccccccccctcaaaatgatgcctcagaatccccaatcacacagggattctgaggtcttaacgatgtcaaaagtaaaatgtgatcacgtattcgtgatcagcgtcataaactacccctaaagacatgtttttggaatattttcggtgaaaaaattttttcactcaaaaatcctgtcacccccctttggtaccgaatcacaaaatcacttttatttttgtatcttttttttaaaatgtgataaaaatataaaataaaatttatattatagagcaaaaaattgcggatttttgtagtattttacttttccagaatatcttttcagaaccgagttatgaatttttttctgaaaattcgaatttttccagaaattctggaataacttttttccttttttagatagaaattccaaataaagtccataaaattctcctgatttttctctatttttaaagctttatttgctcaaaattggtcaacccttaggctagatatgaatttttcaatattagcccaaaatcccgtgggccaaaaaatggaaaatattttcaatttttaaaaattctaaaatttcgaaacttaaaataacatcatattcgtattcagcaccccaaaataccccgaaaaaaaatttttcacccctttttcgacccaaaaaaatttttgaaattttctaaggggcctagctccgaaatttttgaaaaatttacttcatgaagtaccccattcgaaagcatttaaaatgctccacaa

SEQ ID NO: 12919 - DNA, 4389 bp, Heterodera glycines
ggttttttcctctccctttctgtcggtctctcttttccgccagtctcttctttttctctatccgtctgtctttcattggttacatttcctttggtgtccatctctgatcaaatgtgaaaacatttgtctctgccttttcgtatcagaacatttcaattcataacttaatgaatggttcggcaccagcagagaatttcgggttcggtaacatttccctacattttttccgagattcgggttcataaaccgcaaaaaccgctacttttatgtttcaactctcgatcagcagactgaacttttggcgtgaatacgtcctaatgttttctacggcactttttcttttcactttctccgtctcttcctcttctttgtccggtggcctttttaccattgcgattgatcacttttgtattttatttattttttgctgcacaaaagacaatttgtttgttgtttattttttgcgatagtttatatgctaaaaataactttggacgcttagaatcaatagaaaaatgattagttttcgcattttggttgaaaatcagcagtttacgacttgggttatgacgtaatgaaagtttaaagactcataacttttctcttgtgcgtcaaattgcttagcattcgctaagaaaaagattctacctttcaaatattttttttagatatcaaatttgttcgatttagttgggaatgaagcgagttacagttgatcaaaataaacaatacaaaaaaggcatttaccagtcaaattttgaattagcgcaaaaattacgccaatttgctattggcgaaatgaataaacagatcgcaaaacttaaaaaatttggaatttttcttttaaaaatgcaagagccggtctcgacttaaaaacttcagttttataaaataaacttggaatcgctagaggtggtaaaatatttgactcgctatattaatggtttctctctcattttgaaacggttgttgaaaaacaaaaaatgattgacggtaaatagtaaaacatgtcattgcattttagatttaaaatgccaaaccaaaaggacggagtgacaggaggcaaacgaattgagcaggaacttgccgagtttgaccttcccttttacatcgtcgcattggcctttttcctaaaggcgttcttccgtctgtatgacttgctcgtcttcatcccattcaaattatttgctgaccctgagctgaaaaaggaacgctctcgtgagcgaaaggttttgcgctttcaaaagtaaaaaaagcaaataaaacggaggtttgctttaggccatgcccatcgatgggaagccgacttcgtcctggagacacgtcgataccattggcacggctctgtacaccgaactgtttgagggctgtccgacgcttggcaaaatttgggacaaagcggcacagttagtaattggctttatttatttatacatgcgtttatgtttgaattgaggttacaccgtggacacaattgcatgggcacgcgcgacattctcaatgtcgtcgaagaacagcagccggacggaaaagccttccaaaaattggcacttggcaaatacaattggatgaattacgaacatgttgatgaagtgattgtggaagttgcttctggactcagcaatttgggcattgtccaaggacaaaaagtggtcattttctctgagaccaggaaggagtggatgatctcggccatcgcctgcttcaaattgggccttccaagtgcgctttaccacaaatgatctaatacttttctaaatcgcccttttcagttgtcaccgtttatcccacgcttggtgacgaggcaattgcttttgccttggccgagtgcgacgccgttttggcgtttacttcgcgtccccttctgtcgaaagtgttcgcttccgtcaaagactgtcctcagctgaaacgcgtcgtttacttcagcgaactgcacgcacttgccgaggtcgccgagaaagcgcctgatgcgataaaggaagcgttcaaaagtatcggacgcgaactgtacagctttaacgccctcaaggcactgggccattcgcaaggtaaacaaaggctcccccggaaattttaatttaaaaaaatctagaaatcttaattaagaaaatttattttcaatagttttttgagaaaaactcttggaaaagatggggtcgaaatgggtaaactcagaattaggctcattttcttaataaaaggcaaataaatgcctttgataagccaatcaaaagaagtcaatcataactaaggaccaattttctctttttgtcccctcaattccacactgacaatccaatgaacagctttaactgtttcattgcagcaaaactcgagcggaatgtgcagccggacgacttggcgatgatcatgtacacgagtggcaccaccggaaagccgaaaggagtgcttttgtcgcatcgcaacatcatcgcgacggcttcgggacagagcgctgtcatttcagtcaggtgaataagcaaaaaaaaaattaagcctacactgccgacaattcagtaccagcgacacaatcattggctatttgccgttggcccacattctcgaagtgtgcgccgaaatcatttgcctgtccaaagggtgccgagtcggttactcttcgcccagcactttgcatgaccgtgccgtgaagattaagaggggaaccactggcgattgcgtcgaactgaagccgactttgatcgcttgaggaggcgggcataaaggtgggacacgacgcaatttcaccgccggagaaaagagactcggccttttcagtaccacttgtcgcccatttgtccctttctcccccgttcagacttatatgaccgtcatggggctgcatcctatggcattttatgcttcgcatgctctgatcggtgcttttagcattctcttcgtcgttggcgccagtgccgttctgatctcttccgcatttgcggtcggttggcgggaatggcattgtcccgtcaagagtgcgctattacgccaattaagggggggggggcatttgtcgtccatcccttcccacaactaccgctgtttctgctgactctttctgttcagttcgtctccgtttcgttgtttctgctcttggcactgctatacgccttcagttgcattcagttgaccgtccttttctgcacgttcactcaaaagggacaattggtccaattgatggttcgtccgtccctttggcattccgtccctttttaaattcgaattctccccgaaaggtcggtctgtccttccaattgctcggcctgctcagttggaagttcagcccgcccctgcacagtgtcggccgttgtctgttcgcttcgcttaatcccgtggctgcctttggtctcggcgtccaaatggcgtgcactttcgaaactcgaagtcggtatttgccaattcagtacgtggtccttatgtcccattttgcccttttgtacttacaattacctaattaacactgactaattgcccattagtgtttctgctcgattggccccatctcttctccggctcctcccatcagttctccgtcggcttggccatgcttatgctgctgttcgactccgctctcttctctctgctcactttttactttgactccgtttggcccaccgatgaaagcccccggaggcatccgctctttttcctccaggcattttttgattgtttcccaatttgaattaaaacaccctgtgaaaatcagcactttggcatcggtctgtccaattatgagaaagtgacaccgtacggagaggacgaagacggggagggatcggctacggtggccaactccgagaacaccgaagtcgagacaacggagaatcggacggcggacatcgaagtgcgcgggatgagcaaagtatgggagtccaccggactgatggcagtgaacgcgctgagtttccgcgcttaccggggaaaggtaagcaatgcgatgccacggggggcggggggagggggggggcttttatcccgcgggcttttgccactttaccattttttcattaattaattttcacaagcggctaattagtgtggccactttttgcggcaaccatcccattgccatggtcaatgtcaatatttcttatattctgcccattttaccacgattcctcgtctttggcatgtccccgctcggcttcgtctcccctccccccccccccgcacattccccgggtcggtgcaccccaaaacgtcgtcggccgaaacgtcgtcggaagactttttgaaccataactttgttcactgtcaatcaaattaagaattgttgatgttgttcgatagctctatgtgtttattattaatttgcaaaatctcaaaaattttggttaagtatcaaaaaagtaatggccagaaggaactcaaaaacccagtaattcgaacttt

SEQ ID NO: 12920 - DNA, 4452 bp, Heterodera glycines
agattatacatggcaaccctacaaatataaacctatattatagcaatattttattcgtttttaaggctctagtctaacagcattcaacaaaaaacgcgctgacaaaattaaaagtcttcttccgagaaatgatccattgcgtggcctcagctggcaggccattcaaacacgtttaagaaaacacattttaccatttgaatattttaattagtttttccgtttattttataatttctactaactcaaaaactaactaacatttttatatcaatctttgacgccttataatttatctttttagttattttattttattctttataatttacattttgcatttaattcatcgttttaatgagagctaaaaaacactgaatagttagttaccttacattatgaaacactaagttataacattacgagctcagctattttttttgtaaagcttattcgcaaaaatctgacgaaatctcttcagtgttttaagttgattttaaattgagcaattatccaaattaatgttcccctctttagtttcaatcattgcacaattttaatgtaattcattttcagtgtattcccatccatttattcatttttattttatttgtatatcattttatcatcgtttacttaattgttttatttgttgattgtttgtttgtcttgtttgtttggttgtttgtctgtttgtttgttgcttgtttgttttgtacacaacacttggtcggagtctttactccccagtgtttttaatttcgtattcttatattgcttaaaaattgtatttgtttgtttagttgttttgtaaacaacacttggtcggagtccttactccccagtgttttgtgtttcaataaattttttaaaaaaattatttctcatatttttatcactacaaatataacttgtcgataggtagataggtcttgcacaaaagggccacctcatcgcggtgtgcaagtctagtatccaacaacacaacgaaaaggtttttgttgtgtgttgcttttgttggagaagctaacggcccatagttatgagaaaagataaatatgatttgattgatacatttttttaaatttttatttactttaacaaaatccttaaccttatttttttatatacacaattgtatttttatattttaaggagcatccatcatacgctgctatacatttattgttttttgaaagaatacataatgtgtgtacttacattctatcaataatcctaatagattaaataaaagataaagtaatgaatgtcggagattgtttttgtggtgaagccttgtatcctcttcctggtgaacccattgacctgacaagacaggttgtccaattaccatgtgagtgcgcaccatttcatattggctgcattgctgccagcttaattcggagtatacaacttcaaccaaatggtcagcgacgcggaacttgtcctttctgtaggagaccgtcattaacagaggaatcacttttacaaatcaatggcaacaaattggtaaaatatcaaatgcaaataatgttatgctcaataaatttgactcttgcttctaaagttggacctttaccaccaccgcaaccactgcaaccgccactgccgccaccaccgccgccacttccaccgccgccacttcctccgccgccgcaagagccaccggtgcacattgatccacctgtacctcttgaagagatgcagccacagcagcgaagacgtcagattgcagcgattatttgctcacgccgaagcaatgaaggcaatgggcgagaattgcgaatacattggcacagtgctccttaccgaaatgacacttgggaaccggaacaacatataagagatgttagtgtattctagctccattcaattttaaaacccgttttttagcaagccccattaatctatgccttatggcatgaacgacatgataatggagaaacaccttcccatgattatgtgtttccgttacgtccagctccgtggatgacaacaattagggcaggaagagatcttcctgaggtagaatttgctcattcaactgctcgtcgacgtctgttccaggaggcgaatggtatgatgattgtccaatgcaatatggaagaccatatttggaatatcaacccagttgtgaatggagaacaacatgcacaaccagcacaagctgcacaagaggatgtagctgctgacattgaaattttaggtataaataaaatcattgctgaaaatatagttttattaagaagagatcgtcgtcaatccgcagggaatgcccgaaaatgagttggaaaacaatgccatcgaaattttagaccgtaataaaaatacaaaaaataagcattatttacttcatatatattaagttgttcaacaacaacaacaagctgctgaagctgaacaacctgcttatgaacacgttcgtcaaagacacaaaaggggaaaggtaataaataaagattcaaccaattttattatcattatatattatttagaacttttgtggggcagagagacgtcgcagacgtttcaatcaacgagctcaaaattaattcatttgttttgattgtttttgtctatcatttatcattatttaaacaatttatttattgttctttatttgtttatgtgcgtacacttggtcggagtccttactccccagtgtttcattcatgcattaaatttctgttttatttattttatttgttttggacataacacttggttggagtccttactccccagtgtttcattcattcattcatttctatattttgttctctcatttatttattttgttttgttcacaacacttggtcggagtctttactccccagtgttgcattcattcatttatgtttatgtttgacaaattgcatttttttgttgtatgcacatacacttggtcggagtctttactccccagtgttgtgtgttttaataaaattttttaaaaagttagttctcatgtttttaacactacaaatataaattgttggtaggtgggtaggtcttgcacatatgagccacctcatcgtggtgtgcaagtctagtagccaacaacaaaaatatattgttggtgaagctaacggctcattaggcacaaataaaccacaattttacaaaatctgtttcaatataattttaaattgtttttcgttttctgcatctccccaaaatgttttgctttttttatgaacaataaattttgttaataatttttatataaaaattaagctctaaatatgaataatcataataatattgatccacttatacttgatggaatttcatcggctataaattcatttgacaccgaagctagaaaccaaataatgcaagaacaactacgtatcttcttcaattcccaagtaaaaatttagatttttccgattaactaagtaatttagccacttccaacaattggatctcgtttgaacgcagtctactcccagattgttgatatacgtgctcaagcaaacataacaattgcacctggataccttcaacatagtattcaacaaattgaaaatcatcttgccgattccttgctttttcttttggaatggctccacgatgaacaaatgttagcagaagaaattgtaaacagtgatgaaattttgtcagatgagaatttgcctgagtttgatgaataatttgtttgtttgttttatgcacacacacacttggtcggagtccttactccccagtgttgtgttttaataaattcttcaaaatatttttttcaaaattttaacacaaacatatactgtttatgacaaaaaggtaggtaggtcttgcacatatgggccacctcatcgtggtgtgcaagtctagtacccaacaaaaaaaatacattgttggtgaagctaacagccctttaggtataaataaaattgaatttttagaaaattcattcaatagaattttaaattgtcttttaatactcacccaatagaacattgaggagtatcatcattatgaatttcgacattttccaaacatgttcatgtcttgtgaaattgtcccaaccggacttgaggaaatccatgcatataaaaggtggagaaatagacaattagcgacacttttgtaatcaaaaattaagacaaattttgctgctaattagtaggaatgcaacttttagtgacgaaaaatctcgaaatacagtcatggtcatatgtttatgatcactctctatttggctaaaaatcttttgataaaaaccgaagatgaacacataaatgcacagtctcttggcattttttgtagcatcccaaccctttagggattttgttcgaaaattttcccgatttcaagccaattttgggttttcagatcaccatgaaggagtgatctgatcaagttggtgtaaaagacttttttgatcagcataaaaagttagattagcaagtattttttcagaatttttggcccataaaatattgattttat

SEQ ID NO: 12921 - DNA, 768 bp, Heterodera glycines
gccacgcgaaaacgaccccgaccgatttttataggtttaaaaaataaaaatttaattactaaccataaaatccttgtcttcgcttcatgcctctaagagtttcaacatttaccccaattttctcagcaattttctcctcaatttttgtcacttttaaatgtggatatttttcaattgccttcttctttatcattaaaaacatttgaacaaatttttccctttcctcttttgtatatttttgaatcacttaaaaaacaaaataaaaattaatttgaattttcatttaaatttaaattttcaacaaaacaactgataattaattttcaaatttaaattttcaaataactgaatattaattttcaaattaaatttaaaaaaaacaaagtaaaattatttttcaaatttaaatttttaaacaactctcaattaatttaaaaatttaaattttcaaaaaaacaacagacaattaattttttcaaatttatattttcaaaaaacaaagtaaaattaattttcaaattttaaattttcaaaaaaacaactgacaattcatgcccaattccctcttccattcataaattcgatcacgtgcgatgccaattgtgcagctaatttgttgctctattctcatcaattttttaagctcaggatttttgtgggttttcaaaatgccgctttcattgcatcaaattgtaaaacaaattgtcggcataaatcataattgtcttcacatttaagctgatggcataatcggcatcattatgccgt

SEQ ID NO: 12922 - DNA, 3625 bp, Heterodera glycines
ttaaattttcaaataactgaatattaattttcaaattaaattttaaaaaaacaaagtaaaattatttttcaaatttaaatttttaaacacttacaattaatttaaaaatttaaattttcaacaaaaaccaactgacaattaatttgtttcaaatttataatttcaaaaaacaaaataaaattatttaaaatttaaattttcaaaaaaaaaaacaactgacaattcatgcccaattccctcttccattcataaattcgatcacgtgcgatgccaattgtgcagctaatttgttgctctattctcatcaattttttacgctcaggatttttgtgggttttcaaaaatgccgctttcattgcatcaaattgtaaaacaaattgtcggcataaatcataattgtcttcaacatttagcctgatgccataatcggcatcattatgccgtaaaaaatttggtgaattttcttcctccatcggttcgaattcagtcgaattttcatcagtttgaacttgatcagattccgtcaaatttgaaaacattttgtctccattttgatcattttgactgttttgatcggatttgtccaattcttgttccaaatgaaaagcctgataaatattgttcccaatataatcagtgtagtcggatgttttgttatagtaatttgttggaccagttgcattagccgaaaagatgagaaaaaaaagaaaaaacattttacaaaaatttctaaaaaaatcgtaataataattattaataaaaatttaaatataaatgttgtaaattgtgtaaataattttttattcataatggtgaattgattaattttgcacatggcaaaaaaagccacgctttgtaaaaaaaaaagcagaaacgaatacataagcatatttccgtttttaaggtaaagatttgggttataattttggagctttttttgtggggaaataaaaaataaaattccttatccttttttttggccataatcccgatcaaagtaacgatatttctgccccgtgttacgcactgacttatccaccagacttatatttcggatttgaactgtataattttctataattgggtgcttcaaagatgctatgaagttagtcaaaaaatcatcaaatgaaaatattttttggtataactttctcaaaagaaaccaattttaaaatcaaaaattcccatttgatggttttttgtctcacgcccattttcatggtttttgattaatgtcccagcaccgcttcaaacaaaccgtgctaggatgaagtccgaataatgcaaataattaaattgaagcaaaaaaaaattatttaaaatgttcaagcactattaattaatcaatgtttccacgcattgttttattacatcaccatttctttagaaagttcaaaaattaggaattggatacataatgagtaataagaaatgcacagaataatagccagataaattaaggcgcctttcggcaccgccgacgccccaaaatgcgtcactttattttttgttaattgactcaaaaacggcgtaaacattaagaattgaacaatctttttttgaatttaaaaaacacattaatgaataaaatcagaaataggttgaaaaaatattaataaattggctaagcatcgattgtttcttaatattattaaagaatatttacgtaccacagtttaagatcaatttatttttatcattttaaataataaatttataatatttacggttaaaacatgtttttttaaattatataaataggctttacaatttaaataatgaatatataaatatttatagttaaaatatgtttgtttttttaaactaggtgcttgctaatacattatattaggcattataatctattattcttttaatgacgaaaatggatttaaaataataattgcgaccggaagaaagtttcgtatttatgcagaaaattaaatttatttgaaataaaatttgtgtattacaaagggagctctaatttctacatgataatatgaataaaatataaaacaaattttgggccaaaaattcataaacaaaattcctaaaaaatttaaaccattaaaattccaaaaatagaaacattcccttttttaaaacaaaattttaacattcggattttttttttgtttgtttgttttgatttaaacccaaaaatttttggcctagaatatgccataaataattattcataataatgatttcataataatgaaaatgataatgctcgtcgtctagtagagataaagcgaatcgaacacgccaagacccgccccgatgccgccctcgttgctggatgcgcacttggtacggatcatctggccaggctgtgtgtactctaccagggtgcctgccttggtgtcataaacacagtaggtgtacacgcccaactccgtgatcacatcgctgaagatcggcttttcattggcccaaatcaaataattctgaaaattaaaaaataatattgcattaattttttttgttattaattgtataatttgtatttttattaactttaatgattgtataattattttagaatttttttttttgtaagaaaaataattttaaaaaattggtagctaaaaaatgatattttgcaatattctttttttgtgagttaatttaaatgaaaaaattatattttattttttaaagtacgataatttgtgctcaaatgcgttgaattgtcatcaaaaaactcgttagcttatgttagtttttacattttggataaatttccaataaatcacgcattttaaaggaaatttaaattattaaaatcaattttctttttaattgttcacacctgagcaaccagaggattcaatcgttccatcagaatgtaagcggcacgttgttttgacgtgaattttttcaatctgtccacaatttcttgttcccaaaaattcttgccaccgccttctttgttcggcttcatcacataacgctcggggtgggcaatggcatccttaattaattgggtaaaggcaacataaaatgccaccaaatttttggaccttttttaaaaatgctttttctttaatttaacattactgatttcatagaaattatattttacttttgttttttgcgaattttggaaaaaggggcgaatgccgtaattctaattatgattcattgcaataattcttaataacatatttgtctaatttatcaaatgcattcaatttaatgataattgattttaataattttcatataaagcacatattaatgggaattttcttttcataatttttaataaagcaatttatttggtattttagcctaaatatgcatttaaatttttttgttaaattgatgaaattatccatttattttaaccacctgaatcactcttttcgtttcctcatcatcaggattttccagtccccacattttggcgaatgttttgcgaattgctgtgaccattggcgcatcttcagggttcgggaaaaagcgctcaaccattcccggcttagtcagcacctataaaaaattgggtgttcatttcaatttatataaaaaaaaaattttttttccataaatttatctgttgtaatattaaaggaggtaatttattagaaaataatatcatttattaaattcattt

SEQ ID NO: 12923 - DNA, 1308 bp, Heterodera glycines
  unsure (1)..(1308): unsure at all n locations
aaaaattgaaaaaattggtaaattttttgcaataaattcattttatccagaatttttgtttttggacaatttttggtattttttccaaaattttccgtctttaggtttttcgccctggattagaaattagccaaaatagatgtcagttttatgatcatggaccccaaaaccactaaaaaatatacaaaatgaatttatttaaattaaaaataagtttttacgcgataatccgaatttgtgcatccatctgtaaattattgttgaactgtagacaccaagtttttttgaaatttcattcacattttgatattttggttgtccattttcgtccaattccttttgcattgcaaaaaattggtgaacaattgcaattcgtcgatcattttgtatgtcttttttcaaatcttaaattggattaaataaacaaaatgcatttattacattttttaaattaaaaattgttttacgtgataatccatatttatcaatccaatggtaaattcttgaatgtgttacaccaataattttcgcaatttcattcacattttcatattttcgttttccattttcgtcaaattcattttgcatttcaataaattgatgaacaattttaattttttgttcatcttcctctgttttcaatgattttttatcattttttcttctaatttttaatattttgttaattatttccaaatttttctcctttttttctccacattcgtcataaatttcttcaagaaattgatcaatttgcttttgatcagttttgatcagaatagacacaaaagcatcatcattttccgatggcaaaacattgcccaaattagcatcatcaacagaacgattagaggagtcaattagcgaatcagtttcagtatttgtccacaattttgtagaaaatgatggcataaagagaaaaacagaagaaaataaactaatgaagagcttcatcagcataaatcacaagttaattacttctaaatgtgtaattgttgacattatattaccattatcttattagaaaattattcaacttaatctcaattgactctcagaaacttccctagtaattagtaaaatgaacaaagaatgtatattcatattattaaagaaagaactcaaataaataaagtaacgtaataatgaaaaattatatatttttttattaattatgttaaattgttnngccatacattgctacattaagcaatgaatatgcccataaaagccctataatatgcaaatgaataaaataaatataaaatattcatcaaaatatcaatatatgcaaaaaaacattaattt

SEQ ID NO: 12924 - DNA, 2888 bp, Heterodera glycines
atcaaacaggcgcgccatatgtttattcttttttttctcttaaaaatttcatcatttgctgagcaaacatatcgcatttactatcttcaattcaatcactcaaaatttatttttggtaaataaataaatatttgtttaaattaaaatttgattttttttttggcatttctgatattttatttaataatttttatcggaccacttgtccggtctcggaatgatttcaacaaatttataaataaattattacaaattaaacagtcatgtcaaaaaagtgttgtttcatcctctttttaggctgataaaaaaagatcttttacatcaacttgatcagattacccttaataaaatcaattattcaattcaaaaaaatcattaaaaacaaattcttttaaataaattttctaatattattttaattattaaattatcatattttttaaatcttaaaattaatctcagcagtgaattttatagtccattgcttgttaaaatgccgccgtctgatctcaacgcgtcaattgctaaagtgcaaaatgattttgcactcaaattgttgcgcgaatttgccgcgttttacggcagcgcttccgcgtgcatttcacctccggctgttgcggtaacacttgcgctgacgctgtccggtgccaaagacaaaacgtcggaccaattaagccaagtgttggcaaaaggtgccataaaatgcgacccaatggcatttagtcacatgcatttttggaaaatttaaaatttgaaaacctcaaaattagctttttgggattttaatttttgaatgactaatcgcattaatatatttttgactaattttttccgaagctttattgtatatatctttgtatatttgaaaaagctcatttacttcttttttttattgcataaactaacaggaaaaagtctttatctgttttaaatctgcttggtgatgatgtgtgctggccaaaaaaatttttactcaaaaatataaaaattcattaaaaatttacaaaaatatcaaaaactcattaaatttagccccaaaaatatgaaaaaattattaaataaacaaaatttaggaacgccaaaataccgcattttgccccattttggcgcccttttgaatttgctgcatggagggggcaaaaaatatgccaaatttactgtcgaatcggtgtgcaaattgtgcttgaagtcggacattgcgttgtcagatgcgttcaaggcttctcttgacaaatattttggtgctcaccttgaattggttgattttggtgagaacatgaaacaagtgttggccacaacagcaaaggcaaattgaatttgtgcatttttaaaatttattttaatgaaaaaaatgtgcaattaaatttttatatcgcatttatttaaatttgaaaatgaatttatgatttttaaaatttattttaattaataatgtaaaatatttttgtatctttttaatatttcatttatttaaatttcttttaaagaatttataataaaatttaaaaaaatattaatgtatttatatctttataaaaaaattagtaccaaaaataaatttataaaataattttacataattataaaaaaaattgaaaattaaaaaaaaaactttctattaaatttaattttggtgtagaaaacgaaaattgaaaaaaatctttacgataatatataaaaatgagattttttaatatacaaaattttattttaaataatcccaaacaatgatgcaaaatatttgtcaagatcaacaaaattgtggttgatgcttctcatggagcagtcaaagaaattctgaagccggaattattcaatgctcaaacaaagtaatttaaaatattttaaatttaattaaattttttaaattttctttatttattttaagcctccttctgttgagcgcattttatttcaaaggcaaatgggcagaaaaatttgatccggatttaacacagaaaagggcattttttgttggaccaacagatcaaaaagaggtcgtcgttaatcattgtaaatataattgctaataatttttaaactttattgtaggtttatatgatgcaaaagacgcatttctttgattattatgacgacaattcggtaaatttaattaattattttttaaattaaaaattgataataaagactaattaaaaacaccaatattatttgaaaccgtgaaataaaaattcattaaaagttattggcatttatttagaatcttaaaattaatgaatttgaaaaataaatttctatttaactatatttttatttaatatcaaaaaataagttttatattaacaatatttttttccattttaattataattaaaatacaaattaaatttgtctttctttacattaattaaattgatcaaaatatgtaaataattttattaaatttaaataaattaaacaggtatacaaaaacaaatctgattataaagagaaaatttctgtttttaaggtccaactcttggcaatgcaatagtgatgaagcatcaatgtacttagctttgcccaaggagcgttttgggcttgcaaattttctggcaaatttaaccgtcgattctctgttcgaaatggcacaaaaatgtcgaaaagtcaaattgaatgtgagtttaattcttttaaatttaaaatatttgaattaaataatttattaaaaatttattttaggtggcagtcccaaaaatcaaattagaacaaactgttgaattgaatgaaccgttaaaaaagttggggcttggtaaatggtttttgaaaatgcaaatttccaagcaattgctgctgatgtgccatcattatctgtttcaaaagtgctacaaaaagctgtgcttgaagtaaatttgttaaattaataaaaatgttgttataaagttttg

SEQ ID NO: 12925 - DNA, 1173 bp, Heterodera glycines
aaaaaagagatagccatttttttggaccgtccataccctcacatatactcaaattcggcccggaaaatcattttagagcataccaactgatgacagccactgtcatgtttccaaagagatttctattaccagatgccaaaaaaagagatagccatttttttggaccgtccatacctcacatatactcaaacggcccgaaaatcatttttagagcataacaactgatgacagccactgtcattgtttccaaagagatttctattaccagattgccaaaaaaagagatagccatttttttggaccgtccatacctcacatatactcaaacggcccgaaaatcatttttagagcataacaactgatgacagccactgtcattgtttccaaagagatttctattaccagattgccaaaaaaagagatagccatttttttggaccgtccatacctcacatatactcaaacggcccgaaaatcatttttagagcataacaactgatgacagccactgtcattgtttccaaagagatttctattaccagattgccaaaaaaagagatagccatttttttggaccgtccatacctcacatatactcaaacggcccgaaaatcatttttagagcataacaactgatgacagccactgtcattgtttccaaagagatttctattaccagattgccaaaaaaagagatagccatttttttggaccgtccatacctcacatatactcaaacggcccgaaaatcatttttagagcataacaactgatgacagccactgtcattgtttccaaagagatttctattaccagattgccaaaaaaagagatagccatttttttggaccgtccatacctcacatatactcaaacggcccgaaaatcatttttagagcataacaactgatgacagccactgtcattgtttccaaagagatttctattaccagattgccaaaaaaagagatagccatttttttggaccgtccatacctcacatatactcaaacggcccgaaaatcatttttagagcataacaactgatgacagccactgtcattgtttccatagagatttctattaccagattccaaaaaaagagatagccattcttttgggacgtccataccccacatatactcaaacggcccgaaaatcattttagagcat

SEQ ID NO: 12926 - DNA, 925 bp, Heterodera glycines
  unsure (1)..(925): unsure at all n locations
ttctatcgatatgcaaaaattggtattgatttaacaaaccttaaagaaaatttacacagaacgaagtaaatattgttttttacatcataagagtgtttattattgcatttccattaaaattttggtcaagctccttttaattattttatgagtttaaatttttatagtttgccataaaatattgctgatttgtttctcttttctcaacaatttgcggtttaataattaaagacgctaaaaaatggcacaacagcaagcgataacgaagaagagtaaagctatacaagacgaaattttcaaggccgaattaaacaactttctcatgaatgtttgaagaaaatttgtgttttttaaaattaaattacatggaatttgttgggtaattcaattgtttttaaacagtgttatactttttcaaaacgaaactactgtggccaatttaggagttggctgaggacggttattccggtgtcgaggtgtgtcgtgcgccctcccgccatggcgacacgcagtgcaccccctccaccattggcactttcttcttcagttgaccccaaccttcactcctcctccgtcccgccaccaaccaacgaatgctcaattctcgccaatccatcgctttctgtcgcccatttgtcgtcgtcggtcggacgaacgacggaccgaacgcgtaaatttgggaggaacaaaaccgacttttttcgaaatggggcgacctaagttttcttccccaattttccctattttcaaatttaatttttcaatatttaagcacataattccgaggcttcgaccaacaccaattttttgctcggactttctcttcgcaccaaaacagcagcaaatactacgcctacncgttccgccgtggacaagcggctcaagtcgttcgagtcgaccaccgaatgggccgatctgatcgcag

SEQ ID NO: 12927 - DNA, 2411 bp, Heterodera glycines
atggtggggggtttggtgccaccaccatttctttcgtcagttacaaaattatttttctgttcatgcgccgtcaatgcaaatggtgccaattaaattgcgattaaatatgatatttttattaaaaaagtttttcattagcataagctctttatatataagcaaactcatatttatcttttcataattctaacacattttttttccatttttgtttactcataactcagaagcgcaaaaaaatttgattacagtgacagatatcgattacatacattcctttttcgtttctattcacataatgtgtcagttttgtcattgactcccccccccctttttttcagcaaatcataacaacaatgtttggatggacaattacccattttttgccatgctcattcgccccgtttcgatgcaatggttgacaaacttttcgatggcaatttcaatttcggcaagttttttttaattttttttttgtaaaagtcagtagttatttagggttttaatgtttttaatgattttgtgtccaaaaacggacctctaattttcaaaattactcagaaaataaagaaaagtcggcaagttttttttttcgggcatttagaccatagggcgtgagttcaggaaaaaattggtaaaaaaataaaaaatattagccctattgatgactttttatgaattttttaagctggatttgaaattttactaaattaagccaataataggattttcttttgtaaggattttgtgccaaaaactacccttcattttcaaaatggctctaaaattttttttccaaattccgcgtatttttattaaagtgtccgctttttagggtttttggtaccacattttttgatttaaaaaataaattttttaatgatttcaaatttttaatctttagccgatatttcggacatatttcgtccatttacaatcaatatttcactcttgatttttttgtttttagattgattttcaacgacatttggatggatattttccccctttttgaccgtcctcaactcggtctcaaattggcattgcttttgtcacgtttcgatgtgctggtggacaaacatttcgatgccaaaaaagtgaattatttttaagggtttttgttgtattaaggattttgtgccaatttggggcctccgattctgcccgttttaaaagatttttgcacttttaattcttaacttttcagcaaccaaacaacaatgtttgatggatattttcctttgttgaccgtcttcaacttggcctcaaattggcacttctttcgccacgtttcgatgtgctggtggacaaaatttcaaacatttcggttggaatgtaaaatttttttatactaagaaaaatgaaaatttctttgtttttaatttgaaaaaaaacaataagaattaccaatgcagttatatatacaaagaggcagaaatttttcattgcacatttaaagattttcaaaaattttaatagttttttatgtgttttttgaaggattttatgcgtaaaatatttaatggcctccaagtaggcaagtttttttgtgtgtaaaaatgagaatgtttcaattttttaaattatttttttagggttttttccaaaaaaacgaacttcaattttcagaatattaaagtggtgatcattctccccttttgatcgtccatatcttaagagaacatttttttcttaaaattaaaaaatcttttttttggaaattttacatttttaatttaattttttggccctttttattcattaaaaaatctttttttggaaattttacatttttaatttaattttttggcccttcttattcaattaagcctaaaaatgcattttctatgaacaaatttacatatttaactaacattttttcaaaatttcaccacgtttcgtctgggtagagaagtgtcattagacaaactcccaagcattccgctggagagcttctttgcccgtcggattcgtgaggcccaactcatcatcattgatgagatcaccatgcttcacaacacggtgattgaggtcatcgaccgagtgtgcaaagagatggcaattcgccagcacaaggatctcctcttcggaggaaaaacggtcattttcagcggtgacttcaaacagtcgctgccggtcgtgcctcatgaaggcttaaccgctcaggtgacagcctgttttcaaacgtctccgttgtttggtcaattcaccacgatgaaattgaccatcaaccagagactgggccaaggtcagcaagtgtacttgcaaatgtgccgccaaatcgggctcggagaaaccggagagcacttctggattcctccgcagttcctcgttaagagcaaggaagagctgatagattatgtctatcctaacatgcaacaactccttggcaatgacaaggagctgctcaa

SEQ ID NO: 12928 - DNA, 1017 bp, Heterodera glycines
caagtgagattctttcttgaaagaacacgaaatgtctatgaagacaaatcgcctggcggcataaaatatgagcgtttgcagttcccaataaaacctgcattcgctatgaccattcaaaaaggtcagggccaaacaatccgcactgtcggcattgatctggaaagggaagtattttcccacggtcaattgtatacggccttctctcgggcaacggacggaaacaatgtccgtgttcatgctcccaaccgggaaattgatgcccaaggccgagccaaagtgctgaatattgtagctactaatatgctcaagttacaataattggcttagtccagagcagttgggcacatggtttttggagagatgccaatcccattcccatctgcactatgttgagtgcgaaaatggtgagaagcttggatccgggacatggaccggtcagccctctttagggcctacaggtgaattgccatttagcgctcaacccaataacgtgccaacgcctggactaagggagggaggagggccatgacgtgcaacgttagggcacttccggtttccattgcattatgcgatgtgtcaactccaattattggaggaaaccaagtgcatgtcggctgacgcaaagaccctaacagactaaaacgcgcctaggtagcgaagctcaagaagcgcgcagcgctttcccaagcgccaccctcgcatgcacacacccgctagtggacataattaaactgactgaacgaagcaaccgtttgctttgtacgtccgttaaagctaaatgtcaatttggtaaatgaatttgtcataattattctgggactttttatatattaataatgcagaggtttttgagaaattccattaaaaaatttatataaaattttagatttttttgtatttttgggtaagattttgccaaagaatcaacaaaaatcattttttgttaaaatttctaaacggtaattttccaagcggctttattttttgtgcctatgaattaatatgatcattcactga

SEQ ID NO: 12929 - DNA, 2032 bp, Heterodera glycines
ttttactttaatgaattcagaaaataaaaattttcccaattatttcacagcaaaagcctaaatattaaagtaatgtaaattaattaatttcatttaattgaaaaaatgttgtccatgcaacataccgcactttcagatcttgcttcaacatttcgttcccgatcacgagaacgatggtggcccaacgatgacataacaaataaaactcaaacgggaaattcaaaaaataataaaataataaacaaatttaataaggtaaatttaaaaccaaaaattgtgaaaatcgtaaaagacgaaacgactggtgaaaattaatttctagaatgttctagcgtgtatttaaaggttctggctttttattctggtaatttcttcaatcgataatttagtgttctatttgtgttctgatttttcattaaaaagttctggtattaattctggtcatttctaacaaattctggaattttattcatgttctggttttctatttacagttctgaaattattgtggtaatttctagcatattctattattttattcatgttctgatttgtcataatggtaattacatcgacgccattatttcttttgctgtctgtctaacttgaaataagtactatttcttcagttctgaaatttctttggttaatttctagaatgttctagtgtgttttaaaacagttctggtattttttctggtaatttctgcaataattctgatattttattgattttttataacagttctgaaattattctggttaattctgcgaattctggtttttcatgttctgatttgttataattgcacggcggccattatttcttttgctgtctgtctaacttgaaataagtactatttcttcagttctgaaatttctttggttaatttctagaatgttctagtgtgttttaaaacagttctggtattttttctggtaatttctgcaataattctgatattttattgatttttttaacagttctgaaattattctggttaattctgcgaattctggtttttcatgttctgatttgttataattgcacggcggccattatttcttttgctgtctgtctaacttgaaataagtactatttcttcagttctaaaatttgtttggttattttctagaattatgacgaaaaagaggggagtgacattaattaatttaccaattaattacactgtaatcatcgaatgtcattattagactaaaatataattaacttttaagcttgtgcccgcacatcgtaacattctttcggcatcttccgaagtttttgagacgatgtaacaaaatgaagcaacggaaaatgcaaatggcaaacagaaatttttttggaaataagcgataagcaaaaaataaaattaaaacatgaaaaattgatggaaaatatagaaaaatgaaaatatttattattttaatttctttttagcttctgctgaaaagaatgactttctgcttgttcctgactcgatgctgaagcgtttaaagtgatgttgcgctttatttattaggacgatttgtgcgaattgaatgggaaaaatgcagtcgaattgctttatgcgggtgattaattaacatatgaatttaaaaattacccatttttaattagccttaaaattcaatgtcatcggaattttgcagaaggaattgagccgaaaatacagtgatgccgtgtacattaattacggtgagcatcaataaaaaattaaatttctgaaaaaaattatgaaaaaatattatgctattattttgggacaaggtcgtttcggcgccgccgtttcggcgccagcccttgtttttggactataacttttttctttgacaaccaaatctaataatcttggtatcattctaaagcccttcagaagccctattagacctacaaaaaaccaaaaaaaaaatttgacctgtaaagaagttattaagaaaaaatcacaaaaaatttgacttttttgcattttccgttagaacttttttagtaagcgactaattcgctaagcaattgcttacaaaaagcttc

SEQ ID NO: 12930 - DNA, 2143 bp, Heterodera glycines
caaaaaaaacaaaacttatgccgataatcgaacctaaagataaactctgttggccattagcactgtgttcccaatttcacgcttatttgtgtctcggtcttaatatggaaaacctaaatttttaaatagtctattttttcaaaaaatacttaacttaagcgtttaaaattttttcttcaacttatacattcataatcaaaaatttgaatcatttttttcgaaaaattttggttaaaaaaattgattaatataaaattatatattttttgcttttcttttcctagattgaatatttttcaaaaatactgaaagaaaattgttaattatatttcacaaaaaaacataaattacaaacgatggcagtaaaagaatttatcaacaattttggcccaaggacaaagagtgctggggtttctccggatttatggcttttgaggttggcgggagaatgaatggctttgcagcagagagatttattaggaattaaaaatgtataaaagaaaatttttctgtatacacgtctttaattaaagcatgaatgtatggaaaaagggtacttgattcatggagagaaatatggcacgtactaaatattttttggagaattttacactcggttcaaaaattgttcaaaatcagtaggtttttattttaatttcttcaagtattaagacatcattaaaggtatatagaaaactaggaaaaataaagaacagacttcaaaaagggcaaattccttatatgtgtagtaatgagatattttcgagaatgctgtggaaaaaatgactaaaatttaaattaaattcattctccagtaatttgaatttctattaaattaatgattattattggcatttaaagtaataaaagtttcaaatttaaaaaacaattattttgccatgaattatgttcctaaattgtcaaaattcttcatatttctgatccaactttaaaaattcttaattctttaaaaacccattggcttttaattgcaaaaattggcggtgaaaatctgttaacaaacctgaacgaaagataaccttgttttaaaaaaaataaacatacgacaagggtaaggttttgcataaaatcatgtataatagggacggcacggaattctgattttcgaaaatttttaaccctcgcaattccgatttccgaagatttttgggtacttggaatgccatccttgatgtatcaccttttgacactacagtgccatttggtttttctttttattattgtatgtaaaaagaaatatctcttatttgaaaatatattttcatattttttatgtgactataagctatgaaatataacataattcgaggcaaaattctcaatcgatttttagaggcataacttggtaccatttatagctttttcattagcagttttgcccagaaacacttcaattcccaaaattgttcgcttaattggaattttgtcaaagcatttagttttcaaggtaaaaaacgaaaaatttcatttcattttggcattttgtcctattgactgttttattcttttcgggatcatgccattcttatgggggcagcataacagaaaagttaatgcttcctaaattgaaatttctccactgatttgcaatttttaaacaatttttttcgtcaatctctgcaaaaaattcatccgatttgaacacagtgtccgcatttttgtcaatgtaagacaaacaacaattagcaaagtcctaaaataaaaaataataaaataatgaaaattggcctggaccgggtcgtttgccaggcttttctggaaaaaaattttcctcacctccaaatcgaaaaggcgagcctgggcataagccaagaaaacactgcgtagttttgaaattggaatttgcaaagaccggtcgacaaggccagtgatattgtaattttttggctaaaaataatttaaatatttttttgtcagactaaatttaatgatcaaaatctttgtgataaaaaacgggacacattgacaacggtcatttttaaatccaactcaataattttttaatttgtctctgagttaaataataatttgacatcattttaaagtaatctcaaaactttttgcgatctaagcaaaatgctgacccaaaaatatgcaccaaatatgcacaaaaaagctgaaa

SEQ ID NO: 12931 - DNA, 3924 bp, Heterodera glycines
ttagtccttttcaatgccaattgttcccgagtcaattcgttggtctgttcaaatggcacaaacgaatcagcataagacgaccgaagaaaacaaataacgacaatgaaattgacgggggaagaagcatcgtcaaaagcctaaaacgcaaaaaatgaaaaacaaaaaaaaatttattaatggctaagcaccgttttaaatgcttcaattttcaacggcaaatttcgcccttcaacgttcaacggcacatttcttcctgcaacgaattcctggacagcacatttgaacacctttggcacatcgtccgggtggggagtgaaaagccattttgccagtgcctgtccacgcgacgccatggcactgtcatcgcatggaaattcggcgaaaagatcgtcaaaagtggggaagacaaagcgaagagatggacattcggtgaaaaacagtgacggaacgatttgtcgcaaacgctggaaaggttccgtaatcaattccatgccataaatgttttttccgatgatgggcaaaatgttgtgcaataactccaaaatgcgatcacttttgaaataaatggacagataaattcgagaggaggcgaaaagtggacgaaaacggtggagaaaagcgatggcattggagtcgatgaaactgaaaatgaattgggaaatgttttgatggtgcgtaggattttttaatacaatttactcgttcagcgctattatcatcaatactttatttgatgaaaaaactcatttttaaaaaatctatttttggtcaattttttgtgaattaaaccagttcaaaaggcggttttttggtttttccgcgcctcgggactattttttataatgattggaggcaggcctgtagccagaaaaaaaatttccgaggggggggggaagactttttttttgcgtcgataagcgacgtcgtgaaatttcttttttaaagcttttattgaaatataacaagaaaattatgcagttttcaaaaaatatcacattttttcctgaaaaatttttcacttcgtgggtggggggaggaggattccccccttaactatgggcctgattagaagtcattaaagattgattggaattcattttgggcggtttttagcgggcccgattctaaagttttccaccaattttacgtgatcttgatgcatttgaatccgatgactttgcgtggcaactgaatgttcggaattggcatcggttttccatcgtaattggcaatttccatttccttggtgccattttctccaattttacgtcgaattcgaagaaatttcaatgcccatttgcgcgttttgaagtgttcatccacgtaaaagtcaaaacgatggctgaccattgcaattccaaggccaagttgagaaggcgggagcaaatcgaacaccgccagccaaccgtcgccggaaatgaaactgagaaaaggaaaacaaaaattgaaattggcatttttaattttacattgcttttgccattttttcctctgattctttttgaatgtctgacattttgttgaggtaaattattaagacagaatttcggcacttttgcaatcagttggcaacgattttgtaagcttcaaaaatttatataaaaataaatatttgcgtatacctaagtcatgaaagaatgatgattacatagtatggccgcaacttttagttaaaatctcaaaatatttaacgaaattagtgaggaaaatgccaaaatagtgacgaatggtgacataattttcagcggtgtaaataagaagggtttttggtgtccccaatcacgaatctttcaattattttgatcaattccgatttcctaatctaaatttgaacaaaaaatcataatttgaaaaattaaaaatttcgatttttattcgagttcgggttaaggattagaaattagtcaaaatacatttcagattcgtgattagcgacctttaaaaccccggataacaaattagcatggttttttatattaaaaaaattttgcaaaacaaaaggtcctccccccttttgtttcaaaatcggtaacttttacagtagcgcccaagtttttctatttttcgttgttaaccaaatccaatatcttggtatcatttgaaagcttattatgtttagaaattttcttagcctattgtttcgcgattagaaaattaccaaaaaagttatacatgaaaaattattcattccccattatttcgtctctctcttcgactttctctctgacaatgtcttccaaaatgattctgtacgttttgcgcattcctgtgatgccagaaggaacggagtgtggaagaaagtgggataaaggacctgagagaacctctaaaagaggcgcccgtagctcagttggttagagcacggcacggattgctggggtcgtgggttcgagtcccaccgggcgagttaccttttatgttctacattccttctctattttgccccttccttctcatttttttagtctgtacggtgtgccaatgttggttggatgttgcgccattctttggatgttttgggaccgattcaaaaaaccaaaaaagaaaatgtaaaaataataaaaaaatcttaaaaaattgaaaatttaattttcagtttcatttctgccgacgcttggctttccgtgttcgaattgcttaagcgttctcaactgggccttggaatcgcacttgtcagccaccaatttgacgcaatggtcgacgaaaatttcaagacgcggcgctgggcgctgaaatcctttgaaatttggtgcgacgatggcgaagatggcacgacggaaatggcaattctcaattctaccaaaaaactcgtcgggagttacagaattcaagtggttcatctctttgaaggcaaatcgttaccaattccacaagttcaattgccacgaaaagttagcggtttcaaatgcatcatcatctcgtaagattggccaatttctaattttttgccaacattacccattcatttatagttacatcgaccgcaatgccatcgcttttctcaaccgttttcgtccgcttttcgccgcctgcccaatttggccatccaaacgaacaatgatcgcattttggaattgattgtgcacaacattttgccaatccttgaaaaacatcttcgtggccttgaattgtccttcgatgttttccaccgtttgcgtcaattcgtcccgtcaattctcaatgattttccatttcttcgcattgtctctgtctatgcttccgatctcttcaccgaatttccggccaatgacaatgccatggcatcggatggacaagcgatggcaaaatggcttttcactgcccatccaaacaatatgccaaatgtgttgagatgctcgttgaacaaggaagatgggaattgggcttcgcggattgaagcattcaaagcggtgcttaccaattgatttatttgccatttttacgattttttgggtttcactgacctgacaaaaatgtttatttttcgcccaattcatttttacgatttaaatggaccaatggttacagtttagatggcctgattcttttcagaaaatgtgatttgaaaaatccgtttaaagtgcactttggctttttgtgatgaccccaacatcattttgtttttttaatcatttttttcacattttaggcatttgcctcggcttcatcttccgtcaatttcattgtcgtgctttggtttccgcaatcatttgctgactccgtcgttctctttgatttgaccaacgaattgactcatgaacaattggcattgaaaagaactgtctttaacacccgctttttgctgatccgttctccaattgtgcgagacgaaagcaaatggacaaaatgggaagaggaagcgattggctgggaattttttgatcaatggaacagaattgacattgaaattaatgacgaggagcacatcggggacgggtcagtcag

SEQ ID NO: 12932 - DNA, 784 bp, Heterodera glycines
  unsure (1)..(784): unsure at all n locations
gtttttgggctataacttttttagttgcaaaccaaattcaataatcttggcatcattcgatagctttaagtgtcctctattagtctgcaaaatttcgaaaaatctcgttaaggttaaaaaagttatggtcagaagaattcaaaaaaccagattttccaagtttttggctcgaaataacgatttttttttttttggaatttttcaggctaatagacttggcagccatatctgaggctttagcctcattttgtggttttttgatagaaaataataaaataagtaattatttaaattttcacatcaatgggaaataaaagaaagaaagaatcatatgctttccttacaattattaatcgtcataaaaatggtatataaatatctcgaacaattacattattaatcatttaatccttagagctaaaattttaatatctttagctttaaaaaaaaataaaattcaatttttttgataagatttcgataatatgcttactaattatgtgtaaattttgttcgcaaacacaaaaaaaagcattttccaactatttaaaaatttgttttaattcaacctatccgattattgaatttcattttaaatcattaaaacaattttatataaagtaaaacaaaagttaccgaaaattatccatgtaattgaaatatatgaacgagcggggaagcctttgagggaaaaactatggggcgggccggatttgaaccggcgtctctggctttccggaccagtgttctaccatcttaactacccgggcgnaccttttgggga

SEQ ID NO: 12933 - DNA, 3312 bp, Heterodera glycines
aaattcatattaaatgccaaaaaccaaaaatctttctctttttattttttcccatgcctgcgggccggacaaaagaattgcttgcaagaaattgctaatgacctttctgctattgagtttgaacgttcaaatcgtagagtcccctcaagaaaatcaaattaaaggaatttcagtggacaaagaaatttgtgaccatttttgtgcccatccatgccagccgactaatttaatttttccaaccgaagagagaaatgcaactttgggttggacttgtgtacacctaaagccaaaaattgtccctcaaagttggtcctcatttttctcgaaaaatgcttggacaattggcggcatcatttttactattgccggcatttccttttgtgtaattcgcgcatatttgtggtcaattgaacccgattcaattgaaattaatgtttgaaatttcttttcaaaatttgcaatttccccgcttttgactgcgtttttaattaattccatatgaccaaagttttgcagtgcccccccccattttttttctctccgtgccaaatatggcagccgacggaaagcaattcatctcccgtcccctctcccgttttttgctcttccccgtcgcgacattagctttttgcggcgatgaatctcccctgccgctcgggagaaaaacgttttttgcctttttttttcccattagctcgccgctgttgtaacatttgaaaaaataaattgcattttttgctgtaacgcccatcgtccactcggacccgtcgttatttaaggccggctcatccttcagaaaagccatttcttgtcttcattctcatttttcctccgctccttcatttttttcatttttccatttcctttttcaattttcaatttttctttttttttttagatgcaaaaacctactccttctaaccgccccaattcctctgtctccaaaacccttgcctgcgggcttgaaaaaattgtgaatttgagtggaaatgagccactctcggtgccggtgctggcggatcggagtgatccgctgggactcaagtcggtccaacccgacgcgttgccaatggagagtgctgagggcaccaaggaagtggaaataatggaagtggatgaaatgagtggagaaaaagggaaaagggatgaaatgggtaaagaaaaggtgaaaagtggtggaatggaagaggaagaagaaagtgagggcagtgaaagtgaactgctaggagaaggtggatttgacaatttgcaattgaaccccagcctgagggcgggaaataaagcagttgaaaaggaagataaggggaaaccctatctggtcgcccaagtgagaagcgacggtgtgatcgcggcacggatgaaacttttctgggatttcccggaattggtctttgtcccttttagcctcttcgacaacgcccgagccgatcgaaatcggcgatttgttccgcttacgtaagtgtgagtggacgaagagcgaaacaggatgggaagagcgcggagattggctgtatgaagtgaccggacggctgaactaccaagccacggcaacggacgtaagccaattgcgccagcgcatcctcactgaggccgtcggcattttggtcgatgtgcaaagagcccgtgaccgacacgtcaaagtggccatggtgtcagcacctgagctgagctgcgtgatgcgcacctaccgtcgccacttcccggccgatttcacggatacgacatccgctaccgctccgttgtccgtcttcaacttcggcagatcaacagtccgccatgggtgctgtattcacagcagtttgcgtatgttttgccgtctgattttggtaaaaaaagaggcgatgaactgctcgttcatcacgcaaacgtcattgctagcgttgagcctgagccaatgggctatgagttccctttcagtgccgaactgagctgggcgaaggtccagctgggtgagaaggtcatggcggcggctgtcgcagcgcagtcgttcgatgtgaaggctgatctgcggaagcacactctgttcgtcgagccggtcgtcatcaatgagatctcgacaagaagcgtgatcatccagttcgtcatgccggtgccgagcatcgaagagctgacggaattgtgcaaaatttgggaggtcgatttggcggtgggttgcaaagtcaatccggcaaccaaggcaaagccttgcgcgcatgggtatgtgctgagcatcgaaaaaagggcggttatgtcgggggtatgagattcagtcacaacatatgcgctcaacattatgctacttccttgcggtgatatttttttgttttattaaaatccccaaatgtcgagtccccaaatgtcgggatccctaagtgtcggatccccaaatgtcgttcggtccccaaatgtcaggtccctaaaagtctggtccccaagttgcaaatccccaaaagtcgggtagccgaactaccgacccttccctctccagctccccactttgctcgatcatataggatcaattgttgcctcaattgatccattaatcttcctctcggggaagcttcttcttccctatctcataattaagcacgccataatttgatttctgctgaatttaattaatctcatttctttgttcattaagcttacatgttgcttgtatttctgtttctcttctcatcagtagggttcgaagttgtatgcactaaaaaatgtcaaatatgcgcataaaatatgcactaaaaatcccccaaatatgccctaaaaaccggaaaaatgcccaaatatgcactaaaatatgccttaaaaattacccaaaatggcttttaaccctcaaaaaaaatgccaaaaattgtctataaattaagaattgatttgaaaacaccaaaacaaggactaagaagcattttttagacaattgcaaaataattgaatttctaaatttttgaatttttattatatgctaaaacaaaattacattttctatataaataattttttttcttaagttcttacagaaaattaaaaattttccgatttttaagggtgtatttttttaaaaattcccaaaaagtcgatccttagggggtgtatttttcgcttttttcgcatttttcttgtgaaaatttgccaaaaacgaccgaaatatgctctaaaaacgcaaaaatggccaaatatgcatttattctcaaaaacccccaaaatatgcttttatatgcactaaaaaccttcaccaaatcaaaaaattttaactcataaattctatttttaatcccctttcttcataccatatacacataaaaaacatccaaaatcatacaacttctaacccta

SEQ ID NO: 12934 - DNA, 1743 bp, Heterodera glycines
tttccgatggcactttttgtgccatttccttttcatttctatggcatttcattgaaattaaatttcgattcgctgcccattggttgcgtttggagtttcaattatgccatttgttcagctgaccaacaatcgccatccaatcagcagacattttttgtctcttctgccgcacagtcactcaacgcgggcaaacagccagacaaaatgccaagcaaacacaaattctacgaatattacacgttgggatgcatcagcatgcgcactgaggtggcgaaagaagcaattaattaattaaagtaattaacgaaaagagtcggcatacggtatggcaaattctgtagaaaagcgtcaacaattttcttattcatatcatggacgagacaaaaaaatcataattaatttaattaataaagattttgaagcaaatattcgatggaatttgaaaatttttttattcatttcagtgaatgataaccaaaaatttatttaaatttatttaaaattttcaataaatgaaaaaattatcatggcaaatgccaattgggttctaacaaattcaaattccgctcagagtttggcattgtgtgtggctgtccaatttctgctgaccaatgccttccttatttggctgtctctgcagggatggcacccgtattggcgtttggcactgccggcggtgttcaacgcgggcgcttcgctgtcactgatttacgcctggtgggcggacaagtccagttacagcttgctgttcctcattgtcaatgtgccaatctacatttacaaattcaaactgtttttgtgccctcctctccccccagggtttgtccatttgcgcgttggcactttctctctttgcgttgctcctcgccgagacggacccggctttgctgaagcagttgatcaacaacaacgacgagacggagacggaacagcaccagtgggacaattacgcatatgaagaaaaaacagtggtgaagacgaaggacggctctgagcatgagcacgtgcgccaaaatacaattggtaattaattggtggatgaaatgccgggggaatgatcccaaaaaagcgaggatttgtggccaattagagagggagggccaggttggcttgctcgtaatcctcctgtcgtcaagcccagcttgaaagtctcgggcttatctcgggctggattcctcccacttttttctcacgttttctcacaatttttttgccaaatttccctcggcgtttagcgactgcgtggcgccactacgctcggcggttggagctgagcggttggctgcgcgaggccgagttgtgcctggtgctgttggtgattttgctgtggattgcacagggcatcgtctgccacttttatcgttacgcgaaattgcgaaaggtcgagaggtttgagcgcgcggcgaatggatacggcgcaggcggaactcggccgagcggcacaaatttccgaattcccgtggccacgctccgacgtattcagcacgtacagcagcagcagaagcaaatgcccagcggatcagcagcagcgccggggaaatatcgaggaggaaaaaagtgatcggaagggattattgcactaggtgaagccaggtgagggggggggtccgaaaatatggattgaaaaaaatcgataatcaaagtactcgtacattgtagtttcaagtagaattttttaattgtaatgcttgcttctttataattattaaataaggtcttttatgtgtacattttatgcaaatg

SEQ ID NO: 12935 - DNA, 1248 bp, Heterodera glycines
gggaattatatggaaatccatattttttttctggactgtgggggggcctgaaatgcacgaaaaacatgtttttagctggtttgaagcttctaggatggagttccatatgcatatttttccatatttcgcgatttatgtccatatttccatatttgtccatattatggcatttttatccatattttatgcccatattttggaatttttccaaaaaacctctattagaacggcccccagcagctaaattggcctttttgagcccaaaaaccggaaaattttccaaaaattattttttcgccaaattttctcgggaatattgaataaatttaaattttcttaaaattaataaatttatgtcaaaaagaagcaaaaaagataaaatttcacttttctggttgatttttcgctaaaaatgagtaaattttggctttatcgtgattttttcttctaaaatgatttttaataccatatttagccatttttgaaggactttactttatattaacaaatttaaagaaattttgggaaattataccctcaatttgaaaaatttatgtccatatttttgccattttatgtccatatttcgcgatttttggtccatattttatggccatattttgcgattttatatccatataattccccgccctaattataaatgttcgtttataaaattctcaaatttttaaatttccattaaaattaaatttcaatggaaaaagcagcgaaaaaaagttaaacaaacaaaacaaatcgtacgctgtgtgaacatcaatcgcctatcaaatgatcaaattcaccacagaaagcaaacaaaaaaaaaatattggcctaaaaactcgaagaaaaattcacagaatgctttgacaaggaaatcggaacatttactgccaaaatggaaaatatgagaaaaacaggcgattattgtgaaaatttgcattgaattccgaaaattcgaatttaaattcgctttggctgtcccataaaagtgggggatttgccttggggcaaatgccttctaatttggccaaatctgtgcgtccgtgtctctgtcaggctttgccaacacgtcaaattgcacccattacgagtcgagcacattattttgccggccgcccccgcctccgacgatcgtttggccgcgggggggggggggctaagcttatcccgaaaagatttatcgatccatgacgaggggagaagccgaaacgtagtaagagggggggggggagaagcgactgacaa

SEQ ID NO: 12936 - DNA, 2120 bp, Heterodera glycines
  unsure (1)..(2120): unsure at all n locations
ttttacaattttatttctagaatcaaaaaaatttcgaaaccattttttaaacgaaacagtgcacaaaaagagaggggagggtagaagacgagagtaattttttgtaaggatcgcaccccatcgaatatttccttatttctttttcataactgtccaaaggtgactgctgccattgactcttttgtagtccttaaggtacttggactttccacagtaaaatgtggtacaaattttggaactgtccctcctcacggtgggacttaaaaacatggttaagccaagttcgaaacttcagaggagaattttaagttttgaatttttacaatttaatttcttagagtcaaaaaatttcggaaccaattttttaaacgaaacagtgcacaaaaagagagggagggtagaagacgagagtaattttttgtaaggatcgcaccccatcgaatatttccttatttctttttcataactgtccaaaggtgactgctgccattgactcttttgtagtccttaaggtacttggactttccacagtaaaatgtggtacaaattttggaactgtcccctcacggtgggacttaaaaacatggttaagccaagttcgaaacttcagaggagaattttaagttttgaatttttacaatttaatttcttagagtcaaaaaatttcggaaccaattttttaaacgaaatagtgcacaaaaagagagggagggtagaagacgagagtaattttttgaaaggatcgcaccccatcgaatatttccttatttcttttacataactgtccaaaggtgactgctgtaattggctcttctgtagtccttaaggtacttggactttccacagtaaaatgtggtacaaattttggaactgtcccgcctcacggtgggacttaaaagcaggatagagccaagttcaaaacttcagaggagaatttaagttttgaatttttacaatttaatttcttagagtcaaaaaatttcggaaccaattttttaaacgaaacagtgcacaaaaagagagggagggtagaagacgagagtaattttttgtaaggatcgcaccccatcgaatatttccttatttctttttcataactgtccaaaggtgactgctgccattgactcttttgtagtccttaaggtacttggactttccacagtaaaatgtggtacaaattttggaactgtccctcctcacggtgggacttaaaaacatggttaagccaagttcgaaacttcagaggagaattttaagttttgaatttttacaatttaatttcttagagtcaaaaaatttcggaaccaattttttaaacgaaacagtgcacaaaaagagagggagggtagaagacgagagtaattttttgtaaggatcgcaccccatcgaatatttccttatttctttttcataactgtccaaaggtgactgctgccattgactcttttgtagtccttaaggtacttggactttccacagtaaaatgtggtacaaattttggaactgtccctcctcacggtgggacttaaaaacatggttaagccaagttcgaaacttcagaggagaattttaagttttgaatttttacaatttaatttcttagagtcaaaaaatttcggaaccaattttttaaacgaaacagtgcacaaaaagagagggagggtagaagacgagagtaattttttgtaaggatcgcaccccatcgaatatttccttatttctttttcataactgtccaaaggtgactgctgccattgactcttttgtagtccttaaggtacttggactttccacagtaaaatgtggtacaaattttggaactgtccctcctcacggtgggacttaaaagcagggtaaagccaagttcaaaacttcagaggagaatttaagttttgaatttttacaatttaatttcttagagtcaaaaaatttcggaacagaagtattatttaaaatcaaaaataattttagtaaattttttacattttagtttcaaaaaaacaaacaaaaaaatgttnccaattttgaaaatggaatagtgcacaaaagggnagggatgggtagacgaaaagagaattttttagaangggacgcacccatctgatatcaacccttttctg

SEQ ID NO: 12937 - DNA, 1220 bp, Heterodera glycines
  unsure (1)..(1220): unsure at all n locations
aaattntcggaaccannattttttaaancgaaacagtggcacaaaaagagagggagggtagaagacgagagtaattttttgtaaggatcgcaccccatcgaatatttccttatttctttttcataagagtccaaaggtgactgtgttaattggctcttctgtagtccttaaggtacttgtactttccacagtaaaatgtggtacaaattttggaactgtcccgcctcacggtgggacttaaaagcatgatagagccaagttcaaaacttcagaggagaatttaagttttgaatttttacaatttaatttcttagagtcaaaaaatttcggaaccaatttttaaaacgaaacagtgcacaaaaagagagggagggtagaagacgagagtaattttttgaaaggatcgcaccccatcgaatatttccttatttcttttacataactgtccaaaggtgactgctgtaattggctcttctgtagtccttaaggtacttggactttccacagtaaaatgtggtacaaattttggaactgtcccgcctcacggtgggacttaaaagcagggtaaagccaagtttaaaacttcagaggagaatttaagttttgaatttttacaatttaatttcttagagtcaaaaaatttcggaaccaatttttaaaacgaaacagtgcacaaaaagagagggagggttagacgaaaagagaaatttttaggaagggacgcaccccatctgataattccccttttctgttccataagaggccagaggcgactgtgttcgttgacaagtaattgtccaattaaggtacttggactttccacagtaaaatgtggtacaaattttggaactgtcccctcacggtgggacttaaaaacatggttaagccaagttcgaaacttcagaggagaattttaagttttgaatttttacaatttaatttcttagagtcaaaaaatttcggaaccaattttttaaacgaaacagtgcacaaaaagagagggagggtagaagacgagagtaattttttgaaaggatcgcaccccatcgaatatttccttatttcttttacataactgtccaaaggtgactgctgtaattggctcttctgtagtccttaaggtacttggactttccacagtaagatgtggtacaaattttggaactgtcccgcctcacggaaaagtaaaagcaggatagagcccaagtttaaaacttcag

SEQ ID NO: 12938 - DNA, 2127 bp, Heterodera glycines
aaaaatgcaaatcaatttgtcaccctcctccattttcccctctttttcagatcaatttcggtgatcggtgacaattggttgtcctacgattgggttgaaagcgatcagccgatggaccaaattgagtaaaattcattcatttcaaattgtttggcactttttaatgcttttcccctttgtttaagtaatcagcaagagcaaccgatcatcgatgatcccaatgccacgcggatgaggagggcttggttgaccaaatcagcggcgcggtcgcttcactgtccacaatcgatcttggccctgtgtacaccgctgttggcaacggggtggactactttgggcacctgtggcagtatcgggtgagccaaaaatgccaaatttgaatgatttaattggatttccaccgccgtttttcagctcttccgctttgccttcatccttctgtgcatctactttggcatgggcttcatggaacggttggctgtcgcgatgacctccgcatgcgtccgctgggcttggccaccggtgcacttcatgctcagctcgtcacggggaacgctgttctatttgacggactggttcgcatggatggacgactttttgtcaagttgggtgtgcgacatggccaacaggtgcggttttacggtgtgatgggggtgggcatacagtcggtaccgtgtcaacactcctaatccccccaccattttcagatactgtcaccaatacggtgtgatgtgcgacagtcagtgttcctttgtcagccggacgcagcgcgcagctttcttcaccggacgtcggttctgatggatgatgcgcgagatgaaatgcggactctactaaatatggaaacagaatttcaaaatcgacaaaaaatgcatttaaatattaaattgctcaagtttcacaatattaagatttgacgcagaaatactaaaaccctcactcgtctcaatgccattcatggccaagtgagcgcggagtgccgtccgttccgcgctcgaccggcacagcaaacagaacagccatggcgtgtctcgtggtccacagcgtggcatttgaaccaacaagcgtttggcgaacagttgagccatgccaacccggtaccaagtgctgagcacgcttcgatgcccaattatctcaggcaatttgtccaatacgccgcatgccatggcggcaccaagcccattgattttgccattaatcgccgactaaataattcacaaaaatgtgtaagaatttaaattgtttcttttaatttaaattttgtatagccaaacattcattgactgattaatgatgacctcaaaatgtataaactgtaagctccttgtgtacccatggtttgccaaactttgcagatgtgaaccaacgcgagggtctcgtgcaagtacaaatccaccatcgccagcatggacaatcggaaaaaggatttatttgttttggtaggacttggatttaattaatatttaagaattatttgattttttttttattaaaccttatttgagtttaaactagcgcaagtgtaatcaccaaatgtgccgagcaatttttcttcaccaaccgatgatagtgtggtaatgccaacacattccgagatgtcttctatctaattttttttaatgtttaaaatttgaaaaaaattttgcatgggtctaagattataattgaaagtgtgctaaaccgaacccgaatttctggatccaggaagactgaaaatgggagttctcgtctttattttactaaaatcccggactcggatcaggaataattcttgtatctaaaaactaatattcacgaattccctacgggctaaatttatgtttgaaaatattactaatatccatccatgctttttgcatccggccgcaattaattcaatgtcaccagatgggcatccatatgaatgtgtgataatcactgctctgtacaaatagccaaaataattatttattattaattatttattattatttatttattgttttaattattcactgaaaataatcggtcgtaattaatgaaaattctgattcagctttataaattttatatttgtttaaaattaaatgttttatgaaaaagtttattttgataacacaaatttgagaatttttggggcaaatctgt

SEQ ID NO: 12939 - DNA, 1934 bp, Heterodera glycines
ttgcacattaatcaacagaaatgggaagttcaaagacaggaactgaaattattcacaattatttttaatgatgtcatattattggtcattagtgtattgtgagtgaatatttccacctccaatttatcattttgcgcaatttgtgtaagcgaacggccagcaaatgtctcatcgcaattctcggagcatttaacacatttttgagtagaaatgtgctgaagaactttgccataatggcgaatgaccaaaaagcgcaaatttttcagtcgcgaaagagacaaaaaggcagccaaaatgtcaatattataagcggaatattcgaggtcttgaagatttggacaacggtcaatcagcgtcagcaaagcctgtggacggaacagaaatttaatagtaattataaaactcaatcaattaattattcagtacctcagtcgtgactttagcaagtcgtaatattatcagattagcaagaaatcggacctacccccccccccccccattctaagtttttttttggaaaaaagcgccaaaaaagtgcatatgcggtaaaatgagaaaaatggtcacttcgcgctactaatagttttagaaaaaatcttatttttggggtccgaatcttagtttttgcctcatctgtccttatttttaaaaaaaaacttgcagccctgattaaaatggaaaattcattttccaatttgtaccctccaaaatcattcaaaatctacaaaattcttttgcaatttttctctcaatttttgaattgtttttcacttgatattttcctttttcttctttttttaattgcttcaaatgttctaattattctcttttttgttcagtatttggtcccattttgtggtttgatcacttttggtaatattttgatcattttgcatttgatcaattgattcggttccattttctgtattttctttgccgaatattttattaaaatttggtcggattttgcaggattcaatttcaaaagcaaagaaaatataaaaaatattatatgtcataaattcattttggaatatcgaatttattgcattaaatgaatttgtttaattttttgttcgctttttaatactaatattaattttatttgtattttctcttcaataaatcgttgccaattttaaaattgtcacgtaattccggcggtaaaatcaatttttcgctcagatgaaaaaagacttgccgtaaaaaaaaaattaatttgttataaattttatattttaatccatttgaatttactcaaagcttcggtgggatgtaaattatttttgaatttattagatcagttgtataaattctaagacattttgcaaaattgtagaccatctagttaaaatttaataactcatttatatttatggcaatttgacattaattatttgatttttatttttcaaaaatttggcgcaaaattacataaagttaaatttatttatttattaaataaaataaattcgtaaacttcctttttttaaaaaagactttcataacattttcacccttaatatggacatagataatttacatagaagcttcaagccacgataaaatatatttttgtccgtttaagacagtccatgaaaaaaaatatggaatttcattataattttacgtcccagtcaaaacgtttccaagattttttcgtgcctggttttctgagttgccgctcgtaacagcagagaccaacttggattgtagtcccattcatcagcagagtcaacaaacacgggattggcaccaacattgaggacggcatttgagacagcaacaaatgttatggacggcatcaaaacatcggcacccggtccaatgttagctgagcgtaatgctaacaccaacgaggtgaagccgttgcagcacggaacggcaacctgaaaaatttggaaaagtgccaaaattggggccctcaaaattgg

SEQ ID NO: 12940 - DNA, 1920 bp, Heterodera glycines
  unsure (1)..(1920): unsure at all n locations
ttaaaatttaaataaggatatttcctaacaaaagctataaaaattatgatgctaaagctcaaaatccataaaattataactcattacaataaattataattagtttctatgcttggggtcttcccacattctgagaaagattattaaagaaatttttcactgcatgatacaaataagcatttaaaagagttttctcaaggaaaaatacgaaagaaattaatagtaaagttcatgatgttattacgaaagctgtaatcaaattctttactttaaacaaaaaataaatttaaatatattaaaatttttctaaatatgtttatcctggtattatatataaaattttaagtctataaattactaaataatacataaattttttccagtatagcattgaaaattttaagcaatatattaatcaattattggtatattgcacaaaataattttgaatttgtatctttaaacgatcaaaaatccactacatgccaaaggaaagaataaaaatgtttattattactgacagaaatatgcaaaaaaattaaattgttatgatgaattagattttaaccaatttgagaacccctataaatttcaccaaccttaatcaatggaaaaagcataattttaagcctgatgtatgaaaatatgtgcgaaaaattccgaaatatgtaagaaaaagtccaaaatatctagctttcaaaataagaaagtacctaaaaatgagtcataattttgcaacatctgaaataacatattaaatttattttcaaaataaattctttttaaaatttaaaaagtataataattattggtctggttttgtacaacaaataaacaaatatataactctcaccaaatattaacactttctaatcaataatatgcattcatcaaaaaaacttgaaattaatcttaattaaaccaaattgattttaaaatttctaattcgaatgattaaaatatcaaaacgatagtagaataatatgagaggctttacagacaaattttatttgaaattaaccaaaaattaaatgaactagtgaaaacctttatgctaatatagcaaaaaaaaaaatactaaattactttttttaatgaattaaatcaaagagataaaagttatcgttcataatctgtcgaagcaacatattttcttaaattatgactgaacataatacctgttacacgcaccttcatcggcaagttggacgatttctgaggtggctagtcaagccccaaaaaaaatattttttttacacccaaaaattatattaaaaaatgaaaaaataaattctgaggtcaagggtcgcaatattttgcattttaattctaattacaaatgtttaggaaaataagctttcattaaaatcttcgaattatttaatttaaaaaaataaaattgataatgcatatttttaaatgtattaatcaactataatagaaatgctacttgaaaatgaaattttaattagatttattacttacatataaatgaataatccttttagacgaaaatattgaaaaataagcaaagtaaacgtaacgttgtttaggttccaaaataggaaaaaatagaacaataagttgcttaaacttttaaataatcataaaaatatttgttttttttgtaaatcagttaaatgatcgaatataaaaatttaaggaccttggaaaaacttaaaattgaaaaatattgaaacataatataattaatatttataaaggaattatataattaattactttatacaactaataattgaataaatttaaataataaaacacataaaataagtaaaacaaaaattcgtanaatttatttgttaatannatttgcatttttataaatanatctcacgataaaggtaaatatttttagattaatgatcatatcgatattcgtaatgttagctcaattct

SEQ ID NO: 12941 - DNA, 3434 bp, Heterodera glycines
  unsure (1)..(3434): unsure at all n locations
aaaaagatgattaacataattattccaaaaagattttcataaaatctgtcattccaaaattcataatcatagcacattttaccttaaaaaataaatcaataattaaaaaattaaaatattgaacaacgaaaaaacattatttgagaaatttttaaaagagtttaaaattttattcaccaaaatccatagggaataatatcaaaattttcgtcgataattccttttttttgaacgggtttgtactctttagtcattttttgggacaatattttactgtctctagatggtccaaatttatcataattgaaatattttctcttttcgtcgacataatttaaaaccatttctttaaagtcctcgtgtttgaatttatttttgttgttaaaagttatccctaaataactatttaattttctatataaattagttttttacctctgattttagttttataccaaacttgtccgtcactttcattttgaaatttaatagagtattgcttactacccccagaaatgaataccaagattttatttccgacattttcatgagacatttcgcttaaaattttttatataaaaaaattgaaaaattcataccccaaatattctccaaaagcaatgggattattacacttttggtgcttgtaaattacactatctgaattattaaaatataaaaaaatttttgattaatgggacctgtatcagagtataagagtttattttgcgggttagctgccaccttttgtaaaaaattgtataagactattctcgcctgacttgtcgtcctataaaaaaatttctaatcagttttattatttttttcaataccatagagcaataatttgaatcaaactcttcaaaatggtaggcccttaaaaatgaattaatattttttttgatttattgtacctgtagaatttatctattttatatcctaattccatagcataaataacaaaaaattaattattaaaaattttgccctacctaattttagttcaatactagtaaaaactccatgtagtactctttccgtgtctgtatgcttacattttttaacgtttttcacaaaaacaaaatcgggttttgcccgttgacaacatttagagcaattggtaaaaaataaaattgaatcggcatggaacggtaataatggtatttttaaatttttgggtgggattgcccgtacttttagtaagccttaaatctattttattagtgtatcaaagacttttttatactgtcatagggaatgtcttcggggtattgccacataacgtcatgggtttttgatatgattattatgggtgtttttactgggtatgaagtaaaataattaacctaaatttaactatatgtcaaaataagaaattattaaaaaccgatgggtaaagcgaaattatgtccgctaaattaatctccgtattttcttctgttttaaaatataaacaaaatgcttgtgttcgcccacccgcaaatgcttctcgtgggtctattggtcctaaacacttaatttagaaactataccttaactttcaaacctttatcggggatcatgttaaaatattttttcatttcagcattatattttctttatctcgtggatttatcattctttttacatcgcattcctaaattgatttttttttaaataaaattaattaattttattaacccatatttcttcgacttttaagccatatttctttgaaattttccttagtttgaagagtctggctttcgtttttgcaaaattttcttccgctatttttccattgggacatatttgaaaaggttttaaacattttttgcatcctaaaagataatttaaaaatgaaaataatccaatttttaaccgtgaaaaacgcatccctaaaagtgtaattcaaaaataattaattttattttttagtacctgaaattctataatcttcttatattttccacatataaaatcaacattgaaccctttaaaaatataatttaatgattaagttgttttttaaaattaacctccgatgtttagttctcccccgtttcccgcatgtctcgctttaaccccatttttaaacataaaccactcgaaatattttatggcaaaaactttgattgttctttttttcaaaccccccccccccctcagggactattgctatttgtttcacctttagaaatttcgcccgataaattttaatagccgcccccgcaattgtggtcgaagtctaaattctattttaaaaaatgaaatttgttttctaaccttaaacacatcgaagccattaggactaagttcatccattgttatttctataaaaattttacgcattgctaagagtgcctttagcaatatttcggtatcctgaccacaataaattttcaattgatcctctgaaattatttatttaaaaaataatataacttttttacctaataaaaaaggcgtatcgttattttctttataccttttttgaaatttttcgaattcatcttttttcattgaatccgggtaataatcttccatggggggtagtgttggatttattttacctttaaaccataaaaaattaattaataattattttttaccataatttttttttgagttatatttgtgtgggaaatataactttggagtgcagtccaacccaaatgtttttggcaaatcggataatttattctgtgacatcagctaaaaatctctaaaaaacaaatttcccaactttatttgataaatttttagatctgaaataattatttcaggtatatatcccatttcggttaatgcgcgcaaaataaagtgcgcatcgtaacgccctaaaattttattataaaaatttttaattttttgattttaccggcgaaatgagcataacaaatggtttcaaaatgtttaaacgatagcacccattttaaaaactcgaagacgggttcacagttgtcaaccgtacaccatgtgtggtgtctaattccctttggcccgcaaatatcacagtccttgttttccccatcgcaatccgaacatgtaatacgagccgataaaaaaatgactttatgttcaaaaatcccctcatttttcccattttctattaaagtatccgtctaaatttgctaagataattttttgtttattattttacatactgaacactctgtgtcgtagcttatgatacgataacgtggcagatttttcggaatgataatcttcttaatataacaaccctctgattttgaatgttttgttttacatatattacaaaatttcgaacctaaattagtaaatttctttatttattttttattttttaccgncaaatatgtttttcctttgtatttgcaggtaacggaatgttttattttttcacgaaatgattgttcacaataaacacagtaataatgttttatatcaaaatttaggttcgtaaaaatata

SEQ ID NO: 12942 - DNA, 1994 bp, Heterodera glycines
ggaagatttcttgtttcatgttgccaacaaccgactcccttacatgcagattttacgattcatgttgcacaagcggcccttttcccatttcatgttgtcaactacagaaaaaacaaccagaatatttcacgtttcatgttgcctacgaccgggatatttctcattgatgttgccaactaccgaaaaaacaaccggaagatttcacgtttcatgttgccaacaaccgaaaaaaacaaccggaagatttcacgtttcatgttgcacaaccggcagatttcccattcatgttgccaactacagaaaaaacaaccagtatatttcacgtttcatgttgccaactacagaaaaaacaaccagtatatttcacgtttcatgttgccaacaaccgggagatttcccattgatgttgccaacaaccgggagatttcccatttcatgttgccaacaaccggaaaaacaaccggaagatttcacgtttcatgttgtcaacaaccggaaaaacaaccggaagatttcacgtttcatgttgccaacaaccagaagatttctgcatatttgggcctttttctttttagggcatagactcgcaaattgcgaaatcataagccatgcaatttcatcatttattgcctatgccatatgaatattaatattatttgtgcatcagtgggcgtaaacggaaattaattttaatcgatgtttgaatgttgttgacattcattctttcggcaagcgtttttttatgttatttaaattatttatttttttctgactggcacagtggtagtgagcagagatggcatggaattccgatttccgaataaatttttttcagttgatcaaagcgcaaatgcatttttttaaatttatgcctttttaattttattggtataccttcgaattttttaattgtcccattaaattgttcttttgaatttaattttaatattttcgcaaaaataataatttaattgacttaaatattttttagaatataatgctgaatttcgattctctgctactaattttgttcattttttatttccaaattcctttttcactttcggttgacaatgaatgccgtggtgtcccaactgatcaaatggcaccacttaaatacgcttccgatcagtggggaaagccaatggaaatcagatttgctgatgattccaaaccgagatttaacgtattcaaaaagataattttgatgtttttttttggaaattttatttaaaaaatatcaaaattttattttatctttttgtatttttagacaattttttttattttgaaaatgacttaagaatttttaagaataaattgatattatttaagacacacagtaattcaaaattaaatttcaatattctaagctatttagttacttttttatatttttaggacgtatttaaatgtttttaaattattttaatacctcttttcctaattttggataactaaaaattaaattcataatatgaaaaacattcactattgttggttttctttttaataatttaaaaaattataactaaaatatattttttcagattcgttttgggtttaccacggaaatgaatgaaaatttgcccaaaaataaatgtgtgcttatcaaatgttttgacgaatttacagaaaaaaattattttaatgtattaaaaattgcagaaaaattaaatgagaataattcgacgaatgaacacattatcaacttaattgacttgtaaacatttaaataaataaattttagttagaattttaaataattaaaaataattaattataaaatgtattagtggaacgattgatgaatcgaatcaaataacaaaagacgggggatttgtgaccatttttgagcttggaaaaagagatttagaggagcaattggaacttttgaatgaaaattttacaacagaaaacttgaacagtatgattaaagaagtgatgaaagcactaatggaatttcaccggggtaattaaaacgaataatgagt

SEQ ID NO: 12943 - DNA, 2906 bp, Heterodera glycines
  unsure (1)..(2906): unsure at all n locations
gggatgcgatttttaggtaaagaaaaaatcnccagaatttaggtacttaatagggtaaaaaaaaatctcnnanaatagggtatanaataggtacaaaaattccaanaataggtaccaaaataggtaaataaaaatttttattaacgattttttagtggaaaaaagcaaacaaagagggaaaattttggttctacatatctctttgtaaacgaaaatttaaatatattaatattttcttagataatattgacattttaaattaaaaattttgtcaatagaaaaaataaataaattttgggataaatttttgagaaatttttccaattcttagggtgcatttttgaaaatttttttggtctattcttatgggtatattttttgattttattgcatttttgttaagaattttttgaaaatccttaaaataggtaaccaaaatgccgaaataggtataaaaataggtacctaggtaataggtagaaaaatcccgaaataggtaaaaataggtattataaaagtgggtgtagaagctccaaaccaagctaaaaactcgttttttatgcttatctcaacgttacaagtgcgcaaaaattttaggtatttaactaaaaatcgcatccctagtcataataaagaaggaaaattgtgaatttccagttccgttatagagtaaattttaaaaattcaaaattttggactttcgaaaggccattttttgcataacaaatatgaaaatttatatttgaataagttttagttggaattcatttggatttcaagacagataatttaatagtatctgaaagaacagagaattgtagcacagaaataaattcgacgatcaaactgatcgattttaatggtaacttttgcttaattatcgcagatttaaatcattacttttttattaatatttttattttttgtcgctctgttgctgtatgttttttaaatttatgattatttataaacaactaaaagataattttaatgctattgtattaaagtttgaattaaaattttttattaaattattaaaataaaattaaaataatttttattcaattaaaatcaacttttattaagctttaattttatttccttttaaattaagaatccattcaaaattgtaaaataaacttgttttatttattatttcaaaattttatgaaaaattatattaaaaatatattttattataaaaaatatctcttttagttcaaattaaaaatgttaatttattaaaaaataatatttttattaattctttttattttttcaattaagaatccgttctctatttggatggacaaaaaaagggaaaagttgagaaaaattttaggggttacactaatagttttgctgcgcctgagctgcttcaggttataattttttatttttctttttttttaccacaataaacttattttcgaaattggctaaaattttaaaattagtaaatgcaaaatttttttcctaatttaattttaacaatttaaaatttatttaaaaactatggtcttatcattttagaaatcagctgatgataccgagggttatgttgaggtgactatttcaaaatttgattataaatttaatttaatttaaatattgccctatttttgccaattaaaaataaatttatttttactgtaaatgccaggttaccccaaaaatggacatttggtcggcgggaatcacaatttttgaaataacactcacaaaaatgttgggacatttcgaagcatggcataaagtttcattggttggcgaattgtttcgaaatgccaaattgaatccgtctgatgccatttttatatcggctggttcaaatgtttggtggcaaaggtattggcaagtgatttgtgccattctgtccgtgtgggacgaaatgccaacgattgcatttcttttgggggtaagttggagaatatgtaacttaagtcaaaaatttattttaaaaatccatttataaaaaaggcagcaaagtttatttaaggcaaaagtctaaataaaataatttaaaaaggtaataccgtattttctctaattatccccccccctttctgagggggttgaaaaataatttccccgtctccatttataccccggggggacaaatagaatttttatttattcgaaaaataataataaaaattaattattctaaactgaaaatcgtttaaatgtcttacggcactcgaaataaattaaaaaatttttgaaagtgtatttttcaattttcttgcctttttcttacagattattttcaaaaatgccaaaatatgtgctaaaaaaaatccaaaatagcccatatctttttatgtgccaaattatttttatgtttttataagtcgctctaaatcaaaaattgttcggagaaaattccatttttttgtgtttctctcgccataactaagcggtaaaaaaaatatgtaaaaacataaaatccgatctatattaataaaaatgaaaaaagaaagtttttgaaaagagaaaaaaattaaaaataaaagcaagaaaaattgcataaagaaagaatttttgattatttaaacacaaccgaggcaatgaaagttaaatttaatattttttctcgataaaaaaatttcatatttaaaaattttccttattcgaaaaagctataaaatattttaatattcattaaataaacaaaaatgagtttttttttgattagattttacgtgttttcctccctaaaaatcctttanaaaaatttttaaatgcctttttcggaattttcgtgcgtttttttcaattttttggtgcctattatagtgcctttttcgcgattttggtgcctttttagacggtctctaatcataataccattatttttagaaatatgtaagcattgagccgcaaaagcgatgactggcaaagga

SEQ ID NO: 12944 - DNA, 3289 bp, Heterodera glycines
aatgttggatttggattacaaagaaaaaagttatagccaaaaacatggtggggcccaaacgtgccggcccaactgaggtaaaccgtaaaaagaatttttttttttttttgagaatttttctccattgaaaatttcaattaaatataatcacaatttcaacaaattgttaataattttaaaacctactaattagcttttcacattcttcgtcacagttcccattctttgacgcttcttcaatttgtgtggctgcagaaagtttggcgcgcgttttcacctcatcccatcgtaaaagtagtcccaaaatcttttcagcaaactttttccactcatggcattcatttaaatgttctctacatgcttcaaaatggcattctcttctatgtttttggcaattttctttgcatttggcattgtggcattcggcattatgctcttggcattttgcacaaattttttggcattttgactccgaattttctttgcaaaaccagttgtcccacaatggcgttcgtttcaaattgttatctggcatttcatgaatagaattccacgctttgtttaattcgttttcaattttttccgattcattcccaagcaaaaaggtgggaaaatcataaaaataaaaaaatgaatcgaattcatctaaaagtctaaaagctttttcgtgaaaataaaaaattagaattaaaaaacattaaaaatttttaaatattttccaataaatacatttaaatattattatttttattaatttattatattaaaacatttagaatgagctttttcttcaatataaaattatatgaattacataaaatatataaatatttttttaaaataaatgttttcatgaaaaaagatagaaatttctttgactgatttgtttcataaatgatttgttcggctttgatggatatgtttaaaaaggagaaatttggctaaaccttgtgattataaaaaataaatatttctacgttgtttaaatgatgtcatttccgtgaaaattgcccaattattaattgatttttttcactaataaaaattttattaataataaaaaaattttgattgtataatattttttaaatatgaactgaactataaactacaaaaataaatggatttaaacctcataaaatgccaaatttatcaaactctaatttcaacaattgcaaactaagttatttcatgattttttggtaaatctcatctgtttgtagcgaaaattttcggaagcgaacaaaatacttaaaaaattgccaaattttcaaaaaattactcttttgtgctgttttattaatttctagaacgttgattcttaggggcgtatttttagatttttttgcttttttcttgtgaaagtttcctaagaatggccaaaatatggactaaaaacgcaaaaattgcaaaatatagaatattcccgaaaatcccaaaaatatggatttacatatatgaaaatcttcaccaaatcaaaaaaaaatttaaaggagaaatgctatttttcaacccctttcttaataaatagtatatgcgcagaaaatttatttttattccacatttcatggttatttgttcatttttattgtaatatttcaaaatttacacccaaatacagtcatggtcatatgtttaacaacacttcaacatttttgatttaaatagctataatattttaatttgattataaatgtgtagtatgtcttaagcttttttgttgcattttttctgggctttccaatgataccacttcagaatatgcatcgacgtccgaagactggccgaactcccaaaacaacggaaagacaacggcgtcagcttgttcgactcgtcaaaagtaatccaaagttgaccgctgcagatgttcgacggcactcagctgacgctctcggagtccaaatttcacacagtacagcccaatgcattctccgaaagcaaaatctgaatgccagacgtccggcacgtaagccactattgaaagagtgccatcgaatggcccgtttgaactttgcgagggcacattcgcattggacggtggcggattggcggagggtgatatggtccaacgaaagcaaatttaatttgttcaatccggacggggcaattcacgtccggcggcctccggggaaccgtttcgaccccaaatacacacgcgggacaatgaaatttggcggtggtggcggtgtaatggtctggggtatgacggaaaaatttgaccattttcgtacgggatgtacagggtgctttaccggggtgacacactcggcccgttagtccgaattgagggtaatttgacacctgaaggataccgcaacatcctggaagaccgaatgttgccgtttgcccgtgaacgtctcgctccaggatggacttttcagcaagatggagcggccatccacacggggcaactgctgatgggtcccattcgacttctccctggcggtcggcgtctgcgtttgccgggctgatttcgcttgaatggagttcccctgcttcgtccccgccgttgagcaccgatttgtcacccattgaaaatttgtggcactttgtgaagcgaaaaatcgccgggaggcacttccagtcaaagccgcaactctggcaagcagtcctggaggcttggaattcaatcccatttgacacaattgacaatttaatcagctccatgccccgacgtatcgaatcagttattaagtcgcgaggtgcaccaacgaaatattgagttatatggaattatattttgtgttgttaaacatatgaccagtgctttttgaggataaaaaattttgagatcaaatattatttgctacagaaaacggaatgtgatcatttctatatctttggatagcccattaaatggtgtatcaaaaacgtaaaaaaaggaaatcgatatttgttttatctaagcatttttgcaaaaatttatttgaaaattcttttattttattggtgttgttaaacatatgaccatgactgtattttacgcaaccaacatttaattagttcataattaggaatgtcataggaaaatagattaaaaaaaacatttatgaatagtaattttaaatttctttttttcctcatcatcatatgttcactctcggaaaaatgctcttgaaacagcctaattagttgccaaattagcaacaaatatcatggcaaaaagcacaagtgtcatgacaacaggcatgacaacagtcatcataacaatggcatgtccaaaaatcatgacaacaattctaaaaacatcggatttaaattaatattttaatttaaatatttctaaaat

SEQ ID NO: 12945 - DNA, 3488 bp, Heterodera glycines
  unsure (1)..(3488): unsure at all n locations
ataatattttgcctgttcagaaacacagtttgaaaatcttttcatatactcaatttcttgaacaaattttatttgtttattccatatttttttttgatttcatttttaataaaaagtatttcatgttcaatcgttgtcatatttttttcaaacgagtcataatttaattttaaattacatcttatatatcttattcattctttataaggctccaaattatcgattggactctattttcaagctccagaattttggtatgtgcacgtcgtgcttacaggtgcaatcgtgtggattcaatcaatgaagacatggctctttcttctagctttgatgcctgatcaaaacttttcaatctctcaaactcacgccgagcagattccgctttatccgattctgaatttaccttgtccaaaattgtgtaaatttcccaaattgaatcagagagcttaaggaacaaatctcgtacaccggaagcgtatggggccttttctcttgtttttattgtacgattcagagcacctctaccggatttgacatactcttcgatttcttcagctaagactacaacctctctccacgatctctctgtctcttttttggaggcttcgagaaaaattgaacttgctttttcgttctttgtgttcatttttatttatttatttctattttctatgcctaattatattttataggcaatgaattcgtctctaaattctgctgggggccttggcttttcaaaatttatttgattttctcgcattatttcttttattttattggccatgtttccaattcccaaatctggctgtgaataagagttacgataagtctgtccaatttcatgcctatatttttagctatttctattgattgtttgacatcttcagcattttcttgacacatcactgggtcctttctgtctagacatttttccatgcctttttaatattttttatattcttttcctcattttttattttatcaaattgtgagtgtatttttcttactccatttaatagtttttcatgccaacatatgatttcagattttcccgatttctatccttaatattttgagcttcaacaattgtattatgagcagaaaatgaaaagtctttggcctcattagttacctaattatatctttaattgcttcttcaacagcccttctggagatatccaattgctgtttttcttcttttgaaagacaacaacaaccctccccccttaccaccaaaaagaataaaattaacacagataaaaaattcatttttttttaattatcattaaagatttttatttatagttttaacgaatcatctttatcttcattctcttcttaaatgttcatcttctgaataaaaatacaattttaattcatgggggtattagcctaccgctgtggcacgaaaaanagttgtcatttcnacagaaatcctttcttctaaaaggttgacgtcctgataggattgttgccggcgcataaactcaataaaaacaacatccgccgtaacttgtcccagtgggcgtccagggattatcaccggatccgataaggcgcagcaatacaagtacacggtcattttctcgattttccacccgggctcttccgctttctttgcttcatttatcagttttgttaatatttttttaaaattttttttcagaattttcgtttggcgggttttgaagtaaaacgttgaaacatgttgttttatggccatttttggttttcttttacatgggtttcaacttcttcataatacttccctacttccggactttttctgaaataattacgtctgtttttagaacgacgcgtttctttcgggacttgttggaaattcttagacatcttaaaaaaagtaagcagcgaattattattatgaacaaatataccaaatgtaaaatcattaaaattattaacaagagataaaatatcaatttaataatacccaaagagcaaaacatttaaatattgatcgagcattctgctatcccttgttggcccaatcttctctggatagcgaaacacttttttaactccttccttgtagcccaagaccattgacttgaactcctcataatccactctattgtccttattcaatgtaaagccccggattttcgtcttgtaccagatcaccccatcctttttcctcctaagcttcaaggcgtattgttttggacccgccgacacatactccaaaatgtcactgtccgaatattctcgagtcatctcactgaacaaatgtttataaaattttttaaaaattatgctgttaccccaaaaatttcccttccttcaatggacatttccccttcggatgagcaaaagctagagaatctaaatttaaaattttatggaaattatttccctgaaaacacctgtgtcacaatacaatggtttgcacatcttctctttgtaaacctgctcaatgtattcgtatagctttatccttgcggcactcgtagtccacagagacaatacgatattagacaccttatgctccctaataaattctggttttttgttgaaaatcattcgtacagccccttcatccaacataatcggtgtcgaaattcgatcgtatcatctttcaccatctcagcgcactcctccatgctattaacaattttcgttgaagaaagtgtattcctcatcgaaaactttccccacaaactgttcaaccccttaatttctatttgttttttttttttgattttatttgttttcttactaatttcgcaatcatcccaagaccagagttaaaggcaatttggtcgtagtcaaggctgatgtcatacttagccttgtaaatttcaatgaatgctctcttttcatcttcgtttttcacatccgacggccagcctgacgcttccactgttattttaagaaagatccgaataacctttgaacagttggctgtcaaattgttcataatgataggccctgaagaatccagttactctatagcctaactccaatgccttccgcagttcaatcgaggtgaaggtccccgacaatgcccttttttcctcggggtggttaaactttttcacattttttgccatcatcaacagtccgtcgtagggaacatcatcgggcgatgtccaattcacttcaaaactcctgctcaccacaatttttgagacgccaacaggatatggggtgtcttaatcaaggaaataaacagaaaaataatcaattttaccataatttacgaatgggtagagacttatgatatcaaacattgctatctcaacttcatctgttgcctttgcgtacaggcaaaaaggcattgttcgccctcccgcataagcgtccctcggattgattgggcctttgtcggacaccccatcgaaaacttcttcatcgttctgttccgctttaaatcagctttcacatcacattcctaaaaaatttttctaagaaaatgttttttatattgagataccccaaacttcctccactctgaagtttttaca

SEQ ID NO: 12946 - DNA, 1951 bp, Heterodera glycines
ccgaccacaaacatttttcgactctcagggcacctagcgcaacgttctcatatgaaaagagcaacagttttttgctctccgtcgctcgtttttgtccgaaacaccccaggcgcttgtacactgctcatgttttttgaacacagaagtttttgtcacatacccacgacaaaatgtacaaaggcagagattgtcgcgggaagagaaaccagtcacacccgttttttgcacatcgcccgcgggccgacgtcgcgcaaaatgcacattatttttttgtttgtcatttattttggcatttaattttgttttaacgaatcttttcaaaatatttttcaatttgctttttttattattagtgccgtaataatgatggtaaacacgaaataacgttttgttatgtattttcaatttcctgttatatgtggcgaaatattttctaattaattgtttgtattttttacaaaaaagttctacatttattcaaaattgccatataaaattatttgttttattttttagcaaaacgactttttgaattttcacaaatttttcaatatttcttttattttctttcatctgcttttcatttattcaattttcaccatttcattttttatctgtttattttgaatgcaaagaagaaaggaaggaaagaaaagcgctgcgcccaggcgcgcatggaccggccgcacacagtgcggcgcatttatccgaaaatttggaacaagatttgcggcctgatactactgttaaataaaaggttttaataaatgtttaaagtatttaatggaaacactaattaattcaaataaactgaaaaaagaagtttctaaaataaacataaataaaataattataatgcaaatcgaatatataagacatcaatattactaaattaaacgatatataaaatctaaaattgaaaagtatactagatataaaaaagcatttttgtgttttgtcaagaaagctaccaagtggatttaaagattttaaaaaaattcaatcttaaaaaataactcataagcaaattcataattaattattagaaaaatgaacaaaaataattattaataaaattgcaaaggggaaaaaacaacaaggataaaaagaactaggggacgcaccgagaaaggacataaaaattaatttatcaaaattaactcccatcaaaagaaacgaacttataattgtcataaaatatctgaaagaattattaacacgaaatttgtataaattaacacatataaaattatagaaaattaattcattaaatgtaataaattaacatttaattttgttaataatttttttattccaacttatatttagacataaattattattcatttaataatttaaactttgaaatctataaaaattttatttaagttaacaagaatttaaatttatgaatgttaatagatttcttactaagttgaattaacggattgtaaatactaaaacataggaagctcatcaagaaaaaaaagttaacgaaatatctacacaagaccaatattaaaatacaaagaattaatataggcatcttccttgaatgaataaaataggcatgaaatgcccaaaataaaatgcaaattttcagaactttttcatataatttttttttaccaatttttgaactttttgaaatttttacgaaatttatttttgaacttcctcacaaaaaaaagaattttgaagttaatttttcaaatagctaaaatgttattcttagttaagtctaattgagtcattttttgcaatttgcttaaataggtttttctttgattttttgtctgtaatgataataaaacttctcgattctcgattttcggcaaataaggaatattttttcccatgtcaaaatgttggcttctcgatgtcttgatgatcaagtaattaattaacagaatatgaaaaagagtaccaatgcatatttgaataaaaatag

SEQ ID NO: 12947 - DNA, 4193 bp, Heterodera glycines
agattttgttcgcggtcagtttccggaatggaaatctggacgtcttgaaaacgttgaaagacatgattgaaacgcccggtttggccaagaaagcaaggcatttcaagatccaagacccatcaacccgcattgcattgattgatcaaatcttgaagcagatcagtgacttcgaatttgacggtgtacttctcgacttcaccggtcattcaaattaactcattaaaaaaattaattaggataattaattaaatgctttatttaattagtattattggtgtttaattattttaattatcatttttgtgttaaaaaagtgcctcaattttaggcatcaatttgtcaatggatcagattggaaagcatcttgttgattttcttggcgattttctgctgagaaatgcccaagaatacataaaccgttcaaagatgaacaaagacgctaaaaaactaattatcagtaattaattaacaattagtatatgtataataattttaaattgcttttttagctgtacgaattgaccacgacgaaattgaccacattcaaaccgaggctttttcacgcctcaatttgatggaactcatttcatttacgggcgtaagaactgaatcggaccaagcggaattagttgaaaaattgggtaatttaaataaagatatttttgtttaaaataaattaaaattttatagaagacaaactcagtgttgacagaaaagtaatcacggacaaaatttgtgaagtacaatcaccgtcaagacgattcaaaagaggcgcagggtaattagtggcttaattaatgcttctaatgatacataataattaagttattacacaatttgcaaatttagtttccctcaggccgctttgaacgttgggcaagaaaccaatttttcgtcgcgaaggcatattaaacaaaccttttagaataataaatgtattggtacattttagaaataagcgatcaccaccaccgtcgcccaaagcaaaagcaggagcacacggctcacccaaatcaccaaaacaagcaaagcatggatcacccaaatcatcactatccaaagcaaagcttggaacatccaaatcgtcaccatccatgacaaagcatggatcacccaaatcgacaccatccaatgctaagattgggtcaccaaaatcgtcattatccaatgcaaagcatggctcacccaaatcgtcaccatcaaaagcaaagcctggatcacccaaatcaccatccaaggcaaagcctggatcacccaaatcaccatccaaggcaaagcctggatcacccaaatcaccatccaaggcaaagcctggatcacccaaatcaccatcgaaagctaagcctggatctcccaaatcatcaccatcaaagaaaggccatgtatcaccaaatgtatcaccctcaaaaggcaaaagtcctcaaaaactactgtcaccaaaagcaatgctgcaaacgcacaaaagtgcaccggtatcaattaaattataccttaccattagagcaattaaataattagcatagaaaaatagtgatataaccaagcataataattctcgagcatcatcaaaatatgttcttagagcagtcagtaatcattaagtttgaacaccaacagcgccatgatccaaccacgaaattatcaccaatgaatgccaattttcgggctaaacactcaccaattatggcacagacgcactttgatcttaatcacacacgcaatcggccattgcataagcattggtcaacaaacatgcctggctcggcttacgctgatggacaaatgtcaccgcttcgtgcttcatcatcaatcgttaacattgtcgaacttcaccgacttccgacgccacctccgagacatggcttaaatgagcaacaacaatcacgaattgtgccaatgaagccctgcttttcacgatcaaagtccgagttgccggcaaaagtgctgtcatcaccggcttcggcaataaatgcaaagaactggcaaaacctggcacactcatcagtgagtagtgatggatcagatgatttcaatttccggatgaaacatcaccaatatcaacattcaccggctgtgccaataaattcgcttgcaaaaagccaaagttatgtgactttgccaacatcgccgccgccgcgtttcaatgcgtcaccaagtgccgatcagcaaaaaaagcattttgttgcgatgccatcatcgccgagctatccgcttccggttccatctcctaacactggcaaaatgccacaatttctgccaatggcagacaagtcctattttgcatatccgaaaagtagcagaacagcaaatcgttcatcgggctcaccactgctcgggcccaaaccaaagacactgatcatcgtccgcgattcatttcctctaacatcaccaagcaaaagtaaaagtgccagtgccgtggattaccaacaccgttttgagcagtttctttctccaatcaaaagcaagaatgccgccgctgtttaccatccccaaccactgcctttgccaccaaatatgccgtcaacttcatcgacccctattaaaataggccaacaacattcatcagtaattccaaccagaattggccatcattatccatcttctcctaatagaattggccatcataatttgccacaaagtattagtaaaacgcaggtaccgttaatgatgtagtattgatgctcgagaattgtagaattaatagatttgatcattaattgactggcataaaaaaattccttaaattaatcattttcaaaaaatcacattgttaaagcctgcgttggcccacatcctggcacatcattcgccccatttgccggtcggaagtgagctaagtccagctaaatcactcgacagccatcaccaacggcaaatgccactgtttgcgggcaaaaaatatggccaaaaccaccagtcgcctcatatgtcaccaacaaaactgtcaaatggtaatgtctcaccaccacaatcaccatcacatcgtctacaacaggtgaaaataatggaattataaaattacagaatttctgattggaaactccgtggattctttagggggggggcttaatattaaaggtggtagggaattttcaattcaaggagaggctccttattcagacgggcttctaactttgaggggctttatcccccccccaccgcgcactccctcataaaaagggggcttttaattaaggaggcttctaatatggtgccaagaccgagagcctgaaaatcataattctaccatgtgcctgatccattattaaaataataataattgttaaataaattatatatatttaagattatcaagcggcattcacagacaaaggatttgtccagggaaaaagtgcaacgacaacaacaaagtccgctgttacagcacccatcaattcgcgccctaattggcctgcccaattcgccggctgacgaccaaaacccgcctccgccattcacgccggaacagcacgcgctgcttatggacaccgtactccgtccaccgtccggtcttccgttcgagagtccacgatcagcgccgtcaccgcttgagctgagcgaggagcaacgcgacaaactgatcgatgccatccaaggacgaccacagccaggacttccatttgaggatgaagcggaacatgaaggactacatccggcacaccgtgtcaattcggcacatcttgaacacgttttggatgccatattccgtaagccgcctggcctaccatttgaggatgatgaagaggaggaacacagcagcaccaacatggtgggtatagttggatgaattttcccttagggttatcccgcatttcgtaaaaatcgaagttaatcgagtgccaaaagcagaaaatttttaataatcggaaataaaatggggctaaaatgaaaaaatattttcatgtgcttcatttaaatttcgtaattttaattttcacaattaagcatcactcaattgccggctatgagactaagctattcaagaaggatgaatgctgatgaacgatgaactgataataataatttttagaattaaattgtatttgtaaattgataattatcggtagataaattgagcacaaaagtcgccatctaattttggggattaaggtattgtgtgaatatttaagaaatagcaaaacatggtaacgattaaaaaatccaataattaattaattcactgattactttat

SEQ ID NO: 12948 - DNA, 3113 bp, Heterodera glycines
aaaaaaaggtcgtcgccggggaatattgggggccgacgtaagaaaaattggtcctggcgcaccccccccccccccccctgcgccaaacgtccgacgtatgagggtctgactggcgcaccccttgttcatggattggggtgcgcctcaaaatatcgccgcagaaatttaaaaaaaaaattttaaagaagaaaatctgaaaatttttaatatgaaaatttcaagaaaaaaatcattgaaaattttgaaagatttttcgttaaaaaacagtaatttatcataaaatttcaacaacaacaaaaaaagcgctgaatttttaaagaatttttttctttaaaatttcaaagtttgaaaattttcttttaaatttctgcggcgatattttgtccgggtgcactacgtttcccccccgagtagttactagtgcagattttggcccctaaagttcgagcccccttggctgcgaattattttttagaattaaaattcatctatccaaaggtgtgaaccatttttttttacatttttaaaaaaatccaaaggtgtgaaccatattttttgcattttttaaaaaatccaaaggtgtgaactatatatttttggcaatttttaaaaaaatccaaaggtgagaaccatattttttgcaatttttaaaaaatccaaaggtgtgaaccatattttttacaatttttaaaaaatccaaaggtgagaaccatatttttttgcaatttttaaaaaatccaaaggtgagaaccatattttcttacaatttttaaaaataaaaaaatatgaaccattttttaaataaagtgtgaatcatttttaaataaaagttgtgtgatttaaaagaccattaagaaagtaggtatatttctacccctattcagagggaggaggggtggggtaaatgactcaaagccttttagtggattttttaacataaaccttacggcatttttttataaaattgttttaattacgaatccagaattctctgtcagaggggtggtctaagggtattttccccttttttcgctgctgataaaaaattaaattaattgttaaaaataatggctgaaatataaagttttcaaaaacctaaatataaagacaccataatttaattttttaaaacccattaaaaaagagtagacagatttctatccctattttggtccttaatcataccgtatttataagatgaggggggtaatcctttcccaaaaaaacctttggtggacctgttactctgtgcctatgagatatttttaacaaaaacaaaaaagtatttgttttttttatatccgaacataaacaagtaaaataacaaagaaattgaaccgtcaaaaaaacttgtcccctcatcattacaatgttttcatccagtagagatactgaacgaccagtgtggcgaagatcaggaccaacacgatgaaaattcgttctttccacaaagcacgaagaagttttcgagaatgcggtacgggtgttgttggcggttgctgttcctcaacaatgcgctcaaaactacctaaatttacaattaagaaagagtaaaaaaaattgtccactcaacataccattattacccatttgcgtagatgaaaattgtaatttttgtaaaaattgtatagctataaatatgaatatacataaaatgagacaaagttgcaaataaaatttgaattttaacaaaacatcaaaatattttacagttttttttagcgaaaaacagcctagtaccatttaaccctaaaaaacacctaataggcatggataaaaaaacgacgtcaaccaaaatgaaaaaaaaagtaaaacaaagtttacatttttcaaatcattttttaacgcaaaataataacaaaacgccacgccacattaaaaccatggcggataaaaacattcaaccttttttataaaagatgggcggtgttattattagtgagcgcaatgttaaagttaaagtgtgaaacaataaaaattatgagggagggacaaaattttttaataaatatatcctttaccataaaattaaccaatttttcataaaaatagataaaatacgacattaatcaaaatcagaacattcttgataaatcataacagatcaaaaccgttgcatataagacattttttacctaagtttttttaacatcgtttaattttattaaaaaaattggctgacttttttttgacattttattaaagttgttttaaatttgaaaaaatgtgattgatcataattttttagattgaacaaagaatgaggaccagagcaacatacatacacaaatggattaaaaaaatcagatgaaaaagtaattaactatggtttttttaaatattcgtttttataaatataatgtaaacaaaactgctcaatgctgaccagcaaatagggcattttaccattttgggtgagattgtatttagccttaggttttaacaatttgctaattggtgtaatgaataaatcaacaatggtttatcaatgttctgtaattagttggtcaccggaggagaagcataatttgtaaatgccttcgtccgaatttggcctcagcgcacttttcaaagggcgcctttttgatgtggggaaacaacactcaaaaagggacgaagttttgtccaatgctttgctgggcactttttcgttgacaattcgaacattgggccccgaatgggcgcattcgcaacgcgacaaaaagggagagaaacggcgacggaaggcaaattcaaagggacggcagcagacaaacgctaaattagcaacttaatgaaccgaaacaaagcaattaactgaggctagcagatgttaaatgacttttttgaataaaaaggtgttacattccccgttcaaaaaaaagaaacgaaacgacggcctatgaccccccgccccgccggtgagtacgagatacgccgcaacccctagttcaatacccctaattattggattggcttttcgtgttttttttgccccctagattaaaatgccggccaattccccgcccccctccccaatgttcttttctcacctgtacccattccgtgtgcactgctcgcatcgctcgcacttttctccttccttcaattcggccttctcaaaaagtcggagt

SEQ ID NO: 12949 - DNA, 2798 bp, Heterodera glycines
  unsure (1)..(2798): unsure at all n locations
gaatccctacttatatgttcaatgactattgtattttcataaatttttgtatattttttaatttcactttttttcctgtaaagtgacaaaatgttcgcctattaacagctgactgatcgaggtgatcagcagcaacatcacagcaacaattacccccgtaagaacaggattttctgcctgtcccccatttattcacttttcgtccgccgattgagacgaccgaagcagacgaatgaacaatttgttgttggttgatgaacacatgagaaacaatgttttgctgcgcgtgtgaaaaaggaaggcttttccggctcaatgcatgtgaatttgtagtgatttgaagcaacaaaaaaaatcaattatcaaaaatggcaaaatatattttttaaataagcttttgtacggattgcaagaaaattaatttgaattttttttaaattttttaattagaagtctgcaattatttagctataaaaaacctgataaatataaatttaagaaaaaaaaattgtaaacacataagccatgaaatttttgaaatttttttgggcagacaaagatatctaggcttgtctttttcccataatgaaaatctttttaaaatataaattcaagaatattttttggttcccaaaatttttcactttaggttgttttttctaaagttaaaatatgagacacttgcttttactttttttttcttaattgattataattcattttcgccttttaaatttgctaaaaaatttccattcttttctgtcccccacctccctctaaaagaatttcgctgtttttcactatttaattagctgtttttattatttttgccactactaaaattacgcataaatacattcccaattaatttggtcctaatttaccaaataatattccataaacaatatttattattgttatttgtgtgaatagctgccccaatttaatatgtaaatagtgcacactccgctcaatttcatccactcactcactcacaatactcatcaacacgttcaatgggtggatgggtcggtcggttggttgccaggtgcccaacactcaccgatatccatttttggtggcactaatggtgctaattacggcataattccctctccaccttctcttctgtgaatgattttgtgcacgcgaatgttgtatgtttctatgaaaacattttctacaaattggaaatcctttttaataaatgcctaaattgtatttgatagttaaggcaaataattttaagcggatttattaatggcaatctcaattttggtgtattttaaatatttctcaaatattgtaaaacaatttagcatttttatatttaattcaaaatgacaaaaattttattttaaattattttcgttttttaattagacgagagcccaatttttaagtgtttaaaaaagtcaaattttattctttttaactattttgtttaaatttaaaatttgcaaattaattttcattttctttacatatttatatttttattttgtgttaattcatttattttgtgcatgtacaatatattcatcctccaaaactggcttaacagcacaaaaacacccataaattattcacacatttcttcgactctctcctctccaatattcatcatcctggcactcctcccttccccccccccccccccgtccgttggttggaagagccaattttggcattttttatgccagcagctttaacgtaaggatgcaaaatgtcaatgacatgggcatcctctgctgccggataattgaaagttttttggatttattgaaggaggaatttgggaattcggaatttctgttttaacaaaaatttatatatttatttatgttaaattttaaataagtttaaatttattctgaaactttataaattaaagaaattatgttttaataaattttatactattcaaaaaaatgtttccttttttattttttcctttttttgtgacaattgcttaaaatcaatttttgccttaattaattgattaaataaaaatcgcttaaacttgcacgattttgcaaggctaaaattttaaagattagctttctgctttcgaaatatatgaataatgaattattagatactttattatgcttagaaaaagctcaatcatttcatgtcagtttattttttactttgaacccattctacttatgtgtcatgtgttttttggcaactgatcagctattgttcaactgatcggctgggtgatcagcgatcatgccgactgatcctcgccttcgctctttatcaatgcttttgctgccattcccgtgatcactcacctgacataattagcaccaatctaattaggtcttgaaaggtaccaaatggctttttcaatgcttttttgatcgagtgtcgctaattttagaaagaatcggactaatctaagaagcatataagctatccaactgtggtatattggaccaaaaaacttaaattacacttaaagattttattgctcagttctaatgtttttcctatttttttaaatttccattattttacaagtttcttcaaactggctatatttaaaatttcttgactacgttccgaagactctaataaatcaattaaattttcaatatgtagagttttcgctttttcaaaaattaattcccaactcattttattaataaccgtatcactaagcatacattaattagctaattgccttcttttgataatcaccgtcccattntctctgctgctgantttgtgggtcaccaatgccttcgctatatcaacaanacttcaccacccatcacaacaatttt

SEQ ID NO: 12950 - DNA, 2486 bp, Heterodera glycines
  unsure (1)..(2486): unsure at all n locations
ccccccccccccccccccccggcgggtggaggcaatttgccatttttatgccagcagcnttaacgtaaggatgcanaatgtcaatgacatgggcatcctctgctgncngataaatgaaagtttttgattanntngaaggagaattnngggaattcggaatttctgttttaccaaaaaatttaaanttttatttatgttaaattttaaataagtttaaatttattctgaaacttataaanttaaagaaattatgttntaataaattttatactattcaaaaaaatgtttccttttttatttttttcctttttttgtgacaattgcttaaaatcaaagtatgtttttgccttaattaattgattaaataaaaatcgcttaaacttgcacgattttgcaaggctaaaattttaaagattagcttgctgctttcgaaatatatgaataatgaattattagatactttattatgcttagaaaaagctcaatcatttcatgtcagtttattttttactttgaacccattctacttatgtgtcatgtgttttttggcaactgatcatctattgttcagttgatcggctgggtgatcagcgatcatgccgactgatcctcgccttcgctctttatcaatgcttttgctgccattcccgtgatcactcacctgacataattagcaccaatctaattaggtcttgaaaggtaccaaatggctttttcaatgcctttttgatcgagtgtcgctaattttagaaagaatcggactaatctaagaagcatataagctatccaactgtggtatattggaccaaaaaacttaaattacacttaaagattttattgctcagttctaatatttttcctatttttttaaatttccattattttacaagtttcttcaaactggctatatttaaaatttcttgactacgttccgaagactctaataaatcaattaaattttcaatatgtagagttttcgctttttcaaaaattaattcccaactcattttattaataaccgtatcactaagcatacattaattagctaattgccttcttttgataatcaccgtcccattttctctgctgctgattttgtgggtcaccaatgaccttcgctatatcaacaaaacttcaccacccatcacaacaattttaagcatttgcgcacagtcccacccacccaccaaatctgtgccctctccctgcccaacccatcgtcgaaaacgtcgaaaatcctcgctctaaattcattctttttcaaaaaataaatttgcgctatgtgtaaaaaacccaaaaacccgtcatccatcaattctttccccccccccccaatacattcatttctttacccatctgctgctcactcggcttggtgatgatgcgctcgctgcatgtgcatgtgcacccatcgcccattcttttgcgagaaaatgccgctaccgctccccccccccccccgcctctccactttatatttattgatactgcttgggcttctcctcctatctctcctctctctctctctctgctggatttcaaaaaatgcagcattttcagttataatttattctcattttttctgcagctaatgcttgaaaataaatgtttttctcgtaaattgtacattttgttttaagcacaaattcgtcacagggatcactttttttttggatttttcaacactaaaaatccgcttatgaatcatattttgggcattaaaaataaataatcatgaacagctgctgggttaatttagcgggtgttgggtatgaaattgcgtcattttattttgattgagaaatatgtgcgggtttttttggtggttctaccattttttcgctagatttggactatttcgtttcaaatttatacattgggctgcttaaaaaacgcattaaatattttgtttcattttttttctttgaaaattggcaatgcgagtatcgttttttaatccagctaaaatttttaaaatataaaaaaatattttaactaataaaaaaaacccacaaaatgagtttaaaagcccaaatctggcaatcctgccccttattattcattgtaaaattcaattttcttacttaactcctcacctaacatttatcaatatattcccttccaaatgattgcataaatcatatggctttcttttcgcaaattatctctgatcagttggccaatgttaccctattctaatcgcgattgaatactgatcaaaaatgattctttgttctcaccgcgatagtccataaagaggtggccaaataacatcccccctctcactttccttcccattaagtcgagagtccaaagtcctatcagtgtcccgtcaacggaacggacggaggacaccaaacattggccagcaaagcgaagccgctgctgggctttgctcggcgttttgtgtgtaatctgtggccggcccatttcggcgccggacggtggtggccgggcggtggtgtcctgtccgtgcctccttctcg

SEQ ID NO: 12951 - DNA, 758 bp, Heterodera glycines
tgttctgctgatgttgatgggcttttcacaattttttggcgggctgtgccgttgggccatttgccaacgacgaaagtcacccgctttcccccccccccccccccccctcctcacaattaaatccctgtttttttgcctctgtgatgctctttgaacaccacacactgttctcgtgacaaccacggccattgtggccaaaatcacattttgagtgtggatgagtgccctcctcattttgagggctataaaagcttcatccgctcgcctttcccaaattgtctctggcattcaaacccttttttttgccattcgcttcgacaaattgtcacttttttccctttgcgaattcattttaaatataaaattattttttaattacaggaataaaaaaatacttttgctgaaacatcggataataaaaaggcggcatttttattttgacccttcgcttcgcttctctctctcttttcccctcatccaaaatgccattcatcggaaaggactggcgcgctcccggtaatgaaaatggtgtttgaaataatatttttattatttttgtttaaaggtgaagtttgggtgcgagtcaatcacacctctggctgggagcaatgcaaagttagacaattattaattatttttaaaacattttcaaatatttttccgatcttgccagtgcgacaaaaaaagactttactggaaaattaaaaaatattggataaggacaattaacttttgtttattatattttaatgatatta

SEQ ID NO: 12952 - DNA, 4103 bp, Heterodera glycines
  unsure (1)..(4103): unsure at all n locations
atgctttntgtgccacaacacacacacntttgagaagaatgcccgcgttgttgatcagcaagttcagtccgcctttgtccagcaattgcttttggacttggccaaatgccgtccgaatgcttcggtcgtcgctgacgtcaattctgatcagtcgcaatggtccatttttgtcgtgcagttgttgcaattccttaaagctctttttccctttttggtctgatttgtgaggttaaaaatttcaatttcccctaagggttcgtccactgaccgcagccgaatcgacgtccctacaaccggcgaacacatttttcagtccaccaaccgccaacatttccttcaccaatccgagcccaatgcctcggttggcgccggtgataaacacattcacaccaagcggagaagacatcgaacagaaaacaaattgaatcaaaaaaaaaaagaaataaggagaaatagcagcggacttttatgggaaaacactcaaaataatttaaaagggtaaaagtgtattcagaaaacctaaacatagaaagtggacagaaacaaagaataagcagaggaatcagtccgtcttcgccccccccccctccgatcattcgtcgccctccgtttgttcgttcagtgcctccgctggcccatcgtccttttctgctgatgcttcttctctttcgcgccctccagaaaagtgtcgctctccgctcggcccttttggattgcttttgcaaacatttccatgaaaaagttgacggattcaaccgagtcgtcgttgccagggattgggtagcacacgtagttgggctctgatgcacggattattggacaaattctttcatttcctattgccactcaccgctgttcgagtcgacgatcgccacggttggaatgcacattttggccgaatcgaccagtgccggatgtgcttccatcgcgctagtcagcgtgttcaacagaatcacagtgtcgggcagccgaatgggccctccgaagacgctctttgtgttggtgaatgtgccgggctgccaatggcgcgtgtgggcgtactgtcccaattcgtcggccattgtctccaccattagcattgaggacctgaaaaggcaaatgccaccaaatggaaagcccatcgggaagcagcacttattggtcgagacgaagagaaagcgaccgcccaaaaaagccacagatcggacaaattccaacgcctttagcagataatgccgagtgatttccaagtcaaagacgcaaatgccaagacgttctgaaaaggaaaaaatcggaaaacaatttatacccaaaaatgatccgatgggataacctaaaataggggctaattggtatttccgaactcatttgttcggcgctttatttttttcccgactaactgtaaatttttaagaatttatgacaaatggctaattacagatatgtcccttttaatttcccattctttcgatgccatttacctccatacaatgcccatttcatattatcgttgagagtgccaacctaaaaaaccaacttttagtccatcgacacatcaacaattccttaatcgaatgtccgaatatcagcgaatgattgagattttcataaaaatttatgaatttacaacatcaaaaagaacggaaatgttattctgcaaaatgttctgctttttttggaaattagtaaagtttagttaattttaagcatttgaaggatgaaattactttatggcccaaatggacacgcgcgtcaagcattcttccgacggtcacttcactctcaaaaggaatttgggtcggaagagcacagagtcgggtcaatgtaaggtctgaatttgttttgttaagaccagggaaaccgtaccaaatgggttaacccattggtgccgattcgaacttcagttacatttttaattccacccccgactgacttgagaatcgtcggactgacttttcccttcctcagagtttcgatgtccgggagatatgccatggattgttgtggttgtgccatcgacactttctgctcaaatgccattggcaccgacgccatccagcgacaatcagtcattgtcctcattaaactctttaatgtattcacaggttttatcattgagtttggaaaagccatttatggaatttgtgacctgcaagggacaataacatatgcttgagttcttacatttcctggctaattttgaaaagatataaaaaataaattaattaatattacaaaagtaattgacttccaccatatttcttggacaatttttatttcggatgtcaaaatgcaaaacaatggattaaagcaatgtgagaatgaataatagaacattatgatacgctcttttagtgagaattaaaaacaacaaaatgatctgtcaaaaattatgaatgaatgaacaaatacagaaatattaaaattattcctttaattactcgtcgttagaatttaagccgtgaaacgattagacaatacgaaagttccgtcgccccaatatgaaagctgaaaagagatggaatagcttttcaactgctgtttttcacccacaattctgttcaattcgtggtggtcaaccagcgaaatggtctgtcgctttgcgccttttttcgccaaaagtcggtgctcctttttcggcacttggttcggtttgaaccgtctaaatgcgaaacttccttttataaagtcatcctataacaaagttctttttaactcactttaatgcggcaaaattatttttccctcgcttggccaattcgtccgcttggtacacgggctcgggcattgagaccgccatgttgacaatctaaaaatggtgcaattttagagcgcatttattcggctgtcccttttcacctgatgggaatacgaaagtgccattatcagtccctgcagttcgtccattttgacacctatttcgttctccaacatggcatattccaccggtttgccagtcccctaaataaatgcatttcaatttccattttgatgctttgcaattgccttgagtggcgcgtgcggttgcaaaaaacttaaagggcgaaatatttttttatattcctgtaaaaaatcgcacaattcggtgatgtccgctcggcatttttcttggatgatcgtacccgggtacagattttttgagaaaggtcgtccgccttccttcggctcttcttcgatgaaaaactttttgaagtgacgcttggtaccgataatcatgacgaactaaaaacggttcattttatgggttgggtcagccaattcggactttgggcttgtatttcgaatcgaactgtcgacacccttctttaatcgccatcaactcctctttacatgcctgaaaaggttgtaaattatgaagagcccgttcatgaacggaccatcgcaaattgaccctccgataaaccgtcccgaaagacaaaaatgtatttcgggcgattctgtgaaggacgatgattgtccaaattgtgaaggatccatttcacacgttcagtcaactttaaatggctcactcaaattcaccataaattcatttgaatcatgtgtcacctgaagaccgtctatggcttcgcgtctggcttctggaaataacaatttaaaaaacaaaaactaactgtcgaaaaccttgaaaaaagtaatcgcccacgaaactatgaggatctgttgccatattagcacaaatctaattttaaaaatatatataaaaatacaatgctgaggaaacaatcaaaccccaacacacgaagggtccagcgaactgagttgagactcgccctgggcagccaacatacgccgagtttgagcagacataggcgctaaattttggtttacaattagtatgacgacaaaggttaatttatatacttaccaggatgggcaacatcgtagccaagcttaattggattgatcaaattgtgcgatttgtttaaacaatttgctcaccacaagaacatcaccggtctccaacgcaaaacgtttcccggactgttcgatgataggcacgtaatttagtccgaaattcttcatattcaatttgttcagaatgttttccaaggtttggcgctggttcttttttaccacatccttcacgatttacagataaagagaaggaattgagtgtttacact

SEQ ID NO: 12953 - DNA, 1916 bp, Heterodera glycines
gaaattgtgaataattctcagaaaaatggttatctctttttaggacaattttctatctcgtaaccccgatgctaaatggttatctctttttaggacaattttctatctcgtaaccccgatgctaatccgttcctgagagcctcttcaaaattttttccattaccgtaagagctgcagaaattgtgaattaattctcagaaaaatgactatctctttttaagacaattttctatctcgtaaccccgatgctaatccgttccggagagcctcttcaaaattttttccattaccctaagagctgcggaaattgtgaattaattctcagaaaaatggctatctctttttaggacaattttctatctcgtaaccccgagtttgagcagacataggcgctaaattttggtttacaattagtatgacgacaaaggttaatttatatacttaccaggatgggcaacatcgtagccaagcttaattggattgatcaaattgtgcgatttgtttaaacaatttgctcaccacaagaacatcaccggtctccaacgcaaaacgtttcccggactgttcgatgataggcacgtaatttagtccgaaattcttcatattcaatttgttcagaatgttttccaaggtttggcgctggttcttttttaccacatccttcacgatttacagataaagagaaggaattgagtgtttacactcacaagggccttctccaacgttatgtgttgcgtcgtcactttgtgaatggcctcagaaagcttcaaaagtccatgggtgtctttccgcctttcgtccaccagcagtatgaattgaattcggttgacagtgcatcgctcgaacatggccatccattcttgatccgagttctgtaacggagtaaagggagggacaaggtttcttattgttgacaaaaatatgaattaaaattggtgtttgaccaacctcggggctgtcgaatgagacgatctccggctctgccatccgaatacctttgtccctgcccatttcgcacatacgccgcacaaaatctttgacgagattcgtattctgacgagcacagagcacaagccaattgtccaactcctccgcagccaaatattcagctcggctcgcgtctcgacgccactcgcccttgggaacaaataaatgatttcattatgtgttaacaataaatcttaaaacttttatcgcatccggaagaagcaaagtgttgcgtttgaagcgaatttgaggcaaagaacggactccgaccacaacctgacaatggacaaaacaaaataattcattttcatgcgatattctgtcatttttaaaagcgcaaatgcatgtttaaaatagaaacccataaaatttcagtttaaataaatggattgtattcgtttttctggtcatatgcttgccctattggatttttggtcgatactgagcccaaatgcacgaaggacggggttttcatcagtgaacaatccgagtgcccttgccctttcccaaatcgctttcattcgttcgtttggtggcattgaattgaagcgcaacagttgatccatcagcttagagtcggtcttttcccgcggaacacgcttaaagaaattcaaatgaaatataagacaacacgtaatgagatagacgatggcaaagaaaagaaaagttggcccaagttgtgtctgacttggtcttccatgacatccaacaattccaaagggaacacttcggcctttttccccgcaggtataggattattctgaaaattaatttgaaaatgacaaattatcatgtaaaatgttgagcgtaccggaataacaccagggaagtccacgaacttgagctggatcttccagaacttgaagaagtattggggaatggacattcgctcgggcggccctccgtttccctctccacgtcaatgaaaa

SEQ ID NO: 12954 - DNA, 1141 bp, Heterodera glycines
atgtaaaaattcattttccttagactgactcccaaattgctgaacggactcgagttcaacgagcgcgtcactgtccacattgtgcacaacggacccgaaattgaacacggcgatgtgagtttttgagatgggagggatgacaaaaatttaaaaaaaaaacaatttcgggaattccctttcaaaaccgaacgctctcataaaattggttaaaattccattactttgcccttttgttcccatttttctccgtcattttttctcacgggacaattgggcggtctttttgtcaattaattaattactaattagtttttacattactttcccccccccccccttacaattagcattgggatccggagaattttctggctggggccaccaatgggcaccaccagcagcggcagcccgagcacggacaacagcggctgccgggcggccgtccccggcaattcgtccgagcgacggcggaagacggggagggggaggatgaggacgaagggaccgatcactgatcagcggagaggcgccagaggcactgtgatcggcagcggatgagtgaggaaaagggaagggatgaaagagcgatggatgttgggatggctctgatcatcaatcactcactcactctttccccggggggccaatgtttcgccgtctttccgtttggcatttgtttctgtgtgttccctctccccattctctgccactttctctctgcctctgctctctttctttgcctcctcccatctcacaatggtttctcgatgtcacttattataattctctcccattgattgatctctcctttttttggcttttccaatcattttttcggatgactctaaattttttattaaattaaatattttcattactttatgtttatataaatacatttgattacacaaaccgtctaattttggtaacgctttcgacgtgggtgtgatgggttttgctgtccctcccctccgaatttcgcttaatttccctgcctttcaaatccatatggcaaacaaaagcaaaattaggcgcgaggggggggggcggcaaaaatttggccaatttttgacctatgcaatggcaaattgggtcggaggaggagaacacatttccattatttctattttttggctgtttt

SEQ ID NO: 12955 - DNA, 1338 bp, Heterodera glycines
  unsure (1)..(1338): unsure at all n locations
ttttatttttacctcatttgactttgacctcaattatttatttaattatttttcactatttttgtttttttaaaattcncgtgatcatccatatattttaatttgctttttgtggtggtgttctcggaaagcgttcgtattgccgggagcaatcgaatgccgcagaaggtggccaacacgccgcgcgagtgtgtgcgcgtgtgcacaaatttgttggtgagttacgaacgtgcagcagtgatacagtactttccataaaacgatataggaaactacggtattttttttgtaaaataatttctctctgacgcattttatgggatgtcgtttcattttcttctgatataaatagtcgagaatgacggattaaaaaatgggttccgttccgtgatcattgatcagttttaggcactttttacgtataatcttcatcgagtttataagatttaagcaaaagcattgaagtgccttctctgattttgtgcttttcctccttcagcgagcctttcacccttcgagaattgtgccgagtttttggcattctccgactaccgcttggagacggagccccgcgaagtctttgacggattgcccgcctcagtcgagggactgtccgcatgcattgagctttgcgtgctgtccagcgactttcgttaatttaaaattagcactcatcacagaaatgaaattgcccaagcttaaaataacgatttatatgagttttttgagatattttttcttacttgatcaagacctacattcttaacaaaaattatttccgaaaatactcgaaaagattaaataactttttttattcgaaattactctcgaataaattttattcaaaacttattttttaaacgagaaaaattctcatattaatggtcaaaatcaattagcagcatcattgataattggtttttcagcaataaaagagatggaacgagcgaattttcttttccacgtcaacttcataattttcaatgtgcccatcagaagctgaacaaatcgctaactgaaaattaacaaaagcatttagtcaaaataaatcgtaaaaaaaaagtatatattttttaatttaagatttagaaataaataaccaaaatttgagtcaaaaaatatggaatttaacgctaataataaacattaaaattcactgttaaggcagcactagcgacacataagccgtccaaaccacgagaccaacgacaaccaaaaaaggcatttcccttgcacaattttaggaaattttttccgaatgaatattcctgtttacgtataaacaaaaataattttggaaacgataaagttttttaatttaaaggctgacaaatgttt

SEQ ID NO: 12956 - DNA, 2055 bp, Heterodera glycines
agcgatcgactcaaatgagaatagggcgaacgaaatcttgaggtgttgggtgaaaatttggaatgtgtttgaagagtgaagtcgcttcttcgttcgaatttgcccaatggcgaacatggcccaacaaaattcccttctcttttgccaaaacgattggaattaattcgcccaatgaaggcaattggatgcggcgaagtgggtcctgagttggcaaattggtgaaaatgtcctccaacgaaatgcacgagcaagcgctgtgctcctccacgcctgagcaatgcgagctcaaagcaatcggcgcaacgctttctgaaaataaattctgaaaattaagtgaattaatcctgatttttccttttggttttccattttcgaagatggcacaaacacttttgcgtttttgcttagggaggaaactttcgtatgggatttcaactgggaccggtgacaagtgctcaattggcactttgatcggttcgtcgttttgcctatctattgggataacaaatgctgcagttggtgtgagtgttttgatcaggtaaggaccataataattccatgtaagttttttatggtcggttttcaccgacggacgaaaatagaccatcacacggtcaccggcactatatttccccaactgaacgttcggttttgaatcaaaatgacttttttgtacccgttgtgcactgttaatgtttttggacgcctcattcaaaatcatttcgtagttttctcgaaaaaactgtaaatattcgtccaaatctacagtatataagggatttggccttttcggtgcatcaatttttgatggaaaacggagttgtctgccaaaaaataatgttgatggcgaaaatccggtactttcgtttggcgtaatattgtaagaaaatgtgacataaggaacacgtaaatcccattcccagggacttgtgcacgttttcctcgtcatttcaattatagtccgattaagtcgttctgcaaggccattagcgttgggatcgtaccctgaggttgtggaccgggaaacaaggagtttttcggcgatttcctttaaaatggcattcacaaattcccctcctaaatcagaatgaattgtttccggggccccgaattttaaaatccatttttccacaaattcctgtgcaacagtttctgccgttttgttgggaattggcacattttctgcgaacctcgagaaatggtcaatcattaccaaacaatatttgtttccattacgcgttggaccgagttttaaaatgtccatacagactaattggagtggtctaattgtgacaattggatttaaacccgggtgattttttcttggtatacgattgtgagcacaaattctacaggaccttgaaaaacgttggcaatcagaatacatgttaggccagaaaaaatttaaagctttaagacgcttaaacatctttttcccgctctggtggcctgcacatggtcccgagtggtgttctatgagaagaggttcccggaattttgctgggacaaaaagttctgtttccgttttttcatttaagtgaaaagaattccatcatcgacattaaatcttccaagggaatccattaacctttggcgaagtttttgatcagttggtaagtttttatggtccaaaaactcaaagataaagcctaattcagaattgttcacttcttttacccattcttcttttggaattttttcgggcaataaattgtttttctgaaccaccatcactgaaattgtcacactctgattttcatttttatcacaaaattgaaaaggggcatcacttgggaaagcccttgaaagtgcatcagcgacataattttcttttcccggactgtaaataacttctaattgaaacggggctcctaattccatgatccaacgatcaacttttgggttaccaactgaatttttgcttcggaacatcccagggagtgctttatgatcggtgacaacaactgtcgggagccaagcaatgaattgtttgaatttttgaacggcaaatttaattcctaagcattccaaactggtggggccgtaatttgactc

SEQ ID NO: 12957 - DNA, 2474 bp, Heterodera glycines
cgtaaatatattgctctcgctaatctcggtaccggaactaaactaaactctctgacgatcaccgaatgcgaatttaagtataaccctagaaaattcaatgccgcagttatataatgcacagatcccatcaaagccacggcattattatgggaatccgggaaaatgatatgtctggggacgcaaagtctgatagactgtgaaaatgctattaaacaatttatagaaataattaagggctcggggtgtcctggggcttcttacaccggacacacttcgacctttaaattcggacgtgaaattgaactgaacgagtttcgaaaaaatcgtcgtgcattttatgaaccggaaatattttgcggtttaaatttcaagcggggtaaaagcatgacagacagcgttaattttctggaccggtaaagtcgtaattacgggaactaaaaacaattctgaaattgaggaaatgtatcatgatattctcccctatttgaaaatggctcaaaagaagttagggagacgataaaaaatttttcatttattgggacggtcccccaatttatagttctgttgggtatttattttgttatcgattacttcgcgcgacgccggctcgcggcgcaccggcggggcggagaggaaatgcatggttttggcaaattttcaaaattcagaaaaatcatcataaaaaaaatctcaggatttcatcgtaaaaatacacttaaaatatttaaatttgtcataataattgcgtatttttaattgttcttaaagcttacaaaatattcagaaaatttctttttatttatttcaaattttaattgttgtttttatattttgcattattaaatgattaatgacctttgcgcggcggccgacctaatgggcggcgggagggagggaggggcggctgacggagagagggtggtggagaggaggggcaaaagtgcagatcaatattggtcaaatttgaatttaatgatagaatagccgcaacatttttaattatgcggcaattaaatagttaacatttttattttgtaaggcggctgcttcaaagggtttggattgtgctgacaaatatcgactttattttatggcggaattcgggattgtgagcgggcggcaacttcaaaacatttaaatagctcgggattttggggaaatatcacgggcggcaacttaaaaatcccccaataggctcgagattttgcggtaataatcctaaggcggcaacttcaaaggaaaaacacccattcaataggcttgggattttgcgcgggcggcaacttcaaaggaaaaacaccccttcaataggcttgggattttgcgcgggcggcaacttcaaaggaaaaacaccccttcaataggcttgggattttgcgcgggcggcaacttcaaaggaaaaacaccccttcaataggcttgggattttggaggagtcgttccggtacccgcgccgttttggagccttatactactaatattatatattttaatataaataaagaaaggtgggaaaatccaagaaggactttgatataatttcaccaaaagaaataagttagattaaaaccataatattattggattttatttttggccattaaaattaagtcaatttaaataaactttttttaaatttaaatagatttaattcttctcaaaaaaagaagcctaatagcagtgaaaaaagtttcaagaagctttttccaacagcctataaagtgctaagtcaaggaacaaaaagtggagatcaggcgatggacaaaaaagtgcaaaaatcatttatctgatttttcctataattattttatcactttttaaattacaaatatgttaaaatttattaaattgatgctaaataaacattcttctaaaagttaagttgtatttcgaataaaagaataattaaaatttacttaatattaaataaaaaattttaatattttaaaattaattacaaatcgactactattaaaaaatgaactcaaattagaggaaaaaattgaaatatcctctttaactcaatctagattgatttggcctaagcctatggctaggctttattttgtaaaatttgtagacagcatttaatttcaaataataaaaaattcaaattaatctggctaatgattttgttaattaagtaaattctaatttttcttttattctaaatacaacataacttatagaacaatgttgatttatcattaatttaataaaaaaattgataagaaatcataggaaaagtcagataatttattttttcactttttgtccataccatgggtttttacaaagcataaattaaaagtaatatcactttaatataaaattagagactatttaggaataggaactaataataaataatattgttttgttatcaaaaaaagtaaatgtaataattattcattatgtaagaacttgaaataaaaaaaaatcaaaaataatcattgatttaacaatttctttta

SEQ ID NO: 12958 - DNA, 2064 bp, Heterodera glycines
  unsure (1)..(2064): unsure at all n locations
aatatagatattttttcttttccaagtattttatttgctaaaaattattttcaataaataaaattttcaaattcctaaactttcattttaatatttttgttaaacattgcccattcgtatagttgtagttctgaagttgttcaatttttgcataataattttattattttttcttgtttatttcttttttatgaaaatttttgagaatattgacttataaagtttttgtaataattgggtgatttaattattgttataataataaattttaactctatttaaaattattataaattgcttcttatttttcctaatcgtaaaattaaatttatttcagtcaggaaaattccaagatctttgaattacttttgcactttgatgcaaaagcataataatcaagtgtaaaatttatatttaaaattattgtttaaaaatgttttttgtatattgaaaaaaagtccaaaaagcaacttagatgcttccagtttccattaggttaattatttctattgtttcatgatgattttatttatattattgcaaagtaaatgatttagtaatttggtgcgatttattcattttaatcattttgttaattttgacataattactctttgttcaatattttttgcttattaattagactgtagaaaattacttttgagaatgttatttctttgtttcttagatatttttatttttaatttttgtaacccagagtctctatggtcgggacatcaaaacggcaagagcgaacgcccattatctggttttaatgcgtaacccttccggacaattacaagtgaggacactggggtcacaactgttcccaaaaagactgaattatttcatggatgcatatcatgatgcgaccaataatcaatttagttatctcatgattaacatgcacccaaattctgaggaggaatatgaatttaaattaaattaaaaatgtataaatttagctccgaagtgaaggagaatacagcattcctaaagaagcttgtctccaccagatcagaacaaaagaagaacgaattaatcgaaaacgctacagctgaccaaattttggcaatcgttgaaatttgtgcaaatatattgagttttagttttaaactaacgaacaaacaaaaaagaaggttggcacaatacgccgatttttatagagaaattgccaaatctcgttcagagaaaacggtaagaaaaaggatacaacaggggagtggtatagccctgggagctgtcttgatacctgtcctgagttttttagcccaacatttattagaaaaaataacatcatgaaatttgcaaagaaaatgttaatgattcccgaggcggaatatttggctctacggattgcgatgaattggctctataaagaaagacgtacggtaaaggggatacttgaaaatagaccacagaaggtggtgattgagaatcatgtacccggtccgaacgctgcaccatatctaggcctcaataaccaatccaaaccacaggagaccgatgaaccacggaaaataattattcctaggaaaagacttaaagagcaaactcctgatcctgaatcagataatgatacacttgaggagttaactccggaaccccaaacaccatccacactcaaaacacccgttccgaccaaaactattatacacccgacccttttaaacggtttttttaggtacgtgaaggaaaacaaagatttatttaaaattacggcggccggaaaggtacagtcgaacattgatactgaaggatccaacagtaaaagacattggttgataaatcaaaagtcatgtggggacgtggaaggaaaaaggcaataaaatctataaaaacacccggcatagtgcgagagaagaaacccttcaaaccactaatatgggcaagactgtagagaaattttatcgaanatttattttaatttaaaatctccnggcaagtntttgctggaattcaaanattnnttnaatgaggccaaaaagattgacccngaaatacaaaaccgatgacngttaataattnnctaaaaaagcagaaaacatacacgattcacaagcc

SEQ ID NO: 12959 - DNA, 1564 bp, Heterodera glycines
ttttttatatttttaatttagaaaattttcaactaaaaaaacaaaattgcaggtgtttttgatagcactctccaaggatatgcgtgtccaatttatgcgaactattcgcaaaacggtgttcttttgtaatggcaatacagcagcagcagcaacagcaacagcagcactgcaaacggtagccgactcataccagtacagtaaccgaatacggtatgtcaatgtccatgctactggaagaatcaatcggttcaatggacaatgattacgcagcagaaatttgcggaattagattattttttgacacaaattcttttgataattaaagagaattaattaatttacaaatttgacgaacaaagggctaatgaggacaacccaacaaactaatgatgtcgtacacttgtctcaaatatgtataaacaaaaaaaaaacaagaaaattaaaccaaatttattttaaaaccaataaaaagctaatgagttataattcaaatatttaagcaatgtaaaaaaattaaataaaataattaattatttaatttactattttcagaagtgtttttatgcttttgaagtaacgaataacggtcaaatttaattttattaggttattagaggttaaatattcatataaaagttttttgaatagattttaaatgtatagacagataggcatttttatttgtgttttttaaatacaatttcgtagtaatatttaaaaataaaaaattctattagttatatttgaaatccattttttgtaactttatagaaattttaatttttcaccgttttatttttcactttgacagatataatccaacaccttgtcatgcatgaaatatccaaattaatattttcctttctaattttattaataattatttaattaatattattatccatttttcgtcttcatcacattcgacacttttgttcttctgctgttgtttctgcttttccttgctttttcttctctgaatttttttttgtatttgtgccaaaatgattaattggaaaatgaacacctcaaactttaataaaagaagcgttttttaggtgccgtggacttcctcccttgaggaatgctttaaattcctaaataaaaaatgattttaattaaaaaatattaaaaattgccaaaaaattccaaaaaacctttgcacaagcacagtttgcttgacttaattgttcgcatcctgttgaacagctgcccgtacacagattcccatcccatgaacattcttgcaaagtgtccattgggagcaataaaagcagcaaagcgaacagcagaaattgtttggacatttttgattgtttaaattatattttttgatcaattagaagtgattgggatggaatggaaaagtgttttgctggaaaattttgtgaaaattctcaaaaatttaattggaaaaatcccaaatttggttggaagatgaagataaaatttaaaaaaataataattttgttatttattcggtctttattatactagaaaattttaaaaaattctcaaaaatttgattagaaaatacaaagttatttggcgcaacttggaaaga

SEQ ID NO: 12960 - DNA, 1640 bp, Heterodera glycines
  unsure (1)..(1640): unsure at all n locations
ataaattaaaaatgatgaataagcaatatattttgaattaaaattgacnaacgaaggaacgaaaatttctataggcatttcaaaaattttttaataaattaacgaatacaaaaatgattttttgaatattgaacaccggcaaatacaaagcaaaaaaaaagaaaagtgcaaaatgggcaaagaaggaaaagtgaaaataataattttttaaattaatttcatcggatttttataccatttttaaaattaaacgaataaaaaaaattctctttttaaatatttaaatttaatattaattatgttaattaatttaaacaatcaatgcacaattaaactccgtttgtcaaaattttgcaataaatttttccataatttcaaattattaacatatttgtctaaatccgatgaattgacagaaacagtaaaatgattgatttagtaatcggcaaaaaaccggtaattcatcaaaaaattaacgacatcatcagagttcggcacagatatttatgcttaaaatggagtctcaaattattatttcggtaatttattgaaaaaaaattaacatgtgtgaaatataattaaggtatttttaccgaatcaaatattgcattttctcatttttattgataaataatttagtaattattcttgaatctccgcaattcggagcctgtttatacagtagcaatttcgtaaaaaatttaggtttttgttttttaaataatggttacttgggccgggaaataaattgtggaagattttgccggtagatcaagtctataggctaaagaacgctgaaccctaaattatgaatgatcccgcgtgagaagtaaatgattaatgaatcatacagtaattttttaacttttatttttgtgttaagccttggaaaagctaaattgtaattaaataaaaattatagaaattaaacgaacaatttgctaaaattacaagcgaaatttgccgaggtaattagtggcaatactaattatttaattaaattagtaatttaattgttcctttccaccacttttcgaactcgtaaatgaagatggttgctccgccgtcttcaagcagaacaatttgatgttgtacttgccgaactttacaaccagtgtccctcggcacttttccatcgaattggcgccaaaacaaaacttggcactgtagcggtgccgttgtatcaaacggttgtccgtccctttggcatcccaacgctgagcagttacgtgacaagtgagtgaaagtgccaaaggggggaaggcatttaattcattaatttaatcatttgattaattataatttagaaaatagagtgtcgaaaactaaatttcaattttaattcattggattttaaaaaatcataagagaaactcactgaattttttcgttaaaatttaatgttaattttttaaaacatttttttattacacatatatcattaactaattttgacatttgtttaaaacaattaaagctaaaagctgaattaaaaataatttacaaaaaaggtttattcacgccattgaatggaggtcacaaaatgaattttgtggaacgatttgtgaattttataaatgatttgtacgattggttgtatttgaacaatgtgatggcttcgtatgaggtaagcaagaaaa

SEQ ID NO: 12961 - DNA, 1206 bp, Heterodera glycines
ttttaccaaagcaccccttatttttaaaatgattcatacataacaattagcggatagcacacaaaattaggcaaacattggatacgggattcgttattgccaaactggattaccaaaaaatatttcgagagtttttaccaagcacccctaattttaaaatggatcatacataacaattagtggatagcacacaaaattaggcaaacattggatacgggattcgttattgccaaactggattaccaaaaaatatttcgagagtttttaccaagcacccctaattttaaaatggatcatacataacaattagcggatagcacacaaaattaggcaaacattggatacgggattcgttattgccaaactggattaccaaaaaaatatttcgagagtttttaccaagcacccctaattttaaaatggatcatacataacaattagcggatagcacacaaaattaggcaaacattggatacgggattcgttattgccaaactggattaccaaaaaatatttcgagagtttttaccaagcacccctaattttaaaatggatcatacataacaattagcggatagcacacaaaattaggcaaacattggatacgggattcgttattgccaaactggattaccaaaaaatatttcgagagtttttaccaagcacccctaattttaaaatggatcatacataacaattagcggatagcacacaaaattaggcaaacattggatacgggattcgttattgccaaactggattaccaaaaaatatttcgagagtttttaccaagcacccctaattttaaaatggatcatacataacaattagtggatagcacacaaaattaggcaaacattggatacgggattcgttattgccaaactggattaccaaaaaatatttcgagagtttttaccaagcacccctaattttaaaatggatcatacataacaattagcggatagcacacaaaattaggcaaacattggatacgggattcgttattgccaaactggattaccaaaaaatatttcgagagtttttaccaagcacccctaattttaaaatggatcatacataacaattagcggatagcacacaaaattaggcaaacattggatacggggattcgttattgccaaactggattacaaaaaatatttcgagagtttttaccagcacccctattttaaaaagggatca

SEQ ID NO: 12962 - DNA, 3612 bp, Heterodera glycines
  unsure (1)..(3612): unsure at all n locations
tccggctccgcacttttgtncaagttcggcaaaaaattcttccgtatttaatcagcgggcaacacatgcgaaacagttgctcggcactatccgcgtaaatgtccaacattttcagcgttgccattgtttgtgctcgcactttggccattcgaattttgtgccactctttcagcttcggtcggtctttttcttcgttctttttagcgacatctaacaaatattttacgccaataattgcttcatatttgcctatttttgccaggtcatcctctgtcaaataagctttgtacaaatttcgcatttctttgtcttcgtttgattgtgctgcgaaaattaaaaattaattgtctaattaagcaaaaaaataattagctaattacaccaaataaatcagattacttacgattttcactgctttgaatcgagccaaatgggatggggttgttgttgatgaatgggaccaattctgagaattgtgccaaaagttgtaagactgagaaagtgccaaccactccgatgttatgagaatcggacaaaaacattttgaaatattccctcagataaggcaaattctcacaatccttttcaaccaaatcattggcagatgggtccaatttctaaacgaaagtgcactttaattaattgagaccggacggggccagcgcctgccgggttgccgagattaccgaacccggtttttttggacaaatcgccaagaacgggagtcctggaacacaaatccctgtcccggccattgataattgttaattaattacgtcgtatttaaattgtaattttaatttaattgcgtacgctcagtgtcgtcagtgcgcctcttttctgagctgcttctcctccttttgttgtcactcccacaaataatttaaaaaacattttcatccaacaaattttccgcattttttcatcgtcatccttcagcggggaaaacagttccaacccggccacttccgcttttaattgggccaatttgtccaccgatgtgtgatccttcacttttgaactcattgctaataattcaatttcttttattgaatttaaaaccgtcgttttgtgttggaaatataaactgtcaatgccaatttgccatttggcactttccgatggcactttctccaccaaaatggccttgtacaaacgcattaaaatctcatcggaacagacggacccttcttcaccatcttaacaacaaaattttgaattttgcaataaaattaaaagatgcttcttctttttaaaaaatgtaaacgcagagagttaaaaaaatgataaaatttgtcaggtggccccccccccgaattatgtttttattatttttaaagggatatatttttaaaattattctttctgtagctttattttgatgagaatacacgaaaaaaggtcatttttagccgaaaatatgtcgttttaacgtcaatatccataaacttcaaaaatgttattgcttttatatagaaaatatttacgttgaaaaagcatttttttcatctttttattcaattagaaagaattttcaattttatttttttgctctaaactttcaatttattaatattctacattttttcttaaatatttatttaaatatttccgttttgtaaatatatgtaaatcccagcccttcttataatgcaccattttcagctgatgatgattgtgaagatgaagatgatgatgataatgggaaagcacttaaatatgaaattgggtcgaaattttggcaatttccttcttcatttgtcgaaatattttcagggtcatcataaatgaaattgtaattcatcaacaattgcttaaatacttcagagtttccacaaattatttgttccagacgattttggtcaattttaatttctgaatttgtttgagttatttttatatggaatattaatgacaaaaacaattcaaagaaaaagttaaattaattttataattttaatattggcatttttttaaattttaaactcaaattctgactgataacaaatttgctgtcatctttttgatatatttttgtaattaaaaaataaaataaatattaatttcccctgactttttaaaaaatgctttacctttcaattgtgccgtaaattcagcttttctcatcagttctccaatggcattttcatgcaaaataaacaaaaactgcaaaaagttttccccctcacacaaattttttgaattaagcgttattttatcgccaaaaattgaatttttcatctcaaacaaaacaaggattagctgagtctcgttttggaggagctcatccactgaaagcgcttcccttgcgccgttcatcaaaagttccaattcggccaaatgattgtccaattgttcgctttttccgtcggcggaagggcgcaaaaggggcgcatttttcttaaagctaaaaacaaaaaaaataacataaataatttttattaaaaaagaacaaaattatttttaaaagtaccactgataaaagaccaaaatgttcagcaaatatttgaggcgtgtcatttggttttgttgttccgtttggacatccatatattttaggtaatttctgatttgaatttccattatttcttcgtcgttcaattctaaaaaagcttttctttttgtttttgcccttttaattccaaattccgcttttcctaccgatgcgtaacatttgcttcacttttgggtgtttgctgaccaatcggtcgtattcctcgtccttttctccgcttttccatcctcctccattggcatagaattgcctcactcggaatttgtcgcccctcccgtccaattggcactgctccaaaaagtggctgaacgcgttgcggttgtgggctccgctctcgtacagtctgaccatgttctgcgtgtgttgctcataaaactgtgcccgaatttcccttagggcatcctttttggcccaattcaaaagtgccctcgtcgtcgccattttctgcgcttttcctcccatttgtggcatttcgttgcactccgatgacagctgagccagccaatcgtggactaacaacaaagccatggtggaggagcttctgtcagcgatttcgattaaaacattgggcaatttgaggacccatttttgcacagaaagcacgaaaaaagttcgaattatatttgacacttctgagtttggcaggtgcaatttgtaatgggaataaatggtggagaagagttcgattattttggcaaaacaaaagcgcattgaaagtgccgtctccgccgttttggcatccgtcgcattttccaaaaacatttttgtgtattccgacgaaagttgagcatcgtccacaatgtctgtgatggcaaaataagtcatttttagtttttgttgctggcaattgcaattaccaaaagacagtgccaacgcattttggcgttccaactccaaaaacagcgaatgaccgaccaaattgcgaattgcatttttcaactggattatttcgtcgcattttgcttcatcgcgacattttttggccattttacgcaaaatgtatgtgaattttgtctcaatttttatttttgtttcatcaaaaaattccgtaaagatgattcattaagaattttaattgatatactcactatattaat

SEQ ID NO: 12963 - DNA, 1327 bp, Heterodera glycines
  unsure (1)..(1327): unsure at all n locations
ttcttaacaattcatcatttctgcttctgtttcacttggccgatcattgattgcatcacgaaacacgaatgtcgattcgattccactgatccataaagttccatccaatcgcttccttctcccattttgcccatttgctttcatcgcgcacaattggacaacggatcagaagaaaacggccgatatcgtccatccatttgaatgtcaattgctcccgagtcaattcattagtgagatcgaagagcacaacggaattagcaaaaggcggcggaaaacgaatgacagcgatgaaattgacgggagatgaagcattggcaaaagcctaaaatgagagggaaaaacagttaaaaactgaaaaattcaaattgaatgccgtacaaaatatttttgtcagcgaacaccaaagaccgtaaaaatgccaaataacataaaataaatggaaatcaccgctttgaagtcttcaatcctcgactcgaaatgcccgtcatcccaacgcaacaagcatttgaacacttttggcacatcgtccggacgtggagtgaaaagccatttggccaacgcttgtccatccgatgccgcggcactgtcatcgcatgggaattcggcgaagaaaccgtcataataggcattgataatgcgaagcgatggaaagtcgtcgagaattgacggcacgaatgtacgcaaatagcgaaaaattgcggcggacaattggatggcacaaatgttggtcgcgatcattggccaaatgttgcgcaaaatggactcaaaagtgtgatcattggtcgtatagacgtcgcgaatggtttaattaattggacaggcggcgaaaattggacgcaaacgatggagaaaagcgatggaattgttgttgaagcaggatctgtgaaaattaaggaatcgtttacaaataggaaacaacaaaaaagcatcatcaccttattaaaatggctttgaatccgacgactttctttggcaacggattttgcggaattgacatttcttttccatcgtaattgactattttcatttccttggtgccatccgcttcatattttggcaaaagttctatggatttcagcgaccatttgcgagtcttgaagtgttcatcgacgtaaaagtcaaatcggtgactgatcattgcaattccaaggccaagttgtgaaggcggaagcaaatcgaacacacaaagccaacaatcggcggagatgaaactgaaaaaagggaaaacaaaattgaaattggcattttaattttanattttacattgcttttgccattttttcctccgcttcttttcggcggtctgacattttgttggcgcaaatta

SEQ ID NO: 12964 - DNA, 917 bp, Heterodera glycines
atgatttttttgttggccgattcctggggacatggggagcacagcaacaggatgcaaatttcatgaaaatatcggaaatttttaaaaattttttaaaaaataattagtaatgtttgtacaattccatattccccaaatgaacagataaattctagaaactccaggaaattacctattgtcgattagggaaaatcctaaaaaaaactggggctttcagtccacccccaccaccaccctaattaggtaattattatggtgtttttgtcaaattgtgctattattgctgatcacgaacgaatctgccatttttcaattttactttgatttttaccgatggatttcggtttcaggaaatcacaaaaatttattcctaaaatatacaacagtcacaaattcaagtccgatcattcaaacaaaacaaaacaatttggcacaagcaatgtaaaattaaattaaaatgccaattttcgagtcgaagtgacaaaaaggcaacttattcacaattgtatttttatataagctctttttgccatgcctgccgaccaattttaacgagacgtaggaaaagccgacgaaagaaaattactctagacaaatataagtatataattgtgaatgaaataaaagtgcaatcgatcgaattataaaatgtgattatggatattatttctctcttaaaaatgtgatttggttgggaaatattaaatataaagctaaattataattagggccagcaaatataattaacatattaaaatagttatattattaattaattaaaatcattattcggtactgaaatgacccgcctcttctgatcaccactcatttgcctttttgtcacttcgacacagcaccgatacgacgaattatcgcattttggacttaatttggtgcaacatttggccaatgctcgg

SEQ ID NO: 12965 - DNA, 413 bp, Heterodera glycines
  unsure (1)..(413): unsure at all n locations
ttgcatgggcctggcaggtctggtccaaattgggcttaaaaattaanntcttttccttagtccacattcggcttaaaaaaattaatcttttaaaatgcaaattgtggctcatccctcgggatttgttcccgaaaagatgaatcaatgggtggtggtaatgattgattgctttttaaaaagtttagactttttttgccaatttgggtttttaattttgaaaaagcaacaaaatgccaaaaatgtgtttccttgtccaaattggcctaaaaattaatcttttaaaatgcaaattgtgacgtcatccctcgggatttgttcccgaaagaatgagtcaatgggtggtaatgattgattgctttttaaactcaaaaaaaagtgagcaatgaatgatgatgtgccggaggggggggggg

SEQ ID NO: 12966 - DNA, 3317 bp, Heterodera glycines
  unsure (1)..(3317): unsure at all n locations
tgcccatcatttcgttgatttgttggaaaaagttttattggcatcaatcntgtttatacacaatgctacgaaaattgttgaggaaaagcgtagcaccaattttcacaaaagattctctatgataattcaattaattgactgatcctaatttattttaaatggcttttatgactgaatgataataaaattattgggattaatgagattggctttgttttaaagggatggaaaataatttgtctttttaattttttaaaaataaataaataaaatttcttttaatagtcctattggcaggttaaaatttacataaaacccacacagccaagccacaattcagatagatgttaattggcttgaaaaagggggagaagaggacctaatcaaaaattcattgaatttttgtggccattgaaaaatgcgcgtaagcgaatggaaagggtttctaatccccgcaaattcaaaagaacaaaaaaaaaaaatttgtccgaataataaaaaaataataataaattgcttttgctaacaacaacaattgtataattagtgaagaattgctttgtcgataaaaattctcttggaataattaagaaattaaaaaagaggcgcttttgtttattatgcaaattttgagaaagacgtcaaaaatagaaaaataaataattttttatgaaaacaaaggatttaaaattgcactttttgaaataataaaattttaaaaaatggtaaatgagtaaaaatgcaattgaacggactaataataattatgtaaaaagccaatctcacataaacattagcatggattagaatgttgttttgattcagaattttggcggggcgcgggcgggcggaagattatgagcaaaatgtcaaaaaggcatttcaaatgggagacgtcagagggggtggggtggggggaggaagcggaagggtgccgactttgcccggtcgggggagggggagggtgccgactttgcccggtcgggggagggggagggtgccgactttgcccggtcggagatgagtcggcgatgtccccgaagacaaaaatatgggtggaccaggggggaggtggcttttttcattgccgtcgtcggcggaggaagcggcggcttcttcgatgcttttcctattcaaaaaagcacaaaaaatgaggaacctcgcggggggagaaaaagggggcacaaaacttccgcctgaattgccgcggtcagtcgctgacggatgctccgccgccttcgccttcggcacaggcacactaatggcatttcactgccactgccgggttagttgcccttgggtgagcccccacccccggggcataaattaaattaaatgaaagcaaagggaataaaaggggaagggagggagaagcagcaattggacacttcggagtgtaatataaacgcaaaaatgagcaataattacatatttgattagatgaaaaatggtaaaataataaatactaaatgaatgtataaattaattccaaaaatgttcctcattttttaaaaatttatataaattttctttttttttaaatataaaaatattctaaattttagctaataattgaaaagtattttaaaatcgattttactatgaacaaaaatacaaattcatataacttaaattataatgagttaaatcgccctttttggaattagagtgactttttagcactttaaaaaaccctaatttggcatatggaatgtaaaaaaatttaatgggtttcagtacatatttgaatatgacaaaaaatttgttaaatatatgaaagaattttgtatcagagtaaaaaatttttcgagtttttcgtgacggaccatgtaaaataataacaattttttgaaaaaagtataataacaaaaaaaattattgatttgacagaaacttttgcaatattttttcttaaaaaaatttaaaaagcatttttttcgatggattataagcgggcgaataattttgaagaatgaatggcctgcctgtgcctgtttagtagtgtttttttatttttggcatttttcgatcagttgaaaaatattttggcaatttttgggtttttagtagtgctgttcgagaccaaaattttacgagacgacactgcagaaggggagactttcattgtttggatttgaataaaagattgaagcatgacaaaataccgtcgctgaaatatcgatggcagaaaaaggtgcagtaaaaaatttaaaattttgaaaaaattaaaagaaaatattagcaaaaaaaacaaaaaattttcacggaattttttggtaatttcttgaaattcagaaaattttgttttcaataacatttgggttttcaaaaaaaaatttttttaatgcttcttgaattgaaatttttgaattttttgaggaaatgttatatcccggcgaagtccccgcgacgatttgggatgcatttgaaaaattttggtccctcgcctggtgaggattttgttaaatttattaaaaaacctaaaagattggttgccaggcgctgggaaaacaaaagcaaattattaggtgagtaaaaaagtattgaaaatcgagatccgcctcaaaaccccgagaccaagaacataaaacccgagacttttcttggaccgagacattcgtgcaattatttttgaaaaatttattaaccaagatgcaataaaatgtaaaaaattcgcctaaggatcaatttgaaattttctaaaaagtgctatgtttaaaaaatttttaagcttttaaaatttaattttttttttcaaaaatggcataaaatgaaaattattcaataaagcgtttttgctgaagattttttttttggatttcattcaaaaagattttttttgtaaaaaacgtcgttttaaaaaatcttttattacttttcgccactattttcatcattatttcacaattttttgccattaattaattaacaatttttggatttgtcgccactaaaaaacagtgccgaagtcattacaaaatgaaataaaactttaatattttacataataattaaaataaaatagtacggcttacaaatgatggctaatgaatggatgctaatggacttttccttttcatattagtggtcatttttgaaggtgtcggcaaatatttgctattttttgcacatttgagccgcccattcaacaaaataagaaattcataacagaaaacagaggacgncaagtgagcttatcatatgacagaaaaagaagcttatgcagagacaaaatgcaaaacatatttatttgttttaacaaattattctcattcaattgagtgcgcttttgaaacggaaaattcgggggggggggg

SEQ ID NO: 12967 - DNA, 3857 bp, Heterodera glycines
ttgaattccgcgggacgccttcgcccgcgcaacactttcggaagcgttaagccaatgcttcaggtgccgtcccagcaaaatagctttttattttgccatggaatgagaaggatttggcattttcttgactttctgtctcaaattttcgcgacttttgtggcgcagcaaaattcgaatcatcacaaaacatttgaatattttcacctttttctaagaacatttctcgtcgaaaatcctttctgcgtgatgcttcgccatttcttttggcctccgacccccagcggaagcgtttgttcgccgttccgcgcgcgcaaaacgatttggaagcggagccgatcagatggacttgtccgttcgatttgatcttccggtcctcccccccccccattatctccctttcctccccaattatctccctttatcccctcacattaggccccatttggcccatcttcgccctctttcacttttttcccgcttaaattcgcttctgtcgcccgattcgcaactcgacggattcgcagttgaccgaaatgtggccattttcactgaatctgtcgtatgcatttcattttttattttcatgccttttcctcatttagcgtaattcgcgcgacactttcgtttttgtggccaaattccgccctaaaagaggggccaagtcttcacagctggccgagtcccattgtgtgctcaaattgtcatatggtgccaaatttggagtgatcagcgatcagacactgaaagagctgagagacaaaggcccactcccatcgattggtacaaaagaaataaataattaatatattaatatttaagttattttaggatgggatgaggaaaagacataccctacggaaatgccaaaaccggcggaaaatgtggcagcaacgcaagacgaccaatcagtcgaaatcagttctgaaaagacgacgcatgggccacggggccacgtaatttccctgccgaaggcacaaacggcgccaataaaagcgacgacaaaggtcagagagatgggaaaatttatgaattataattggacaaaataattattaattatcgtaaattaattttccataaaaagaaagttaccgtcgatcgaattgagcccttttggaaggcagaagcaaagacagaaatgacgacattgaaaatgccaacgacagcagaagagaagaaaatgcgattggaagagaccgacggggaagaggaggagggggacggggaatggagcaacgattacgaacagtggcgagaccaaacggcgccggaggggcgccacggcgacggagtggcggtgccgttgagagaggacggaatgggtaaagtaaaaaataaaaattacctaataatcaattaatttattatttcgttccttttaaggccctgctctgtttctcgccaaaatgtcaccatcggcgggagacaaaagtgccaaagcaatgggacaaatgaacggcgcagggagagaagcacgcggcaccattacggcattgctttcatcgtcagtgcttttggcattgactattttgttttgatttaaacaaggaattatagccgtttttgcaatttgaaaaaagcccggtttttatatattttttaaatattttaatttttgttttttattttatttcataaaatttaaaatgtttatgaaacataaatttgttttgttctttaaacggttctttcgctgctccgtctctttaaatttaaactgtgaattccatgctgccgtccaacagcgatcgccgttcgtccatctgacaattttttatgaatttaattcaatttttaaaatgccgcccatttttgagtgttcttttcccatgatttaaatatcgtgccgtccccccccccaaaaaaaaattcttccatttttctattttccttaattttctcgtaaatttattaaattttcccaattacctagttgtgttttgcttatttccccaaatggcctctccttttacttgtccgttctccgctgctgacactgatgagcttttcctcccctccctttgcgttttttgaaaatttttcgtttgcgccgcgggcgaagggaaaacgaaaaaagacggcgaattctttgcatttggaatttgcagctgctgctgctgcgcgttgttctgagtgcgcttcgccgtcccttgcgcggcgctttcgcgcgtccgcgtcgacgcgtttggcgtcagaagggcggagccgggggaagtggtcggcgcattgagcaactcttcaaagttggcaataaaatgggcatttcgattcgaaattgccaattttgggaatgaaatcgttggcattcgatggaaagtgccaattttgaaatgccctccccaccaatgtccgtcttcagctgtctgatcaggtcgacgttgtccgactcgatcaatcgctcttttgtcatgtgcgaaacgattccacagccgaacccatctcccagcacattaacactcgtccgaattcggtctctgcaaattcataaagggaggtacaataggcgaatgcgtttaaatttacagtaaccaatcgacagtcaacagtaagctcaggtccttggtcggcaaaccaacagtgaccagaacgatcagaatggtatcaaggccaaaaattgttgtcattaaaaggaaataagttaagtttgtgtttaccagccggtacagaaccagacccaatggatgctaccgtagttgtcacactgtaaaagaacaaattgaacaggctcataattcaatggttaacctaattgtcaaaagttccaacgccgtcaatttgatgttgtgaagctgtgcaataaaaatgacagccaccgcttcgtatagtgccgtgccatcctacggtattataaatgccgttttcggaatggatgccaaatggtcattaatcatgccatggtgatcgttgcgccgagaggcagcacgaaccgagtgactcgccgatcgattcgcaaattttgctcgagggcacgaaaagtgacgggaagggtggcaccgctggagggaaaaacacacagaaaaaaagtaacagaaaattttgaagcccttttttcaccttgaagctgttccaaaagcggtggcgatagcttggagctgaaaaggaaaggcttttcgttttgaattagcgccaaagcgggcaccatgccagtcatgaattcgaacggactttggcgagtgatcgcataatacaaaagtggcaaagtgagcagcgagtggatcatcagcccacagatgacggtgaccacgtacatggccaacgcctgaagccttattggttttaaggcttaatgagaagggaatgcctgcgccgtttccgtcaaattgtcaatgtccaaaatatttttgcagaccaacgacagaatgccaattgggtagcaccacattagggcggaaatccaacgcattatcacctgggggtgaatttgggctaattaatggcctaattctcactgactgcatcgagcacaataaaaaagttggtcataagccgcgcctgttctccgagaatactcaaaatgacgccaaagccggtgcagaagacgatcagcccgagaacgttcacttcgttggtgtactccaaaatctaaaaagttgccctttcctcccattaattaattagtcaatttccaatttgctctcccaccggtttcatcaacggttcgttcgtcgtttggacggtcgtttgatttgtggtggaaatgagccaacggagggtaacatttaacggtggcatagcctccggcggaagtcatcgcgcgttgcgctggcactctcgtcggtttcaccggcacgtaattggtctgcatttgctggaaagtggcctaaagggggcgggcgagaaaaggctagacaatcgta

SEQ ID NO: 12968 - DNA, 4206 bp, Heterodera glycines
aaattaatataaaaaaattaaaatttattttttttaattcaaaatgattgatttattttcattcataaaataaatcaccaaaaaaaaccccgaaaaaaaacaatttataattagtaaagcacccaaaagatgaatgtaattgaaaaagaaaagttgttctatgtttcaaaaataatttatttaaatttagataaatatttttatgaataaatattaaatttaattaattattaatccaaatccaaaataaagtgccattgtgttgtgcaaatggagttcagcagcttgaagtgatgttgaaatgttgccatacaaatgatatccatttttgtccatcacacactgttcaatgatcacatttgggcccatctaaaaaaattaatttaattgattattaaaaaaaactattagcaataaattcatatattaaaaaaactctgaaacacccataaactctttaaaaataatttatatattatatgaaatttgtaaaaataaaaattttttttttaatatttcaaaaattatacgaaaaatcctcaaaatataacatcaacaaacaatttcaattataaaaaattttctttaaacacattgaatattctaaagatcacaactaaattaatttgtaaaattaattttaaaaattttatattaatttattaattaattaaatttttgaaattaatttttaatagtttggcacaaacttcgccaatatttccatatcgcaatgcgccccggtcattgttcaataaacgcgaaactcgcaacgaaatttcatccaccggcttggtgctgatcgatgctgttggcaaaactgcaacttcggccaaaaaacctggtgcaggtggcataattagggagacggataattggttgttaattgactatggcattaccgtaatcgccgtctgcggcggtggcacgcaaatgtatgccgagaaatgggttttgggttgcaacactaccggacaaatcagatgaagcattgaaaatgcgtaacagattggatgaactttaatatgtaaaaacattttaaaaaattttaaaaatatgtttaataaatatttaattaaaaattgtaaaaaatttaaatgctaataaaaataaatgtaaacattgccagacagtaatgatgagagtcatattggtttgaaaaactcaaatatttttccaaaaataagcatttttaatcttttttgtataaaatacaataaatgttggtggagcgggctcgaaccgctccatctcttttcacttcctttttggtagaaaataaataaaaatataaatgttgtggagcgggctcgaacctccatctcttttcacttactttttccttttattatcttacaaaaaaccactgagccacacacgtaaatatttctcttaaaaatctacttttaattaaaacaattatttgtcgtgtaaaatttgtggtcattgtcacattttcatttggtatactattcacaaattttgcgaaccctctggcgccgaattaaatgaataaatttaatataaaaaaaattacaaaaattttgtgcccgcataaatatgcaaggcgtccggcctcggcacgccagccggcccctggtagaaatttgcttgcaacagacggaagcccaacggacgttgaacaccaccaccagtggtggtggtggacctggaccaactgctgctgaacaccttcacacagtccactggatacgaatcgtacttgtagtacagtaggacacgccctgagacctgtgcatttattcgattaattattatttttatttaaatatattgtaaaagttgaaaatttttttttaattgtttccattatccggtggaatgaaaatgcccttcgaagaattaatgccacaaaaattcatttaaaattcacaggattcaattcgttttatccgttttagaaatccgaaaataggaaaaagtaattaatgattaaaaaaaaaaatttttaaagaacttttataatttctctataatttttcaaggatttaatcagggctaattcttcgttggcagcataaaattttaatatgataaaattaggttaattttataagtgtagaaaaaatctttacaatttccaaatttcttaaaattttcagtttttttttttataaacaatggggcggatgcctgttgaaaccgcgtattatttcaaatttttatggcgaaaccttccaaatttttttttgatttgtgcctgaattatattttattgttcgccatttctcaccttcacttgtttgctcattgaacatatgttaagcattcccggcacatggtacggtattgtgattgggccatacggtacacgggacgaatggcctgtagatgaagcagctgcagatgtactgcttgacattgagtcgattgtcgactgcgaaatgcataaaataaaattatattaaatttttcggatttttaaaatttaatgaacatttttttatagttcgatcacagatttaattggtcctgaaaatttaattggttaagttgttagttgttcattgcctccggcctcagaaaaatctacgaaaactttagcctcggtttaaattatacaatgtcaatacaatacaactcgttgtccattatcttcttcaccgtttcacattatctcacaatttaatccccccgattttattgtcacagaaaaaattgtttaaaagcgtaaatttgtaaaaacgaaaaattttacctatgttttttttcgaaaatttttgttttttgtttttttcttcttaagcaccgattaaattatccatcatccattatcttctttataatttctttattttcgcaattttattgtcaccgaaaaattgatgggatgaaatatattgtgtttccaaccgatttggacccattaaaaagcgtaaattaaaaaaaaataaaataaaaacaaaaaaatttagttaaattttttcaaaattttcacgccgagtttattgtccctgaaacattgatggtacaaaaattttttgtgttttcaaactaaaaacgtaaattaaaaataaaataacacaacttgcaaaaattttatttaaattttttttcaaattttacggatttttaattttttccaatttaaattttattcaatttaattgaacttgttttgccattgaattcaattcactttacctgtaatgttgtggccaaaatgttgacaccgatgccgcggttgtccgaaatgttcaaacggctcagcacaatgttgttgctcgggtggagcagctgcagcgcgtgcatggacgaattggtcacattgacattttgcaacactggcgcacgccgaatcacttgctaaacaaaacattaaattaaatttgattaaattaaatatttaaaaaaaaattaattaaacatttaatttaataaataataaaatttgatttataagcacacttaacaagtatcaatagttatatgggtgctatgacgttagtcaaaaaccatcaaaatgggcgttagtcaaaaaaccttcaaatgaaaagattttttgatataactttgctcagaggcaaccaaattttaaaatcttgatatcattcgatagccctaagtgttttctattagcctacaaaatttcaacaaaattcattaagtctcaaaaaaagttatggccaaaaatgttgaaaaaacttggttttctgagcttctcaagtcataacttttttcaaacttaattaatttttctaaaattttgcaagataatagaaaacacttagagctatcgaaaaatatcaagattttaaaatttggtacattttatgccaagttataaataaatttctgacaaaaaaattttcatttgatggtttttgactaacgtcccagcaccgattgaacgaattgctaccccctccccactcggccgatccttcggctcccacctggcatgaatgcagtggttgttgttgcaacggaactcgcccttgttgcacgcctttttggtgacgccgcacagcgcctcactttcgtcctcaccgccggcacaggtcacatcgccgtcacaaagccacacttttggaatgcattcatatttgggcttaatgagttagcatatttattaggggacgggacgaaatctcgccgccgaaatctcgccgccgaaatctcgccgccgaaatctcgccgccgaaatctcgccgccgaaatctcgccgccgaaatctcgccgaga

SEQ ID NO: 12969 - DNA, 1123 bp, Heterodera glycines
aaaaaatttttttccggaaaagcctgccttcaggcccgcagtgcacgtaattgaactgctcggagttgatgcattgccaatcgcttaatgtggcagtcagacgaagtgcacagctctccaaacggcattcaaagcctacaattgtgaaaacatttattaatttttaaatttgtttaaaacattttttcatattttttttttgaaagttggaaaaattataaatgttagaactgaaattatttaattataaaataaataataatttgctgaaaatataaattttttttgttaaagaagaagacaagattttgatataaaataaaaattaaatttgaaatttattccatattttttttcaaaaaataatattttaaaataaataaaattaagtttgaatttgttcaataaaaatttagtcgctcgaacaaaattcttgaaaaattaaatattttaaaattttaattaaattaaattttttcattataaattaaaatattcgaatcaattttaaaaaataataataatttaaaaattagattaaattaataatttattagtataaattaaattgctcgattcgaatcaaattttttcaaaaaattaaaatatttttataattattatttaattaatttacgctctccctcaacctcggcattctcgtggttccatgtatgtcttcagaatgcgcagttgtggattatagtcccattgtggtgtaagccaactgtaagcattttgcgggccaaaccctaactcacggcagaccacctgttaaagataactttttgaatttttgattttttttgcctttaggttaacttggactgatcagaaactgatagaataaaattgaaagtcagggactgatcaaacaatgtattgatcaaattaaaatagaatttagattattaatcatatggctccatctgatcaaatattaaactataatacgaatttcggaatgaacagtaccagtgaatgatgatcaatcaattatgaggagttaaatgcaattattattcaaatcactttgtctgattagatatttagattatatttctcaattggattcaagagctgatcactctagtagtgatcaggtttgactttaagtgatccg

SEQ ID NO: 12970 - DNA, 4732 bp, Heterodera glycines
aacgatgagtaacgaaattagtggggtgtccaacgatgaaaaggaaaactccagcttaaccatgcttaaatttgtgagaatatgagggaaaaatgaaaaaaatgtaaagcgacgaaaaggaaaccttaggcaatccacatttgtccacctaaagggaaggcaaaatcgtggtgaaaaaattttattttgaatatttgaaaaaatgtgcgtttttgacgaacctaccaaaaaaaaaatattttcttccgaaatagttggggttaaattaattaattaactttcaatatcattagcaatgtgtgataatggaaaaataaaattgctaaacaataatttcaaatctttactctttttataaaaatgtgttaaagaaatggatttgtttgacaaaaagttgtgttaaaaatttaaatttcaaaaataaaaattttagaaattgcatatataaattttgaaaatcaaaaagttttgcaattgttaaaaaagctccttagccattattttgatgtttttaaagtctaatcgggatttttacataattattggcattttttgagggataaaagccatttttggcagtttttaacgcatattttagtgcagagttaggcatttttcaggtttttagggcctatttatggatgtcagtcgcctaaaattttttatttttaaggaataaattttcagaaaatttattcctagattaatatattggctacattattttaacatataccaacgtagtttgccattttcaatccgaattttcattttacataatcatttaattgattttataatgaaaatgtttccaaatggctaatttgctctgtttttagttatgttttgaatataatgaagatatttaacatattaaagcggctttattgctgataaggataatacgcatttttaaatgaataagatttaatgagctgagtatataactttttttcttattgaatcaattttaataaattttcattcacttgaaagcttttaagtttatatttaaaaaaaaaattttttttgtcagtaatgcataataaatttttctaatgtaagtaaatccctgctggtttaagatcttctgttatcaaaaatgaataaaccatgctttgacaattcggcctttattttttgctgagctttacaaattttgggcacttcttttgggattaagcactaatcccgaaaacgagtcaaatgaccagaatggacaattttttaaaagcttttcgtttgaaattcattctttatttgttgctgatgttttgcaacttggcatagcggcgattacaaagaaaagaaattcagaggggggggggaatttgggagaattggaaaagctaaacaaaataaaaaaaggaagggaaagaaaggcagtgggaaatggggacggagaagggcaccgggggaggggagggcaatcgctgctgtttttctgctttttcttcttccactgatcagaatcgcttttcttaacgtcttcgtgtgccgtcctcgaagaacactccgccgtccacggcacagtatttgggacagattccgcgctctccggggtttccaggctgtccgggttggccgggctggcctggggctccgccattgcctggctgtcctgggcctccgggaggtcccttcgggccgggctgtccggccgcgccgggctgtccaggggctccaggctgaccgggctgtccaggtgcaccagcctctcctgaaacaaggcatatttcgttgaaaaataagcgaatgttggtctaccaggtgggcctgcaggagcgggctccgttggcggtgggcttgcgggttgtccgggctgtccaggcgctccgggctgtccgggttgtccgggctggccattgggtccaggtgggccgggctctccgggttgcggctgtcctcctccggtgccgggctggccgggtgctcctggcgctcccgggggtccaggtgggccattgttaccgggctgaccgccagggcacggggtgcatggaggctgaacatgcaatgattaatacaagttctagacctcctggaactcgagattgaacccgcatttaccgggtgcacttgctcgcaaggcgtctgcggggtttgtccgggctgtcctggtgagccgggcgctccggggtttccgggtcgtccaggctgtccgggttggccgggttggccttgggcaccgccggagcaacactcttggcagctaccgtatgcgctacgcgcagtacggtttccggcgaccagcagaggcattcccttcagctgactgacttcggaccaaatgtctttggcattgtgctgaaaatggcacttttagcacttcgaactttgtgccggattccttgcctggcatgagctgagctcagagtccattttcatgcccacgttggacacgtaactcttcagcattggcagtgtcaagcacaccgacaaaagtgagatgatggagaaagaaaccgtcgtgtaagccacgaaacggtaagctttgacacgcccttcgaagtcggccatttttttttgcaaagttttctacctgaaggggggtaggaaattgttaattggttgggacaatgcttaatagtgagcggtgcggcaaaaaaaaggtagggaaaattaatgagattttcttgaggacttttgggatgttttaggaaatataatttgggtatgctaataattgcttcttgaggggccggctgatttttctgttcgaattcaagaaagctcaattttcggggtccgttatgaaaggaatggggccgggtgcctttttgggtgtaattggaaccattttcaatgagtgagacggcatcaaaacctgattaaaagactggacaattaattaatgataattattgggggaatattgagacataaagtgaaacttttgtttgaattgacgagactccaattgctaattggaatatgatggaatatgactgttcattccaatgagtggtgatgatggggtggaggaggcccaatttataggggtgtcgcgatgggatggggcgggggtacccttttttccggcacataacaaatggcctcgggcgtggggacgggcagggaagacgtgcccaacggcaaatgggactggcccgacatttcatttcgttggctgttctgctgctgatcacagttcggtcgtccgtccgtcgtctccccgccaccaatttttgggggtgtcactttcgcttcggcgctgtgtccttattttttttgccctttcccccatttgattgtttcgttttttaacttgcgcaggccttctctaatgcagcattttaattaataatttttcatcgttcaaaaatggaaaatgatgataattagtgattgatgaaaaataattttatgaatattaagacggaaacgtaaaatgatgatttgttaattgcagtaatttaaacacaaaaatgcattattatatgaatttattttaattttttcattatataaatttaaaacatttttaattttaaaaataatttttcaattagttgaatttttagtttaattcgaaattttgcgattggcctttttgggacaaacagatttttggatctcaatgttggagcctgcctgatttatgagtttgaaatctcacattaatggatttccatttatttgtaaggaagagttgtggttggacggttaaaatggctgatgagtgacattttgccatcggacacttcgccacccgatatttcgctatcaaagccaaacccgaaatttttaaaaataaaagaaagtgtcaaaacggcacctgaaacggcactaaaaagcgccaaaaagacataaaaaactttcgagatacacttcatgaaaaagctttccaaactttatctcattgcaattttttgagaatcattaaaagttttgttcgaacaccagacacagatttgaacaaattgtcgagagtctaaattttcgaatttagcacttttggtctaagaacggcttaaatgatacaatgtgatacaatgtttaattgcacgattgatgatggcttccgtttgtttccgtgtatttaaatcgattttgaaccccaaaatactgaaatcgaaaatttgaacattcaaatacatacataagttatatgtagaatttattttaaaatattagtatcactgacacatttttactgatgcatttcaggtgccaatcatttttgtgaccccctgaaattttttttataatattttttctaggttaattttatggaatttatagaaatgggtgtcagattttcgataattcccaggttttacacacatttttaaaaatgttcaattatttttcgaaaaatgggggggggggggaggggacaaagaacactattgccgacgacaatacagtagtttactggtcaaaaaatttcacaaaaaggataagtacccattttccgggagccgtttttcctcttttagtttctcggacaatttcgcttgaattcgacggcaatttgcgacttttttttactgaagatccgccccttatgtcgccggcacagaatgccaacgcgaggagcatcgccagcgaatgcagctgccatcaatgaggcatttggcttgcatccctttttcgtcgcttttttgatgattcagaatttgagcgattttttttataactgtgagaatgacaagtttcttggctgagtgccaatcatcgatagtagaaggcatttattagcggtaaatctcttcgctgtgatcacgtg

SEQ ID NO: 12971 - DNA, 884 bp, Heterodera glycines
  unsure (1)..(884): unsure at all n locations
ggcggcattcgaagtntggactaatagatcgtaggcaactcccccgagttgtgcgaattgcggtgacaaatttccaactcgtgctaatggtcgtggcaattttcgaagtcgtgctaattgccggagttgtgttaatggccgtggcaacagttggagttgtgctaatggccgtggcaactttctgagttgtgctaattgccgggattgtgctaatggccgtggtaactttctgagttgtgctaatttccggagttgtgttaatggccatggcgacaattggggttgtgttaatggccgtagcaactttcggagttgtgctaatttccggagttgtgttaatggccgcgctaacagtcgaagttgagctaatggccgtggtaacaacagttgggcaccgcgtctcgctcaggttggccactttctttttaatctccgccaccgcttttgccgtctcacgctcaatttcctcctcgcgcgtgtgcacctccaaaatggcaacatggcgtcggtagtcctcgttgatcacgcacttgcgcttcacaatgtccaactcattctccgcttgtattaggccatggcttttctgtaacatgaaagcgattagggagttaatcaattgatcatttggtttaaaaacggttaaattaggtgagttcattttccggttttggcaaatgcctgtgccattgatggctgattttttgataaaaattttttttttttaggtataagaatcggcgatttgatagtttttctcggcgcatgaaaaaattaccaaattgaacaagttttgctgaatgtgttgcgaaaattcatcccgggacaggaaacgctaggaggaattgcaaatgcaacgataatacaactcgtaagtgtggtggaga

SEQ ID NO: 12972 - DNA, 2968 bp, Heterodera glycines
gatttgatagttttctcggcgcatgagacaatttacaaattgatccagtattgttgaatctgtagcgaaaattcatgccgggacatgaatcggtaggaggaattgcaaatgcaacgaagcgccaactcgcaagtgtggtggagaaactgttcacgcgagtagaagccgcccttgcatgagaagcagatgaacctgaacactctttctcaattggacgaatatgagcattgatttttttatggtaccgtaattgttaatacagtaagaaaatgtaggagctttgtgagttaagggacaacaaaggcttcactccttcagcatttttttgaaaaaatttacaaaaaaataataatttgaaattgaaaacttgtacaagcaaggtcgtatgcaaaaattttttttatagaaaaaacttggaaaactttaaaatatcctatttttaatttgcatacttttaaaaatattttaaaaaatttttaagaaaaaattcgggttaaaaaataataaaatggaatgggcagagcacagcacacacacagaaacgcaccgatcaaaaaccagatgatgcttttccaatcggtgcttaaccaattgatcattattgttttggcgacaacaattcgtcgattcgttccgatcactcgacgcaaaagtgatagaagcaggcagcgaaggtgatgaggacgacgttgtcgtacaaacaaagccacagagaaggcacacattggactgggcacattcgtagaccatgtgacgaaacattgcggcactggcacggtaccgttggttggccaaactgaactggatgaagtagtcacaccaagggcattggacacgatccttctgtgtaagggggaaaaatgtaataggtaaaactgaggaattgatttaataggcagcgatttgtcggttccccgctttacgtttctcgccgaaaaatactcaaaaaaattttttagaaacgatttcaagaaaaaaaaaaaatcccagcaaaaattttccaaaaattcgattcattcacctgttgaaaattcatgtgaaattcgatcaaatgtttcaagaaatggacggggtggtcgaaattgcgtcgttttttcggcttattctcctgctgctgctgttgtttttggtcttcctccatctgttgctggtcctcctccattttattgttgctgttttgtggacaaacagtgcactgtttccattgttcaggatgagaacggagatgacgaccgaacgagtcgaaatccttctcaacagctgtgcacatgaagcagacaaaggtggaggagcatgctgcaacacaacacaatgcttcattaacgaatgccaggtcattgaacaactcgaaaccaaaactcaaaaaatgcgaaattcgcccgtccatagattttttccactcataaattcaaaatttcatacatatttttatgggaagatagaatttttaaatgtcattttttagtttgagttaaaaacgcactgcgcaccgtgtccctctttaatcaatcaaaatgcatggaaaagcccccccccctttaccggcagtaacagggtgtgccgttgtgtatctcgatgatggccctccacttgcgtgttgctgctgctggtgttgttggggttgttgctgcggttggcacttttgctgttgctgctgttgtggattaacagtcgctgctgttggcgatgccaacaacgcctttttctttggcctgccccttttgcgatggaagtgccgttccatgcccttcatgattacttcaatttcgtcgtttgcgattgcttcgtcgtttggcttttcctcctctttcacttccaccggcagcacttcttctgctggtggcacaatgctgttgctacagctttggctctcctttttgtcctcatcatctttttcctcctcctcatcccgatcaacttgaaaagtaagggaaattttgtatttaaaaatgattaaatttaaaaaaaagtgccggcgatgagccccattctttgactattcagatttgtgagtacattttcagattatttgaattgggatccaagtttttttaaatttttctttaaaatttctaaatttcaaattcgccaaggaatccgtatcgttcaaatattattttttcaaatttgaattgactcatcatttaccctttgacttccttcgcgtgtacgaccgcttccgccttggccattcctcctcatcctcctcctgcgccttcgtcttcatttttcgtcccccttttttcatcgccaccgtttttcctcctttcctccgtgccccattcgcattcattgccaattccatgcttcgaataattgcctccaattttgttggccgtcccctcttttttgccatctttttgggcgacgaacgtttttttggcccatttcgaggcaataatggcacggcaaaagcggcttcttcccgatggtctgccaaactgtcttgttcattgttttcctcctcttcgtcctcctccatttggtcagcataatgaatgattgtggtggtgctacttccattgtccctttttgtacgctttctcgtagaccgtctcaacacatttgtcaaaaatgactgatcatcaccaacaccatcattgtcatcatcgccatgaacatgccgattttgttggccatcttcgccaatctgctgctgttgctgctgctgcaccaccaccactttttgctcttcttcttcctcatcatttgctactgccactgctccgtttccgtttgcttttccatgctttttcaccggtgacgatggagcattgtgtagtgccaccgaattatccaccatttgctgatcgcattcggcatcaccaccatcttcatgatcatcattttgcttcacttcatcatgttgatcagacaaatcgttgttgttatcgtgctgatccatgactaataatggataattgtggtctttatcatcatcatcttcgctgatttcatcttcctcctc

SEQ ID NO: 12973 - DNA, 905 bp, Heterodera glycines
tttattttttaagcaaatttgtcccaaaattaaaatatatatatatatatatatatatattatattaggaggaaaatcacgaattgttttttgaaatgtattaatatttttgggattatttaaaaatggataacaacagaaaataaattagcagcagatttttaagcaacattattgtataaatacaaggacaaaaccaacccatggagaaatacaacccaaaattttgtgacagaaataaatttcaaaattaaaattgatggttagtgaatgttaccaagaaatgttttactaaaaaaaaaaaatcggactcaccaccatccgatgttttgtcaagggatgaagcggtgccgccgctcttttcagcctcgttgcaacattgtcctccttcttcgtctgcttccattgtttgcgtttggccccgtcgcacgtccatcggttcctccttcaactcctcctcttcatcaacaatttgtcgtcgttgtccccctccgtcaatggtggtgccgtcggtgttggcattgtttttgttttttgatggcatttcttgggcaccaccatcgtggtgttcaacagcatggacaaccagcgtagtgtacagagtgtcggcactgatttcgaccgggcccaactggttcagtttggcagtgccactgcattcactttcaaactccgacatgcattgaggcggttggcctattgtaggaggaaagcgagtcaaatgagtggttgttttttttaatagagcaaaatttcggcattttttgatttttttttttgggggggggctgaaaatgccaatttttactaaaaataaatgatgtcaaatgagtgagtttgatttcaaaaaatgagctaaatttggcgttttttgactttttggaggccgaaaatggccattaaat

SEQ ID NO: 12974 - DNA, 4912 bp, Heterodera glycines
aaaaaaataataattttttatttcctttttttgaaaaaattttggagtttacatgaaaaattgaaaaaatgcttaaaatatttttaaaaatattagaaaatccaaacccaaacatattttttccgatatttttttggaaaatttctcaacaaaaattcaagaaaatcaaaaatacacccttaagaatcgacctaaaattttcaaaaaatacactcctaagactgacctaaaatttaaaaaaacaaaaattggggcaatggtaaagttctgtggtttcttcgaaaaattatttaaaaatttaagaaacacattttctaggctggaaaaatgtgctgatcacgactgacggattttttgcaaaataatttattttatttatgattttttatcaagtactagatttttccaaaattttaagaaattagtcgggcgtaaaaaacacacatgttgtatagctcaaaaagagctttcgagtgagctattgaatgtatggagaagtcatgtttttagttatttacgattttttgaaatttaattactagcccttaaaggtcatatgagacgggggtctggggttcgagcctgcttggctgtgtttattaaatttttaaacttatttttcgaagaaaccacaaaacttattgccaaaaatggtaaatttctcaaaaaatcatccctcaaattttttttcttaacaaaattatgtcactattcgtcattattttggacttttcgccattattttggcatttttttagcatttttattatttgtttttttttttttgaaaaaaatggtttgataaataaaaattccatttatccccccccccccgggtggggggggggggtaaatgcggacggggggattattttctaacccctcagaaaggggggataattggggacggcgggattaatggagacgggggggggataaaaagagaaaatacggtatgtagaatttttgattttatgactatgcattcatttaaatcaatatattttccacaaaaaaaaattccaaaatttaaataaacaattctttatttatactcaacaaaacattaacgaacagcatttaataacccgaaataaaaaaatgattatccaaaaaataaataaataaattattcatttaatatgtaattcattcaaccaaaagatttgtctattatgtaaaaaaattttaaactattcttttgtttaggaagctgcaatggagtaataaataaatttatttaccaaaactatttttaaatttaaattcaaactaattttaagggctttcccgaacacgagactcagcaggcggttgggccttcacccgtttctcgtcttagcggtggtggtggcacaccaatagcgactggcgaattgcgccaacgacaaattggcagtgccgaactgcagcagccaacaacggcacccgctattctcggattgaacacgaatgtgtaaaagaggaaaagaaattgaagaatgccattattatcgcatgtttattaaaattaatttttcattttatttatatttttgtaataaatttagagtccagattaccatatatttttgagcatttactttaaagaaaaaagctaaaaaaaacattcgaagttttggtcttagaacgacttttttgctcttttcattttttagggagtttagcacataaaatatatttcggagtctaagcatcttttttttgcttctcgccaaaaattaaaaaaatgcattaaatctagaaaatcttgtttgaagcaaaaattttcgaatacaaccgtaacaaaacaaaaaacaacaaccatggccaagtcttcgttttcggagtcaaccatatgctgtaacaattcggctgactacgaaaaggaggagtgcgaaaagaagaaaaataaatcattaaaatattacaatttacataacctaataagcataaattggatcattgaattttttcccgaaaatgtgcccaaatttgatttccaaaatatagaaaaaaaacaacattgatggggtactgatcaaaaagtgaatttaaccaccgtgatcagcatccgccttcatagcgacattaagataccaaaatttgagactctcatcaggggaattgggtctgccctatcaattgcccgaaattgtgaatgtgcgcctcagtagctaaatggtagtttctcaagtaatgggtggacgagtgggttcgcttcccacccgaggcctaacattttgcctatttctcattatagtaaactctaccaactaattattatgatatagtaaatcaccatcgcctacaaatgcaatttgcagcttctactcaaaaaataggcgtataaaacggagaaaaacctcaaactttgattaaaaataatttttcgataattgttttcatcaaaatagataagaatatacataaattcattaactcccgcgggataaatgaaaaataatttttttaaattttataattataaatatacaaatttaaacaaacaaattttgtttatcgcaaaaaattgttattttaaaatttattaagtcaactcttttttgtttatgaagctgcaattaacaagcagttaaatgttcgcctgtttctccccaatcgagtactaatgagatgattgaaaagtgaatgtcattttcggacgctttaatttgttcatggtaaatgaaattgttttgaaattcggattaaaagattttttattaaattattagaaaattttccagaagaattttgagaaaattcgcaatttcgcgttttttggaatttcgcgtttcgcatttaattttatttcgcatttttgctttctcaaaattggcgtttcgcattttattaagaatccttgaaagaaaaaaatttggcgattcatcaattcgagaaaatgtaattaacttttttcgcctagtcaaattttataactcatatataatcaattgctcttatgaaattcaattttcattgaaaaaaattaagcaccaaaaaaattggtcaacttttttaacatttgttagcacagcttaacaatgacttaattgaaattcggcggaaactcttctccaccatttgaatgaacgtggatttaaactgcaaaaaggtgaacaaattttaattagataaagtgcataattatcggtctctatccgaaaattagtgcattatttaatggcaaaactcgccaacaaattcattcaaaatttttttaatttttaaaattattttctaatcattaatatttaattcctaattatgttttatcaaacggtgtgccttcttttgctgttgagcgcatcgaatgatgttgcggtttttggacaggaagaaacaaccacaacatcgactagtagtacaagtacgagcacaactagttcaaccagtacatcgaccacaccaactacaacatcttcaaccagtacatcaactacaccgagcacaacaacttcttcaaccagcacatctacatcaactacgccaactacaacttcgtcgactagtacatcaactaccccgacaacaacttcttcaaccagtacatcgaccactcccactacaacttcttcaaccagtacttcaaccacacccactacaacttcttcaactagtacatcgaccacgcccactactacttcttcaaccagtacatcgaccactcccactactacttcatcaaccagtacatcgaccactcccactactacttcttcaaccagtacatcaaccacacccactacaacttcgtcgactagtacttcaactacatcgagtacgacttcgtcaaccagtacatcgtctacatccagtacaacttcatctaccagtacatcaactactccgagtacaacttcttcagcaagtacatcaaccagcagttcatcatcaaccacgaccaaaccatcgtctggcgatagtggttctggagcgtccaccagctgtaccaacgcggctggggacagagcttgcaatgcttacaaaaatagatgcggccaattttcggcatggctgaaaaagaattgtgccaaaatgtgcaatgcatgcacgtcatcggacagcagcacttcaactacaacctcaacgtcgacgtcgacttcaacaagtacctcgtcaactacgaccaagtcatcgtcaggtggcggttcttccagcagctgtaccaactcggctggtgacagagcgtgtaacttttacaaaaatcggtgcaatactttggcgggatgggtgaaaaagcattgtgccaaagcatgcaacgcgtgctgaggatgaagaacgctgacagatgaaaatgagacggaatatgattggggaaaaattcttttaattttaaaaataatttaattttaacatcgtttaaattctgggcataaagtataaatggtatttttgaataaataaagtatgtattgttgttaactttttttagaaaacaacttagagaaggaaaaaataagaattctaaattaggtgttacctgtcgataccaccgggtcctcactactctaattattttatttgaaaaagagtcagcgaaaaatgtaatgaaaaaataacaaagaaggcatcccagtaaaattatattttttataattttttattaaaaaattgatatatggtgatagaaaaaataaaaaagaaaaatattgcgatttggagaaaattcaaatttttatttaattcccgggagggaaatgaggagtcaatgaagaattaatgggaaatcagcaaccagaagaacccgtcgaaatggggccagaattgatcaatgagccaattcggcccaaggccaaattcagatggccgaaaaatccgcctattcaaattcaacgggctggcaagacgccccgagcatcgacattggctccaacttatttgttgtccatggtggcgatttccttctttttggggcaccggttgccga

SEQ ID NO: 12975 - DNA, 1214 bp, Heterodera glycines
tcctcctcgtcaagttaatgcgttcaggcacagattctaggctcggcatttggagtctgcaaatcgcaatgtcgaatataaatacgtataaagcagttccagaagcttaaagattgagtgtggaaagaaactaacaacacgagtgtttctgttgcattttatgaattcaatcaactaacaaaccttatttattgtgtgctgatttgattatttcaacaaccctaaatttttggtttctaaaaagcactaattgtaagagagtgcagaggagaaaaatacatttcttattttggcgtacacttttttaatgttttggacaaaaaaaaaaaaaaaaaaaattaatattgcgcaacggccgctctttgtccctttactatgtactatcttacaaaaaccattccgcacacatgcaaatcttttttggaacttgaaagcaaaaattgaaacgctgtgtcaaaggtgacaaaaaaagaagacatttacaggatctgttattgttgttttaaaaggactctgagaataaaatctaaaaatgggaaccaacttaaggaatatgaaaatgcattcgcccagaatttccattcaaacaaccgatataaaatgtaaaaacacactgtttctcttctttaattccaaccataaaaatactagagcaaacaataaaaattagcattatagtaacgatgccaacatcatctttttacgccattttggccaattctttgcctccatccgccaattcaccaactcatccatcaataatcttcgccacggctcaccacttctttgcatgtcggccgtaagagaatggtgtgctcccattgagccgtgtaacagcctttctgtagaaaagtgaaaaaggcgttaatttgccatgggatttggacctgatcacagagcggaggataaggcgcaacaatgtccttctctgaaaagtttttgttgccaaagtgtgcaatagaagctattacaaaccgcaaaggtctctgagtgacatcaaatatttggtttcgcccagtcggtccaaccaccggcgacaaaatgccaaagtcccgaagttcttgttgattgtggcaagaagttttttgctacgcgtgagtctgaaacgatttagcttatacaaataaaaacccattttttacgcattggattaacacttcacctgagaggaatgtgctcctcatggagggcgaatttctcatgtaatgactggt

SEQ ID NO: 12976 - DNA, 3831 bp, Heterodera glycines
  unsure (1)..(3831): unsure at all n locations
tcacaacgtcggagggtccaagcactgtctcatcaccggcgttgggcgtgtagtgagcggcgcaatgattaatggagcacccggtcgggaaggccaggccagcctccagtcccgactcgttgatcattcgacgactgtgcgcttcaagtcgctcactgtgatgcaatttttagcaaacaaaaacattaaaacaagaatatctaccaaatgtcgatcagcttcatcccgggcttaatccatgacttcacgtactttcgcgtttgtctgtgcgattctgcagcacgtcgaaaatcgttgtaaatctcttcgtaactgctgtccaaagcctttttctcttcgctggtcatccgattgatcgccgttctgtcgtctttgtcacttcgatactcgcaaatctgagcgtacggttttggcatttttccttttcagaaaattatacctgtccttgggggtacttgtggtccgtaaattgctggtcaatcggtttgagtgcattaatcgccgccgtccaatcctgggcctcttcggctttttccaccgcaccatcggcctcattttcagcatgtttttccgtgctttgaccacttgcacctcctaaatataaaactcaatactttaaaaaaatgactaaattccgaccctttccccttttcttggccgcctttttgttagcttcgttcgtctccaactcaaagtctttaaggatcgcgtcgatgtcatcagcatcgccagctgaaagagcaacaacatgacaaggtttagcctatggcaactgaacaataacccgtattctgagatttgctcccggattttttgttctttggcattcctgaaccaatatttgtctaaaagcggtccataaaagcaaaaaatataaattgaaaaaatatatagcaatcaaatgaatatttaactacgacaaaaataaaatagcagtaataaaaattttactcggaagtgaattcagtaaatacagacaaaaaattaggatggacaataaaatcatgaatcgtttcaaaattgttttcaaagtttgaaaagagtttttcaatcgcttcttttctcttcgccctgatgaagcggttgttaaagagcttctttgccgcgtaacccatccagtacatatttgtttggggccagaatgaggcccaatcttcgctaaaaatattctttatgtaaaaaaaattcgtttctctccacctgaccgccgccttcatcatcctgtagacgtcgtattggtagtcgccaccattgctgacaccattttgctcgaaaaggcccgtgtcttggctgagatcaacgaagaacagaacaccctctggttttgggaaaacaaattaatgaaaaaattaaagcgctttgagaaaaatttaagagtttactttttttcatacgcgaaatagaaaagtctattattgatgcgcgcaccccattcgagacgacatcgattcgttctcctcggtacatgtatctttaacaataatattagttcccagtgtattgcttgtgctgcttaccgaattttttcgttggccgggcactgctccacgagaatgttcccggcgtgcagatcccggtgctcgaactcgagaacgtcttccgcgatcgccagggacaaggcgatttgatggaagatggagtaacattcgcggccattttttatctgcgaaaaaaacttttcatttcaattttttttgaaagctaaccgcatacgcctccaggtcttttcccccataggaaaggccaatgacaacgaaatggagaccttcatcggcataaatgtctggccgttcgttctccgacaattcgggctttgccttcttgaaggcatcccaggccttcagcaatttgcacgggaaacatcctaaacggaaagaagtttttgcattcacaatcagagcattttgattgtgaacattaacattccacaaacccaaattagccaacaaattttaagtgcctctccattaaaaatacctctgacgattttgctcatgcgcaattgtgtgaatgatggcgtgacaaagccactgccggtgtcctcggatagctttgtaagctcgttggtgatgaacagttcgttgaagatgaattttgctggtttcaggtagtctccattgacgagcttcgaacactgctcctcgttgacagcgaatggaataaccttagaaaatatttgaaatagtgcaaaaaaaaagaacaaaaaaaccttcaatgcgatgaatgcattttccagaagtcctttaaagacttctccaaatgccccctcgccaatttttgaccatttgtcgaaagaactaaaaaaatgcatattcgaacaaaagttggaaacaaaaaattaccatgtcgagtcttcgaattcgttccacgagaaaacagcggactgaccacaaagctcgaggaaagcatccaattctgaataaatatgactatgttagtaatacaaagcaagtcccaaataaagttaaaattttaatttccaaatttcttctatcatttacccgattcccacggatttgtaggcaatgctttgtctaacgacttaaattgaagcttcacaggtgaacgagccgaagtcgagaaagttgttgaagacatcgaagtggaggaagttggtgaagccaatgccgaattttcaatcgagtacattgcgtgcctgctttgttcctccaacgctttggctaatgcgcctgtgagcacaccaatttcttgggcactgcctccagcagaacaacgactgttttccacatcagactggtcgatctgtaaattccatttggtactaagaaattgatacaattatgagggaacattttcaaactcacatgtttgagggtagtcccttgcttaatctgttccatcatgttgtcccgtaaagtcggtgcgtttgttggcacgggcgttcgttcagttgatggtgggcccactttcttcagcttggtgccttgttggatttgttgcagaaggtcggaacgtttattgttagtcggatcgacgaaagacgcctttgattcagtgctggtggaaggccatgaattgtccggcagagttggctttgattggaacagtggcggtgggggcggaggaggtggtggaggaggaggagacgccaccgaactcaccgctgttagcaccgactgtctttgctgcggagatgctaccgaactcgccgcggttggcaccggtggactttgctgattatgggaaaattcaaatcggccatccacccnaattgttaaaatacttctttttgctgattaatgaccgtcggtggagttggcggcggcggtggcttcccgcgactgttcttgacttgggattggtgcccaattgatggcttggaaggcggttgaactccgccacccaacgacgcgcccaaaaagcgttgcggaggagaaggcacaaacggatgagtgtcaacgacgggcgaatatgccatgattgcttgcttaatgaaaccaatcaatgcatcgtttgatactttgtgaaaaataatggacaaacctgttggtgtgatccgaaatcgttcatagaatgcatgacattgttggtaactggcggtggtcttgggggtggctgatgccgagtagccaatgttggattttgtgcaaaaaacggtgtgttttgtgaaaagcctccaatattttcgtttgggtatttgctttcattcgccgaattcaccgcggtttgcaccgatggaaactgctgaggaggcgccggtggactttgctgattatgggaaaattcaaatcggccatccacccaattgtaaaatacttctttttgctgtggaatgaccgtcggtggagttggcggcggcttcccgcaact

SEQ ID NO: 12977 - DNA, 1022 bp, Heterodera glycines
  unsure (1)..(1022): unsure at all n locations
ttgatcatgatcacgcactggagggtgaaagcgatgtgcnggaaggtgttgggctggttgacgaattttgaagtcgcaaaatgtcacctggaaaaatttatcaatttaaattacgctaattggctcgtgtgcgcatgaatggaatctgaccctggggaacagcctggatcttgaccagtctcgaccggcaaccaaatcggccagcacatcaaagccccaataggtgtaattggcgggcaccatgaagtaattaatgctgaaattttgaatttttgaaaaaaaaaattcaaattattaattaaaaaaaaattgaatatgtacaggcacagttgaacaagcgcagagccaagattaaacaatttgaataaaatgtagaaaaatgaaacggagctgtgcgttggcttaacacttttccagtccacgtggtcgggcattgtacggcctaaattttaaaaaatttgtctcctagttatttagaagaagcgacggttaaattttaaaattttatcaaattttcaaaactcatgttccacctcatgttccacaccttaaaaaaaatatttttcgtagaaaaaattcattaaaaacaaatatttttacgtagaaaaaatttatttttctctagaattccactagcatgatcatctctgatcacatgagaattcgacacccaccaccaccatcacaatcatcaatcaaaacaaaatgtgccaatgccattatgccatgccaacccaaaacggaccactcccatcatggtccacgatgtcaagcttggcaagcatgttgtgctgcaacacgcaatggatgcgcacgccaatctgccggctcgcctcctccttgtccttgcgcgtgcccgccttgcactgcttgtgcgccttctgcaccaacaagttgatgttcaggcctgagaaaagcagcataattagctattctaactaatgatactttatgttgctcgagagtaggcacactttacatcntttgggcacggaatcccgactttctaactttatggcgcc

SEQ ID NO: 12978 - DNA, 1433 bp, Heterodera glycines
ggggggggcgggttaattggtcgatgatgattatgatcatcctccattatgcattatgtaatgaatgttgtccccaaaaattccccccccccccccccctccggctattttcatcattgctattttatattccatcgataaagcgttttcccatagaagcactactacaagggggggggggcgaagagagtctggggacggattgaaaaaattaatgttcaacgaatcgagcgaaataagatgaaaatatcagagactgcatgtaattactggatttcatgttatgaaaatccttagctcgtaattacggaaactttttttttcaattacggaatacagtaatccaaaatgacggagtgcctcaaatgccgtaatttccataactgtgattgagtgcagccctgccgatgaaaattttcgaggaccaattggcatttgtccttttacgaaacatttttttggcaacgatagtaagccgatttaatcaatttggctgattaattgacggttcaatgggaaaatggtaaatcaatgactaacaaatttaaatgatctgaccaattaaaaggctactagaattgctttgatatcaaatccgaatgattaattaactaaattgattgatgcaatgatgacaaaacatttgtgcgcagtgtcaatgcctgcggcgattatcatgatgccattgcgcacccaatggcattttggcgagagcatcagcaaatccaatgatgagcgcatggagtggatggaaatttgctgatagaaactctccgtttttggcattccgagcgctcgcagccgtttgagtccaatgtggcaacagaccttttctaggaatgttgtcctgttttccaactaacttgtaacctctagagtctctgtttagagtcttgacttgataaaattatgacttatgggtctcgagtttcgggaaatttgcggtctcgcaaatcgctggagagtgccataacggggccagcagcaggtgctttggtttgtgaactttcaactttttatactaattattttatatcgattttgtccagcataaatctaaaattgtcagaagcgcaatagattttacaggtgtaattgtgaaaaaatgaggacctcattttaatgtatatgtaaatttttgtttttatacattttcgacatttttttatcattttctgtgtatattttttccaaaaatccaaacccagcgaaagggactccctggtcccccgctctcagctgaaaaccacccccaccaacacccccaaaagggggggacaaacccctgcgtgaagatcccctgaaacccaaaatgattgacggttttaaaaaaaagagggggggggggcgccccccccccccccccccccccccccccccccccccccccccccccccccccccccccccccccttttttttttttttttttt

SEQ ID NO: 12979 - DNA, 1955 bp, Heterodera glycines
  unsure (1)..(1955): unsure at all n locations
ttttttgcctttatgtatttcatttgcngatttccgatgggattggatgcccttttgtttttgttttattatttttgtgtgtgtgtggcgttgtgttgtgttgccattgtttttttttgcactctttttcggctgctgttgatttcctcttttgctaatttattgctcctctctttcttccttctcactaatttagtgtgtgtgtacataacaaataaataccaccggcgacggtgcggtaaattggggcgcaaaataacgccaaattaaggtcatttaggtattattatttttgtgaatgtacagcagaggtctactgccattttttagatttttcaccaaattttgagggctggataatttttttaagttttgtttcaattaatatcaattagtacgggaaacctcatcaataattccatacttttttttccggcggcgcttatcggcaccacctgcgccccccccccccccgaaaacgctccgaaaaaatgatgtgaaaaactaaactaaaaaaataaaataattactttaatgaaaattaattttttaatatttgaatttaatgattttttctttcaaatttccacttttaacttttaaataaaataaattagcagaattagatgatagattattgttcctaaaaaagtgtcaatttgggtaaacctaaaaaagtatcaacgagagtagtattaaatttaattaagtcaaacataattaaattgaactcaataatggagaaaactttggtttatctttccaaataaagaaacttaaatttgcttgtttctaaaaaaagttatgaacgaattaaaaatttatggacatgcaatcgcccaatatctcaagattgtttaatttgatgaatttgaaaattaagttttttggtagtttcctgttttgaaggcacactctatttaaaaaaaaatagaataaaatttcaaatttaaattctatagaaaaaatttgaggcccctctggtttggtcgatttcgctttctcatgagtcaaatgtcgtgtatcaaaatcttgtatttgcaaaaaaaggcttcttcacacaaatgtttacatttccgattaaataccagcaaatcgtgccaaaaaaaaactaaatttgcaaatgccaatccctccgcccccaaaaaatgctctaatgcaatttttggcactgccatttgctctcctcggcgctggcactactatatactaactcattcctgtcaaaaatttgctgcttcgattcccaattcccaatttaccagtcctctcccccccccccgcatttccctccaatagagccccccccccaacacagcacagaataatagtcagtcacagtcagtcagtcatctgagccggttggtcccgtgagggtgaattggtgggtgagggaggaatgcgaaggagtggcggagaatttgggggggggggggacattcgtatcgcatcccaccccaaattttatgggccaattttgtgacccatccatccccccatcccccaatatcccttcccattttccaaaaatcgcatcttttttaatcaccgattatgccaaaagtacacacaaaaaaataagaattttttttttgttgccgccaccaaatttgccttcacttccacaaaaaatgatttcccataaccaaaaaatttttttccaccaaaattttgtcattttcatccatctttttacccagttgccaaattttcagtgcctacacttgacaaccaatttttttggcaccccatagggcttcccttccttgttctctcctcattgtgccattcatttcctattcctttctcctccttgtggccaactgaggggggggggggggggggtgggctgagggtgcgtgggatatatctgtctttgtcactttgtccccccggctttcccccctcccccaccctttgtcactttgtccccccgngcttttccctcccccccc

SEQ ID NO: 12980 - DNA, 6628 bp, Heterodera glycines
ttccatttcgctgtcatatggtattctttttttgttgttgttagaatgcacttatgattccattagattagtcgaatatattcagcttcctgagccaaaaagccaaatgttggtatcattaaagaagaaaaagttatgaaaaatctaatggattcaaagtgttcggagcatttgtttgtcctgctctcattaacttaagtaatttttcttcccaggaagtatatgcatgaccgccatggtattgtcaaagtatccaagcgcgaattgctttccattgacattgcaagagcatggtaaggccgactttgttattttattcattgcccaaaccaatttagcgaagatttgcaaaattacatcccaacgggtgtgctgctgaagtctgaattgcgcgacaaaatgtcactttatctgctcgcccaattgtcgtacggaatcactttggtgttccaagcgcatgtcaactatttaatcagtcagtctggctttagcatttattaaaaaaggttaaaattttcagccgaccttgaatcagccatcaaatcatttgctcggtttccggaggaaaacaagcgagaaaaaactccgcgcaagtccacgggccgtaagcgtagacttgccgaacttgacggagtggtggaagcagtgatggcagtgccacggggcatggagcaggaggatatggaagaagaggacgacgaaggggcgaaacgccgacgcatttctgcgccacggaaggcatcaaaattggacttggcagatccggtcggtggaaggcaatttgttaacaatgcacttttaattcgttctccattttttagagtgcttatgtggaccagcaacttcctgctgctcgcgatgtgaacgaccagtcgatgctgatggatgagagcagccgcttggacgacatgttcatggaccagacggttcagccggcattgcccccgcccgattgggtagctgagccgaacgattcgctgccgtttggcgagtcggcggagggagttcgtcgtagcagtcagcagaaggtgtcgatgatgagcattttgatgggcgaggacactctgatggaggaagtgggcaagacagtcaccgtggcacccaatttaagcgcgttgcaaccgcctgttgaggttggcatttaccgactgcatttgaaaggcaatttcactccccgaactttgccatcgctttgctgttggcctaaattgcaaggcttattaatttaggttaataattgaattcttcaggatctcgaattggaattgcccatggaaatgacgcgtgatccgatctacaaaaaacggtccaccgatgaacagcagtccatcgatgtcgttgccgattctgacgatgtgcgtttgctttccatgccgaatccattccaactttgccgtttcagcgcctccaattggatgctctgcctgacattgaccaccagccaaagagtgcccatccgaagaaaaggaagcgccttttggtggacgaacagctccaattaggaaatgtgagatgagagggagcggcagaaaatgaagtgaaaatgcgcaatgcgtttcagcaagaaatgatcgaccgttttaacaattacggcgatttgttgcgcacccgtgacgacttgcacagggaaatcattcagcccgacaagcccaccctttcgcaactgctcgacccgcgtccctatcacatcaaaggtgtggctgtacttttactaaaatcaaaattcacattcatttagcattgaatcccgaacttttccctctgtttgacactgtccgcgctgaacaccgcgaacgaccgctgacctttgacgaagcgcaggccatgacattcgaagttggtccttttttgagttcatctccctcttcgtctgtcttagtctttcccacttgttaaaggatatgcaaaaacgtcgtttggaattcgatcttcagtcgtggcattccaacgacgaaccgacgccgctgcggcaacgcgtggaagagagttttggggacgcaggcggagagcagagacgcgaagaaacgcaagggaaagagaaagtgtcggtgagcgatgcattggtcgaaacggcggacaaagaaaaagagggggtaagtgagcaaaagcaaagaagaatggaccatcgaattgaccgtttttgaaactgcctaattccattgaacttctacagaccgcagaattggcagcacatcgtccgtcgtctgtgctggaaggggaggcaatgcgccgtgacacgacgggggaagggaaccgacgaatcaccggtcaaacgattagacttaatgcccaatttactaattggataccattttttagattattcatttggacagcttgggaatgagtttattatggccgatttggaccgaactcagccgcctccgatggacgaaatagtggcggacacggaacttatgcaggagtcggtggtgacgaaggaacactcttcgatgggaccattggacgaacagtcggtggacgacaacaccagagatttgtacaggtgggagagaatgctgtcaacgaaattgaaaacaacccccccccctcccaaaatattccactgacaatgaatcaaccaattcaattcacaaccatattttaacccaggatttcttctttaaatccttataagttagagaaaataatttaaaatttcttattaaaaaaatcagaaaaaacgtggttgtaatcccgacgatgcttcgttaagccgtctcaaccgtggtggtgttgcgtcgtttgaagagctgctcaaaagcgaatcatttggagagactaagagacttccgattactcgtgcggttgtcgcccggaaattcttcgcacttttgagtgagtgtcttcatttgaggatatatattagttttatgatccgaattaaaaaatactaattgaaatttaattttgcatgttttcagatttgctcaaacatcgcatggtcaaagtgcgtcagcgtaaaccttacggagaaattctgatccgagcgcgcaatttggagaacgacggagaacagccgagttttaccgagcatttgcagtgaattgagaaaatgaaacacataattattatttaactctctgcctttgattttttccgtttatgctcattattttgttaccatttcatttatttgctcaatctctccccctcaattgttaaacaatccctcactcttttcctcgattgtgccaatcgtcatttttgtcatgccaattttcttgctttgtctgcgcaaatacaaacaaatcttcggaaataaatatttttgaaattgtttaacaacagaagagccaaaagaaagggaagggtattccgttaaaacctttaaaaaagcattctaatgtttgaattgtccatttttatcattgaactgcgcattttcttttggtcatttcccatcgttttcttcgccgtttccctttgccttctcctcggcttttcctttttcacatcgccgctttttgccgcatttccatccctcggggcattcctcgtgacttttacaattcgaggcatagcatctgccgagctatgaaggcaaattgaatgaaagggtaatggattagaaaccggaccagacatggccaattggagggacaatcggggcgggcacggcattctgaagccgaaggggggggggagcatcaaaacaaccgttgaccaaaagccatagaaagttggcacactgaccgactcttcggcatttgagcagcacacagccccacccatcggagggacactccgagtgatcgatgcatatctgaaacacaagggcatcattcaccgcttcttctctgttcgcttggcattgcctcggcacaattcgcgcaacattcggtgtcccccgcggcgcattcctttcgcacgcaaatgaaattgcttttgcagaagaagccctcggggcaattgccactgaagaagcagcgacgaacgcatttggtgttgacacaggcgaaccctgggaaaatggaagagcaatgactgatgattggtcaggggatggtgatcggaaaaggcaaaataatttggcattttgtccctttgggtcacccgagggacagtggccgggccccgaataattgcatctgtggcccagcgagtcgtcgtgccgccccggagtgactgtttgttctgccgaagcaaccgaaaaagcggcgacgaacaaagcctgttgtagaaaaaagtcagaaataattttcggcattttatcgacggaaaattgccaaagcgaaggtcagcgaattggcaaaggcggggaaatggcagcggaagacgggagacattccaacgacaatttgtgaacatcaattgcaacgatgatctttgcaagtcacttaaatacgccatttttacgttattcaccattttatgcgctgaatcatttcgccgattgactaacgcatcgacggaaaaaagcctcggggggaaaggccacaaatagcaaaaaaggcattcatcagcagacgaaacaaatgaaaaacaatccgaagaaagagaaatggcaatcaaacaaaaaaatagaaatattatttcatttaataaataggattggacaaaatgaaatgaaagtggcctatagaatgtgtgactgttctcggtttgcttttaaagtgccattcttctgtgatcgtcgcttttcctcctcctcctcttcttcttcgttgcttgtccctctcatgagtgaaacctttcggacaatcccatcgcttgtccctccggcgtttcgagcgcattctccaacaatctgcccttcgaaaatgagaactgtttgtacatggtcctgaaaggggattaaattttagtgttttgttcggtacagtaagcccgtgcctttgttggccatgccatttcctacggtaacttgtcattttcactcactcatccgcaatgtccaagccaccggcaccctttgtctgcacataattggcaaatgagctgctgaagaaccaccgtatgtcaaagcgcacgtcgggcggaggagtggcgaattcactgacagaaaaatagcggagaaaagtggaaattggggcaccaaaactggccccaggggtaccacaaaaaggcagcaaaattggaattgcataattctgtcacaattaagtggcgaatcggcttcatagcgaatccgcccaaaaaacattcaccggcacttactacatataccacatggaaagcaccaacgcgccgtacagcttcagccggagctttccatatgcgactcgctccttgtggagcatcgatttgtcccaaaatgcgtttgtccgtttatagaaatatttgagcacttgacgaggagcggagaaacgcatttcaaccgagaaatgagacaaattggcaattaaaatgaattagcaataaaaagtgcgacggaacggaggaaaagcattattaaaaagcaaaatcaaaaacatatttttgaaaatggatgtgatctgatcaataatgaatcgtaaacaatgggaaaagtgtgccaaaatgatcggactttttccccctctaaatcacatggcattctccgccgacgagtgcctgtccaatgcggcgaccaattcggcggcggtcggcgccttcccttccggcgagtccaatgccatggccatcagcacatcggacgggtgctcaccgccgtgggattgcacctgaaaatcattggggaaagaaaacgcattaacgacatattttacaccgtgaaacttcaattaaaattttgccaatgtcattcactattatttttggcattttcctctgtcggcaccaacctttgcccatttgagaccattgcgtcccgaaaggggatcgtcggcgaaaagtcgctcataaatcagagaagcgcccgcccgagcgaccaaataggaataatattctgaaaagggggggggaaggagcacaaaaattgggtgggaaacgcagcgcgactcactggcgccataagtgaacaaatgggcgattctgaaaagaaaggaaacgaatgagccgatggagtcataataatacattgaaaaattaattaaatattcaacgaccacttaagaaggcaatcactgacaattaattaattaagcgccttttattttcaatttttgcctgtgatggtatgcgatttggtccccgtttttcagcccgggcaacgccttgttttggagatggccgaacagttccgtcgtgctcatccgtccctccgctatctctgccgcgcgttcgccgtgcaattccaagtcgaacagcgcataaagggcctaaaaagtttaccaaaatgcccaattcgtttggtggattttgttagtccacttgtcgcgtcgtgtgcagggcgtcgaacactctccgcgagttggcaatgccttccaaaagctccgtcgtttcatcggttggcgcccggcccgacgaatctcgccaaattttttggagtacctgattgtgagacataaaagccatgccaaaattaatcgacactaatcactcactcgtgggtcgttgaagaaacactccatcaaattggagggcacttccgcaaaatctgtaggacaccgagtccctaacaagaaaggaaattggaacatttaattgccgactaattgagcactaaacgcgtgctgaaaacgagttcgacccaaaattgaatgca

SEQ ID NO: 12981 - DNA, 3877 bp, Heterodera glycines
atggactctctttcacaaatttgtacgatcaaaaatttctagatataataaaaaaaatatgatattgtatgatgggatgtggtgggcgaactgacaggaattgagcgcaactgacaatattcaaaatgatgtcaaaaatggaatccgattaaataatagcataaaattggtgagatcagttctggtttgtctggcaaatcgaatcttttctaaggtctgtttgacccaatcgtttccctttttatacattcatttcccattggcccattggttggcgaatttggcgccttcgcatttggaattgcgctcgaaccattcgaccgcattcaaagtggtcggttttgtcggagatgactgattccgatttctgagcaaacgttcacagagggcgcactgcgctaaatgaatcaagaaggattagtcaaaagtcaatccaattcataacatttgaaaataaggattcgaatttataagttgaattaaaaatgaacataaatttcttatcatatacggagaagaggggaaggtcagcttaaagaccataaaatgaagatgagttgcctccagtccgttgtttgtacgagcgatggcagatgttgcctgtgagtgcatgttccaaagcggaattggaaaatgtggcgcacgaacgatttcgtcctcccacgctggaactgaattttttattaaatttaaacggatgattgattaaagattctgcctgaaggagctgtcaaagtcggtagcgggctcaacgaatattgaacaagctgctcccgtggactcacagtggttggccacgtaagagttgatggtgccggtgagccgatgccgaactgtattggtgtagccgcatagctgtgttccgaattgatggtcgaaattgttgtcccgagtgcagctaaaaattaaatttttggaaataaaatgcataaatttaaacaaacaatgattgccaatgggtgaaaaattgagtggattatctccaaatgcgttaacaccatccaacaactggcgctgtgtcaagccgatgtttgttcgagagaagtaaaggaagaacactggcattccaggaggagaagacgcctaattgagaaagctcttctgataatgtcgggaggcaaaagcggcaaagagagaacccttctggaaaaaattatgatttaaatctaaatttaattttttacctgaatgtgttgcgaactgcctcaccatattctgtcttctcgccgtacaaatgcacgagaccaagtcgtttgaagttcctgtacaggctttgcccgtagtggaacatgcagcacttaatcagtgccgtggggaaaaccgcgcggacggccgccatttcggctttttcaaagtcacaaagaatttcgccatgcctaacatttcgactgtcatacaagacgatgtcttcgccacgtttttcgcgtaacgttgctggaatgacaaaggccagtgggtcctgcacgtcgacgtttcccagcaactttttcttctcacgccgcatcatttcagtcaacgcattgttggagctcatggcaacaaaggcttcatccgttgctgatcgcctcactttagccaaaagtcgtgtgggcttcagacacggctcggccaggacactttctttgattttctgtcgccttgactctgcctttaacaaagcattaattatttggttttaaatttatacaaacttgttgtttctgaggtgctgggaggtggttgtgttctttttgactcaaggttccactagctccggtttcgccgttgtttgtgatgtttatatatgctgagcaactgcgatttgtgcatctccagcgatttcctgagtggtgtgtaaaacgaaatcctgaatagtttggaaatttattttttattattttttgcggcgcttaaacatgccgttcaaccataggcaatcggtcccataattggtttttccgcgctcaaaggtcactgttgagagttcagcctctttcaaattctgttgttcaacgctgtcagaggttgttacggcattcggttcaacgagttccactcccaaattcacggcctcctcagttgcgtttgaaatgtctgacaaataacgcttcttccgacttttttgtagactttcaagtttattacgaatcatttgttcaattaatgaaaagaaaaatctgaagtaaaaaaagagcacatattttagacaaatgagattttttcttatccgagtggatctagggttaggcaaggggctatataaatgtcgtattcgtattcagcgaccccgaaaagcctaaaacagacccgttttccggctttttatgagctttttagacttttggacaattcgtgggtttttactcttttggacaattcgtggcttggacaattcgtggcttggacaattcgtggcttggacaaaacgtggcttggacaattcgtggcttggacaattcgtggcttggacaattcgtggcttggacaaaacgtggcttggacaattcgtggcttggacaattcgtggcttggacaattcgtggcttggacaatttgtgggtcagcgcatattttatcatgaattattattgtattgtaagtttgaataattatatttttacccaataattttcaaaattagaaaattcggttttataataaaaaaaaaaatttacttgatcgactacaaaattttgaggattttttttttatcgaaaagagtatgatcggggcagtacgaattggcctaatatgagatgggtttttgtcaaaaattgctctcatcttcaaaaatggcaaacagcaaaaaacagacaagacctaaataacacaagaaatgttttgtttttttttggctgcgcatccaatgccattcttcaattagcatttccgtcggcatcgttggttacctgtcattattttatattgtaaaataaactttatattcaaataagaaaacatttttttgtgtctgggtctactagttaaatcagggctgccatcgtccatcctccgtttccaaggacgggtatgccgattttcaaggacatagtggggaaaattcatgaaatccaaggacatttaaaatttttattatatgcaatgaaaaatggttaaaatttattcaaatggtttgtatttttcaccggaatggattttttccaatatttttttgtttccgctgatcattttcctcatttccgcgcacgagagatcaaagttcaccttcaccagtagcaacgctttgactgattcaacttccaatagatttctttctttggtccattgactgcttgccagtgaaaaaactcgttccacgaatgcattggatgtcggaatctttaaaataaaaattcatttcttttttttatttttaatgaccgagaaagctgcactgacgattcgatacaaatttgcataggcctctgttgcaccatccgcctcaaaaatgcccttccatttatcttcggctgatttgagccaaaattcttcgggaatgtcggccaatgtttggttcacagcagacacttcatcaaacagttcatccaattgcgctatttcgggacaaatttgctcagcaagttgcacaacttctgcataattcaaaggatgattttgtaaatttgtccatgaaatattttttggtagtaattggagttggaaccagcgatcaatgtagttgagcacaattttgtaaaaattctttaaaaaaatgcattaataaaacaaaaataccaaaaaattttacgcaaaaatgtttttcaagttccgttgatcagcagtctctcaacgcaaaatgtcctccaaaaaatgccttcccgagtcccaatttgccattgaaaaatcggatcacaatcgggaacgagtttttttttcggcatggattacttgcgtcaat

SEQ ID NO: 12982 - DNA, 5141 bp, Heterodera glycines
ttaagtatggtgtccacggtgttgtcagtgatttgtcgaattgggatgggtatgtcgccgccagtcaaaagtgggctgctgatgatacagccgagatgagttggttttactccgcgctgttcgctttccaagacggcctcatcaatgcaacattggaaaataccggcaagcaatccttcgggattcgctgggacgtcctcgatgctgaacttcgatttggccttgacgtattggaagcgtggcacatgttccaaactgttttccaattttttgacgtaatccttcgcgggtttagccgatgatggtcctgctccagcttgaacaccatgacgtggctttttagcaggaatggacagaatataatcaatggaaaatttagaggggcactggaagttgcgattttccattttaaaatctaataaaaatccataaattttttaaaaaatattattataatgataaatatgcagtgaaaaggagtatttatatgagcaatactcatcaaaaatacaattggtcatgaaaaatatatgagaaaaatacacaattatttgaataattgattaaaaaaaaagacaatatcaacccatcttgacctgatgagcagcgcactgccacccatgaagcacaagacgacagggcacctaaacggctcaggaaattagatatgtcaaaagcatgacctcaaggtctaaaagacaaattaacaaaattttgctgccaggataaacggagctctgtaggtcgaactaccgccctggttaacagcaaaattgaaaataaaaattatttaaaacctagataagagaataaggaacaaatgaaaaattctatgtctttacgcgcttttaaagctgttgtctccgcccatcaatcgataattttcggcgaaacaatgcgcatttccctcgggaattgcatatggtgacagatgtttgtaatcaatcgataattttcgacaccttttcaaaatttccttaatggtgtagggcattgccttccaatatcatccctttctccgtctagaaccaatccctaatagcattcattcgttcactttcatttcctatacattaaaaaaaaatgcccaaaatgaacaagcggttgccacatgagcttatttgggaaattgtcgctgcaattccgataatgtaccttttcggaggagtttcaaagaagccaggtaatttttcaaaagtattattaaacaatgtaaaattaaaggagctacgcgtccgccatccggcatcaccgttgtcaaccgggcgttcgagatttttcgtgccaagcggcatttttacttcttaaaaatagttggtaatatttaaaataacaataaatctgaatttttagatcgatcttgctcaaaatttcgagaggctctgtgcactgaggaagttaccgtgcggagaattgttcatccaatttggattcatacaatttggtttcgaaaatgaactggaggacgccaagtgtttcgccgactttttggtgtatctatattatggacgatctggccctaccgttacgacgagagtcgtgacttactcgacggtaagaaaaaatataataataatattaatattatttagccgattaaaattggagagctattcggcgcaattctgacgcatgtattgggaagcgcgaatccgctgaccatgaagaagcggactgcaggcggttacctgttgcgccaacattttccgcggcttctccatctctcggcaacagaaatggcatcagatggcattggtcaactggtccgctccgatgggatggaaatgtaccggctgatgaatctgcaccacaaaggagatgttggttatttgattattattgcaacatctcaacaccccggctcgtactattttaatttttcaatcgaataagtgttttttttttgtaatgaataaataattttcaagttataaaatttgttatttattaattattttattaaataggatcattgcatacatatcgggacacgtactggtattaagcaaatcaagaaatcggtcaaatgaatgtcctagcgacatgtggtaaagaaacacaatacaatgggcgccaaaagttgaaagtaaagaggattgataggggaaagtgttcttccttaatcccccggggaatttgcacaaaaaagaagactggacggcggatgggataggctgggcgaggctgtcaaaatagagtaccggtgcatccatccccatcgcataaatagcgcaccaatgagagccctccttgtggtgggggtcccggttcacaacaagcgctgcggggtactgtagtgtggagggaggcggcaattggtcacaggcgaagcagccccgaaatgctcgctctgtccgacgattttcgctcaaaatctttgtgatttgtatgctgtccatttttcaaccaaaaaattgagcaaagttggtgcaacacaagactgatgataagcattaaatagagagtgaagagggcccaacaaacagcttgatggaaaaagttttcctcttctggtctatctttacacaattggataagtggtggaagaacagcagcaacatgttcatcaattaatctgtcgctttttggtgaggtaattgttaatggtgcagttgttgtactgacaatggcagtggtacgtttgaataaagacaatcttcttaaatattccgagtattaataatctggctcgtgttgatgtcgagacaaagtcaaattttttagataaccagagtatgtgttttcggtatgttgttctcgcaatgatgatgatgatgatgaaacaatgggaagagaaactcggagcaagaataaaataaggcccaattttttagagaacattttatttattttatggaacaaaatgatatgacaagcggactttaaatagtggtgtctgtgcttattgatcggtttttgtccaacatcaccagtgagtcacattctcccatcacaacaagcattattcctccgtcgggcactgggtgattaaattttatgctcaccgctgtggtcccattctttatcagatcaaacaatgccgcctgatcgtccccgctattggtcaaattgaaaacgtaaatgcaatgtgttttaccgtattgggaaaaagttatcccgttgctctccgatgagttagcgaacccaaccgcttcgttcatgtcattgaatgggcgaacatatttcccacttgggtaatccaggtcatagggcgcttgggggtacgatcgtccattagcaacaatggaaatttcgcgcacattaaatggttgaaaattgaacgggctgcgcctaattgtcccaacatagtcagcattggccaccagacccattgtcacacgacgggggatttggtccatgaacagattagatgtaaactcataacggccctgactgatgaacattgacttcatcattgtcttccttactgcataacgggcaggcttcacctccaactttctcgcaatgtccagcgccaacccatccatcagagacaccttcttcacatataatttcagtccaagaatctcgaaatggtagcggggtgcacccgcgataggcgaaattaacataaagtcgttgtcgttgggcaaaatttcaatgtccaattcacaaaaattgatcagatacaatggctgattgaataggtcagtgtctattttggcaatgaattgagctacgttgctacccgcaaacaaatctcgtcgcgctgtgcatccgcctcccatctccaatgtatcatccgtgtccctataatagcccattgcattcagatgggagtcttttgctgtcgttgaataggagagttcatgcgagaaatatgttttgtaggccattaaagcgttggcattgaaaatttcgcgcccattaatactcatttttacgttgcgaatgaaggtttgtccgatcatttgaattggcgcaatatttatatcatcagcatttaggttaatgagttgtccattagcgttttccttccggattcgaaactcagtgagcaaatagcatttggacagatcaatatagttttgacttgaatgaagtttgaagtggtatggtgtgtcggtcagagggttgctgggcagaagctcaaacactttcgatgacgacacactcacattggtcggcagaatacggaaaaagtccaaagcattggtgattgagttcacggagtcgttgtcgtttttgtgaaatgccattatttaataaagtccaaaggcgtccgatcgaatacgctttttcccctgctttacaataggtcgtccaattagggtttgatgagcagacagatatgctctctttctttttatacccttttttccgcttccaaactgttttggtaatccccctttgtcgggtacggtatcaatccctttctttccttcactgacaagtgcctccttaaacggtaccccctcattcccgactcgttccagcactcgttgtccagtgctcagtgcctccaatcctactgtagtgccaacacggcgaagaattggcaggaaaaatcgccacagtccacgaaacacatctccaacgcctgctcctcgttgaatatcgtagccccgctgaaagggactggacccccgaaagtagtcgaaatcgtctttctctagcccgttaccgtattgcacatactcatcatactgcgcaatgcttgggtcaaagacaatgtgtaccatttattaaataattataaatgaaatgtaaaatgaatggaatcaaaaatttatcacttttttaaatatcaacacgaccatcgttgtgccataggcgaatggcaccagtcggcctttgtccattgtgcgcagttcaatctcaatctcgtttatttcccgaggtaacactcgcgcaaatattggcgagtcataaatcttctcagtgtactcccctgggatggcaccgctgattgacacaactcggagcaaggagctcaatgaattgccaattatcatgttctcggtcaatccttttgagtatactgcaaaacttgagatgccgccgcgcaaatcatacccgtatttggccacttcatttgacaccacatgctgagggttttcaaagccgagcacgtagcccaactgtggtgaaaaagacaaataggtgatgatctcctccattgaacaccaccttgaatcgtt

SEQ ID NO: 12983 - DNA, 3408 bp, Heterodera glycines
ttttttaacattgtacgcaaaatttcaaagaattttcggggtgtgccattttttcaattttttttagaatatgatacaaatggcaaaattcggcgaaaatggcaaaaaattttttagttttccaacggaaaccgaaaatttaaaaataatacaattgctaattacttttgttgcgcgacttttcagcatttcttcaatggccgccaactttacgagtccattatcaatttgtttgccaaatttgtcccgctcaatggcaattgtctcctgtaaattgaacggaaaaaaagaaatgtgaaattcaaattggtataaaaatgtttgacaaaatccatataaaaaaatctaaaataattattttatacgatttgcattcatttccaattgtaattagtcactagaaaaaataaattggtaaaaaaaagcccataatcaaacgaacgaagaaaattaaattttcatttttcatcgattgattttctattaccatggcaggcccgtaaccaaaaaaaaaatattggtgggaagaacccgaaaatatttttttttaatcatcggacaaaaattttttctcccgtattatttttcagaaattttcagtgtcgaggagaaaaaaacaacagaatttttggtcgtttttcgccacaaattataaaatttttgctatttgggtgccagattttgaagggttctgacggtgttgataagcgaagcggcggaaattttttgaaaaatttaaagaaaattgttaggaaaattgtgcgaaattttcaaaaaacatgcacattttttcttgaaaattttttcatactcgccaaaaccacgcgcacatgttcactaattttttttttttaaataaatttttgaggaattgaaaaaatattttaaaatttatttccatagcgcatattagaaaaatgttgcacaaaaattttggcactttttccgaaaatttttgagaccaaaatttgcaacactttttcgcactactccttcaccaccaccacctgcacaatctgctgagtctccatgtcgtggatttgcttctgtgtcctgatcactcgctccaaatgttcggcgtgtgcaagcgccgcccgcttcagttgcgcgtccaattcggcttcatccgactcattgcgctgctggttaaatgtgcaaaattgcggggcaataattttaataaaatttataaaaaattttggaagatttctaaaatgttttcttaaaatttcttagaaaaatgggagggggagggggggcggacaattattcctaaattatttggtaaatccaacaggaagtgacaaacaagtgcactggtttctcccatccccccccccccgcttatcagtactccataggttttcaaagaaaattccaagaaaaattttttttcttggaatttccaaccattttttttcaaaaattttccttaaaaaatcacctgaaaattgttttcttgaaattttatttaaaaaattcgggggaaacaatacggggagaatctagcagttttcaaatatattttcttgaattttttttagacaaacgggcaggggaattgaatgaacccctcggcattcgagcatcattccctgtcgaaatggcatttttttctgaaaatttcaaattttgagaatttttaaaaacatttttcaagggaaaaataaaaaattccggggttcggcattggttgaaattgaatgagcagaagcagtgggccaaattcaatcaccacaacaggtgcatgtcataagcaaatctcacaacaccgttgagccgacgaggtgatcagtttgtgttgcgccagtggtcatttctctgttccgtctccgctcaatttccaacgccattttggaaagactgaacgaacacataatttcacagacataaaaaaattgcaatacacattgtcgaaattttgaagtgggtcggttagaaaaaaaatttttttttctttgaacgcccatatttttttttctaaatcgtcaaaaatcgcttagcctttgcctagaagaaaattagtaattcatggggcggactcgaaccttcaacccttttccattgactatactacaaaaaccactgagccaactagactaatcacaaaaaaaaaaaattttttttttaaattttcctaatcgtgcgaacctttcgtccaatttccgctgttcttcgaccgcttgcgcaattttttgcttttccattcccttaaattttcgctcaaaattggatggatttcggcggggaaaaagaagcaaactttttgtgtgaccaactgttgctccagctcagcaattctttgcgcgtttgccaactttgaaaaatgaaaatttttttcagcaaattttctcatttcgaaattacctccgcctttctgtgccctttgtcgacttgttttgactcgttttcatttgatgaacgtactgaaaacatggtaaaaaaaacaattgggtggaaaattaacgtaaaaatggcacgtttttatgccaatttccctctcctcgtcccattttcccatcggaaagccccccggtttttaatgtgaaaattgttatcggtcacaacccttttaccagcaaaatctgggctaaatcttgcaaaattttactttttttttttgaatagttggctcaaatgaaaccgatttgtgcacaatttacgactcaaaactaaaattgggaccaaaatcgaactcgagaccctaaattggcccgaaaggatgcaatatttttgttattagtcatccttatggcactttcgggagagaaaaaattggggaaacatttttcaaaatgcaatttccgtctcacccaccattcgttggcattcggtcgacaaattgttgcgtccattgtggcaactctggcagagtgccgtgccgaacataatgctatgaaacaaacaaaagctgcaaaaaacaaagtagagaagatgtgtaccgtgccgacatatgcagcaccgccagtggcaccagccaaaacgaaaacggcaccaattctcgtgacacgacgccagagtgggtggggcattgcgaaataagccttttgctctgtttagccaattctgctgattagaattttttgttaagtttttgttttggattatacccagggaaaaagggtattttggtccggtttcttggtaattaatagagctcgacctggacctgtggatccaggcctggatttttcctggatccaggtccaggcatttttcggcaacccgtatttttcctggaactggatttttgtccgggtccaggtctaatgtgaaaaaaaaaatccaggtccaggcaaaatatgaaaaacctggatttcctggacaaaattttagaatttattattccaagtgactgatgtttttttcaagttttcaaaaatgattaaatagattaaaagctgatta

SEQ ID NO: 12984 - DNA, 1329 bp, Heterodera glycines
tgttccaatttttggcccataaattcaaaatttgaattttcgcgtcgatcctcgcttggtggaggggcgattcctggggaggaggggagggggcgcgctttggggtgtgggccggtgccgtaggtgtaaggcctatgttattttaattaaattttattttaaattaaattttaactattattttaaattaaataattcccaaataattatttcccatcagtgggaggggcgcactcattgagagaagagatgaaatttattatatgaaatgtgaaaaataaattaaaaaaatgagaacagatgggaggggagggattagcagtgggggcaatgcggtgtgcatttttgtttccaatggttgacgattaggcgctttcttttgtctcgttcggtgtgcttcggaacagaggacgcggaagaggaagtggtggatgaagaagcggaagagcaggaggacaccgagctgaacgcggttcccggtctgctgtcttcaaacagaactgcctccgctgcatgaatttgttgtggtgaaagcagtttgtacgcggcgcgtacacattctctaggaatgcgacgtgaacacgttggcgtcttattggggggggggggggggtttacatttataggtaaaagtgggtttaggctaccgtttgcaaaacatcgcacaacggttgaggcgtcggggcatcatcgaacgggacaatttggagtgccggtgccggagggggcgcaaatgcgtgctgctgaccgaattgaagagaagggagttccaaggcgccctgaagccgaggaaacggcgagttgatgaaaaatggtggaaaagcgggccgcagaggagacatgttgtgaaaatgcatttggagcacactaacggcattgtcgacaatctgcgaaatcatcggccgaggtggcagcagcagttgttgttgatgttgtgccgggaacaattgctgcggttgttgttgttgtgccgggaacaattgttgcgggtgttgttgtgccgggaagtttgtcaattgttcgccgtcaatgtccagctcaatctccacgtctgccggtggggcttcggcggcagccggtagaacaacaacggatgccggagggacaacggcggcggcagccggctgtacaatggcgggtgccggctgggtagccgcgggaaagaggcgctccttaacatgtgagtgagcactcattttgcgctaaattttttggcacattaccacatcaacacgctgcccattaattattccaaataaggaaaagtcctcattcccacgtccattaggtggaaaaacgctaaatttttgtaaattatcgaatttatgc

SEQ ID NO: 12985 - DNA, 2375 bp, Heterodera glycines
atagaaaagtgattagaggaagaaatggtgcaaaaaacgaggacttttttcgctccaattgggcggacgaatcgaatagcaaaaaattcacttttatatattagtaattattccaaaataggcgcaattatagtaaatagcaatacaaaaccgttcatcaattgtgaaaaatataataataatttatatcataaatttgtattataaagattttttaaagaattttcaacaaaaaaaaaacaaactttttcagtagaaaatttttggttaaacggggaaaattagctaataatttatccattctaaaaatagttaaaaaaccaattagtctccgaattggtacggttttggcgaaaaagttttttgaatcaaatgccattttcggccagcagagctcatccatcggcagcgattctcccacaatttgtattgtgtgaagtgaatggtttaggtaagtaatgcgtcgtccccaaatgcccccgggaaattattgagtggcttattgcgccaacggcacggagggattagtgccaccggtacaaattggccgggcggggggagggcagggagatgagctgctccgataagtgggccatttcgagacggaatttgggcccaaaagtgggaaaagccctcgggggaaattggccagggacaaataaacggaaattacgaaaggaaaaacaaatttaaacaattttccagtaatgtttttttgtgatagcgtaattaattaatagccctgcattaaaatataattactctcctttctaattaatttaattggtttatttattttaaaaaagagaatatattcttcttcgggttttattggcataaatgaattaatgcatcatataataataaaaaacggataaagctatcttcatgattcacaatttaattttcaaaaatcgttaccgtaatctgtgcctaataaatttcaacaaaaaatgaattgaatgtttcatattgtgttttacgctaatgaggcaacaatcggattacggtctgatgaaatgaaatacagtatcagactgaagaggaaacaataaataatagtgaatgggttcaatttttgttgcctctgttttggcgttccgtcagcacttccgccgtttcactttccgccgtaggcatggcgaacagtacgccctggtactgtaccccattaatttccatcgacaccaccatggacgagggatcgttgcccgaaaaagtggctgttgtcgccggaggcaaattgccagcggacgaattgccatcagtggcattttttgattctaaaagaccgcggggataataaacccgaaaccgaattaaatttgagaaatttatgattgggttcgaaaacaatttgaaggaaatgccctcggcgaatttttcaaaattaacaaaattcggtaattaatttgggaatttaaaatttttaatttccaaaatcattttttggaaaacagccatttcgtttcgtccaccttcgccgttgttcactttgatgttgaaacgcaacgcattttttagcaaatcgccaaacgggccgaggggtgacgcaacggaagtgccatcgccgcaggcgatggcattgtttttcggcacatttatcgacggggcacggccaacggatgccgaatgaggcccttggtcgctcacttttcgccttttctcagctgaaaaattatccgatcagcaattttctttgttacagtattccttcctttttggcactttttgccaattttccctccccaaattcgaattttcctcacttagcgccgcgtccgccggtgattgtctctgctgctggttggcggaggaggtggcaaaattggaggaggaagttgaggacgatgatgccgcggtgccgtcctggtgttgttggcactttcctgtttcggcattcgcttcgttttgccgttgggcgagcgtttgcggtgacgacgaacttcgaccattggcaagttcaattctgaaaagtgaaaattggaaaatttgaatggaaatttggatcaaatggatggactttggaaatattgagtcgaattgttgccgctgattctcctccccattttgaagcaaaaattggaatggcatcgccgccacaccggcaaattgtgacggcggttgcgcaacggagggcgcccggctgctgttatccccgttttgatgagcactttcctcctctgtcgttgctaaattgaaaatatttgattatttccaatttgtcagctaatcaaacggttttccgatgttggctaattactcctaaatatataattacggtgagctaattatcccgttacgattggttaattagtcttaattggtcacacatagggatcactatgccaattggaattgtcccttattgatga

SEQ ID NO: 12986 - DNA, 1754 bp, Heterodera glycines
ctgtttcggattcgcttcgttttgccgttgggcgagcgtttgcggtgacgacgaacttcgaccattggcaagttcaattctgaaaagtgaaaattggaaaatttgaatggaaatttggatcaaatggatggactttggaaagattgagtcgaattgttgccgctgattctcctccccattttggagcaaaaattggaatggcatcgcagccacaccggcaaattgtgacggcggttgcgcgacggagggcgcccggctgctgttatccccgttttgatgagcactttcctcctctgtcgttgctaaattgaaaatatttgattatttccaatttgtcagctaatcaaacggttttccgatgttggctaatcactcataaatatataattacggtgagataattatcctaattatcccgttacgattggttaattagtcttaattggtcacacattgcgatcactatgccaattggaattgtcccttattgatgatcaattaggctgatgattctttctttcacctcgtgccatcgtcgccattccgtccgttgccgtgccaccaccaaaactcagcaaatgttttccaaagaatgccgccgcgaccatcggaggcggcggcggagcggtgccaaacatttgctcaaaccagcgcatttgctgctgttgcatatgccgttgctgctgagcttccgccgaattggcggacgaatgacggcccctaatgagcaattaattcatcaatcattaattaacgggcaattaattagtcaaggcaattagcagatgataattaaaattttaaataattccctctcccattttaccccgaataattgtgctggtgatggctgttgttgttgtggttgttgctgccgttgtggtgctgtgcccccgcgggcgttgcgcccgcggagttcgaagttacgccggcggcgcccggcggcggcgggttgcgcctgccctcgcgtttgtttgcatcaatcgctgcttccaatgctgcacggtcgctgaatttgtgtattttgcattcgtagtcgtacaaatatttgtcatatctgaaaaaagcaacaaaaacatgattttgtttattttgctaggcaaagtgatcagaaatatgggaccgtttccttttggtctgattagtggtgatcacaaagccaaaaaaagaaaggttcagacagcaattttgcaagtcaaaattaactgaaccagaaagggttaaaaaaaagtcaaaaataaatgcgcccaattcgaaaatcggcgcaaaagtggtaaaacctaaaagggtaattagtggccctgagaataaggcccattaaaaagctagcgcgccggttctttgatcagcaaatgtgttcggattatgtccgcttttctaatcagcctcaaggagcatccgatcaaaaatacattagcaaaacaaattgccattttcattcattcatttctcactgtgttctgagagtgaacgcggccgaagtgatcgaagttggcaaattgagccctttggcaatttcgcgccacaatttcttgttgatcacctccaccagtccgccgtggtgcaccaccagcctgtacagctcgtacaggtccaacacctgcttggccatgatcggaatgcgtgtcaccggctttcctttagtcaaattttgacatgtaattagataactaaataatgagtggcaccgtgttggcgcataaattccaagcaaagagccagccattccttccggttcagatcagtgggcgaaa

SEQ ID NO: 12987 - DNA, 1373 bp, Heterodera glycines
  unsure (1)..(1373): unsure at all n locations
caatcggatcgaaaatcacagatcagcccaactatcggtcggcacggatcaaaatggcacaactgtatttggaggtgaagcatgataagcacaagttcgccttgtgctacaggttgatcggcagatttccgtgtgctgcagagcgtaaaactcaatcattttttcactgaagggaccttttggagcaggacccgagcccgcagacattcgaactgtcggcgatattttcctatttttgattagcccccattatcggctttaagtcttggtgacgcctacatgagcatacaggagccagaaatggcaatcgaagcgtacgaaacggcgatgagacgagcgccaaaggaccaccaactggcggagaagatcggaaatgcatatgtgaagtgccatttgtacaacaaggtgggatggggaggaggctgatctgatcagtacagagcagagttgtcgcgggacgagaaaaagagtcaggattcgggtcggtacagctaaaacctttcgggtcgggattcgggacgagaaacgggactcgggtcgggacggcattcgggacgagattcaggtcgggatagccaaaatcagtgccgttaagccgactcgctccccaattaattgcttttcctttaaaagcattccttcccgcccccccccaaaaaaaaatcggcgccatttcttcaggcaatcactttctatgaagcggcggtgaaaagcggtcgccacaatttgcgcattcgttttgcggagcaactgttccagctgggcaaccttgagaagtgcaaaaaagtgctgaaggaaatgttggaggaacagggcgaaccgatgggtagcaaaaaaagcaattcaaattttggcgttagttttggcaaaatgaaaaactcaaaaaacaaagaaattgcaccgatgcgcgaacacgttgcctatctgatgctgatgtcacgactgcacattgaacagaacgatttggagcagtcctgcaaggatttgcaacgggcgcgacaattgcaactgaaagtaatcgcccgaggcactgtcgctagcaccagagatggcattgttaacatggcggaggagaagcagctggcagcaaagttggcacacagccgggggcacattacggctgaccgttatcccccaaaaatgccattgcagcatttgtcaacagattgccgaaatgcatgccaacaagcgggactggaacaagtcaattgaactgttcaaagaggcgattggacataatgaaaaggacgtgaaagtgcgtggcgaaaataaattttaaaattaagccggggattttgtatttaagaaaaatccgaaatatngaattaatatatattttttanaaaatgccaaaatattttttataatactga

SEQ ID NO: 12988 - DNA, 4330 bp, Heterodera glycines
  unsure (1)..(4330): unsure at all n locations
agtcacataattatgcgtcagtttgatgctttgcccactcgtcgtgcccgactgaacgcctgcagtgccgagttcggttctccgatgtacctttttgagtggattaggtgattagtgatcggttgatttagctttataaaagaacagttaatcagtgattggggttacaaccattcgatcagtcccttgcagtagttgaaccccgcgtccaccgtcgcccgtgggttgttctccagcgcattacggagcattttttcgccaagttcaatgcttccttggcgccatcccagctcaatgtagcgtgccaatgcatggtaatggtctgtgtttgtttgttgtgttgtccccttttgccattcatcccctccccccccccccctcgaaaattaaaaaaatagattttttaaattttcggggggggggggggagggaatgaatgccaaaagcggacaacacaacaaacaaacacagaccattaccatgcattggcacgctacattgagctgggatggcgccaaggaagcattgaacttggcgaaaaaatgctccgtaatgcgctggagaacaacccacgggcgacggtggacgcggggttcaactactgcaagggactgatcgaatggttgtaaccccaatcactgattaactgttcttttataaagctaaatcaaccgatcactaatcacctaatccactcaaaaaggtacatcggagaaccgaactcggcactgcaggcgttcagtcgggcacgacgagtgggcaaagcatcaaactgacgcataattatgtgactaatgtgatcaaattgctcaaggatttggaatggggtgagagggcattgtacaacatgatcgagatctgcttgaatcccgacaacgagataatgggagcggatttgggggagcagcagcaacagctgagccctgaggagtgagtgggcattaggaaaatagagttggtcgagaattggcaattctcgatttaagcgagttgagaatatggtaattttcggcacaactcagtctaggagcggtattttcccgttcaagatcgagaatttgcacttttcgagtcagaaatgtaaagagaagagacagttagtttccgagtcaagacgatcgagatttggctgttttcgagtcaatacagtcgagaattggcattttttcgagttaattcgtcgagaattggcagttcttgagtcaagataatcgagaattggcatttttcgacttagcattaatgattaaaataagacgtataatcagcgattttaagcgcacatgaagcaaacgagtcgtacaaagctgccgaccgtttcttcnaagtttgcgcattttgataattaccaaaataaaaatgatggacccactaaaaattggaaggaattgcgtcacaaatcgatgatggaccgacgctacaaactcacgcagaatttcattcttttggccaaccccaacaaagcgaacacgcaaaaagcattggccaatttcacggagctttgccggacggaagggatgacggtgggtggaaaaatggggaaaatggacatttggccaacatttgttgtcggaatgtcgaatttcgattggcggtttccgacattttatgctcggaattcctatttccgaaatattttcagctgttggaatgccgattgttgaaattttttgagggcatcggcgtcgtacatccctagtgcaaatctcattttttggtaaatgctctgaggattatccattttttgaggaggatgatgccaatctcagcgcgggcgcaattcttggcacggcgcgggcacttttaatggctcaaacagacgccaaaggcaaaggcgcagctcaagagaatggttggggcatgcgtggaatttggaggaggcggaatatttgcagcaatgtaaaaatttgggaaaatgaaaaagggatggtgaagcgacgagactcgagaccaagactttggtgaccccgaaaccacaaaaatattagacttttttgggtcgaaactcgagataacctgagacgacaaaaaagcaacacgaaaacttctcaaacttaagacatggacttgacaccgaaaccgccaaagtgttagacttttttcgggtcgaaactcgagatcgagatttgatcctgagaccacaaaaacgcaaaatttttcacgggttataagattcgagatcaagtcttttctcgatagagcgttttttgacccccgattaaataattagtttaattgaccatttatgggcatatgaacctttttgaggtgcaaaaattggggaaaagcaaatgggaggacggaatgaattggcccaacccccaaaaaaaggttggcttctgctggccgacatttacatcgaccaggccaaaaatgaccaggcagtggccattcttcgcagtattctccagcacaatgccgttggttttgccaaattgttttttttctcaattttaaaaattaatttttttttttgttagagttgctcaaaagcctatgaatatatggggttagtgtgcgaaaaggaacaaaaatatgcagacgcagcagcgaattacgaggcagcgtggaatgtgcgaaaacggagaaacccgagcattggtggggggggggggggaatttgaaaaaatgggccaacattggcattgacacaatttttacaggatacaaattggcctacaattacttcaaatgccatagactcttcgagtgtatcgaggtagggggatatgtgtttatcataaaattagggatggaatgaattcagaggcccaaaagaatttcgaattcctaggcctaagcaatttcagaattttccatttacacctaaaacaacaaattattaattaaggtgtgccatgccgtcctcaaacagtacccgacctatccaaaaatcaaaaaagaaatactggacaaggcacgagcaaacataagaatgtgaaatgataaaaaagaatcgaaaatggaattaaaatggaaaaataaattatgtttcatcaaaaagcccacaaaaattgaagaaaaacaaatttaaattatatttgacgttaattatcgcgaaaaccggttttcttagaagcagaaaaataaaactttatagaatgtaaaaaattaaattaaaaaagaattatttttattcgattacaaagccaaattacggaatacataaagcattttttctaaaaaatcgggtgtttttaaaatgccttcaaaaaaaaaacaaataaaactcaaagaataggccaattgttttttttattaaaggaattcgaatatctggtttcatattgcagtatgaggagcatcaataatgaaaatgattcacatataattgcatcaccgtcaattaaaggcaaaatttgtgaattttttgggaatgatttttggtcattttacggcaattgaatgttgcggactgtttgttcatattcggaagttgtgttcggtctaagctgtcggcttgatctgctgttggccaattcaatgctttgcgggagcaaatggagcgtcacaaactctttggcatcgcgccaaatttgggcctaaaacaaaaatttaatttaaattaaaatgccctaatttgattggtgattgattgattgtttgcctgttttcttgctgttgaggcaatgaactcgttggtcttgatgcgcgactggcggtcaatggtctcgtcaagagcgtcctcaatgatcgccagcagagaaagggtctgaaaatcgaaatattattttaaaaaagattaatgaattattggagggcagatcagcattgatcaggcattttgaaaataataaatgatgatcggcgttgatcaggtattttgaaaatactcaatgaattattggatagccgatcaacaattgatcagtattttgaagataaagccttgatcactcttcaaaaaatccaatgaccaaatgattcaaaaatgaaaatattcaatccaatttaaactaataaatttagtaatccctaatttctgcctttttcctgtgcttaatctgtttattttttcggttaatagttttgatcgggcacctcctcttggctgatcagactcagcccactgctgccggcactcgtcgcgccatgtccaaccaacaacgcatgcgcatcagtctgtgttgctttcgctgacgccgtcgtgctgtcattctgatatggaaaaataattttaaatattttaaaatcattttaaataaattttttaatacaaatggccagcatttttacgaaaatttattgtttttaataagtgaccattattggcatttagtaaaagtgccaattttaattattttccgnagaaaaactttcggaaatgtaa

SEQ ID NO: 12989 - DNA, 2723 bp, Heterodera glycines
gcatatgaatgcgtttatcgttatgtgaaaaaacaattttgtccccatttttggtctttccattggaattgatgaccactggtcattggtcaccaatgcatcctatggctgctcaattgtaaagtgtattactttttacagattgttgccaaagaagcggagcagaatgacgacgaccaaccttcgcccatcacggtcggttgttctcattgaaattgggtaatccgtccgaccccatatgaatgcgttattaacaatcgtttatgagaaaaaaaattgtccacattttgctctccattggattgattttttccgttgttcgatttgccctcttccaacccgcgaaaggggaggagagacccacccattcaccatctctgctgctatagccaccatttacccaaaccaaagctaaaattattcccattttcgtatatttgttaccctgaagccatggactgtcccaaaaaagttaaacttccccctgaactcctttcggagttggccaattgccttcattacaattttcgctggtatggcatccgaatttctttgtcctttgaccattttctcgccaaaaatcaaaataaaattcgtcacaataaaattaaggtaatgagttggtcctctgcattaaataattggaaatgagaacaaggaaagcccattacagagctaattagacattgggtactattttttaacttaagcattttctcttgggtcctttttcaaatccgtttatgttttttccaatgcctttattaattaattacaattatactcccaattaattgctcttgcagaaagctgatgaagaaattcgagttcttgaaaaagttattgccgatgcgcaaaaagttattgccgatgcgactgctcgtctcgaatattggaaggagcaccgttctaccatggtctcctttttttacatttttcatttctatccaagtgactaatttattccaaacacagcatacgatgactatgccggtcttgccgcagcaaagcgaaagtacgagtcaacagcccgtcagttcggtactgtaacttcaaaaattgtaaaatttaatgttttttttttgaaaaattttcaaagttgcaaaaatttttttttttgcttggcggggaaaccatgcggggaactgagcccgggggggggggaatagctgctcccgattttacattggcccttggtcagttcagagccgcctactttggctttcttttcttatttttttgtcaaaattttaggtaattttgtagtttgtccccccccccccttttttgaaaatttttttttgccttaaaaacatgtttcatcaattaaattcatataacaaatttttatttagccgcccattgatcctccgattttggagaaagaagaaaacggaggggagccagccgcaaaaagaacgaaagaataagaagaatgaaggaacaaaagggaaagaaaagggcacggcaaaatttgacagaaaatccattgccataatgtttttttggattgtttaaataaagcgtaaattaaatgattttaaaataaaatttgttgatgtaattttctcgcattttcttgagtctgaagtataacaccaggcaaggcattccgagctccaaaaattttcaaaattctgaatttcgtgccatccctggtatgcaccagccatttggtccagtggtagggaaagggacaaatgggcgaaagtttccttttattttgggtacaataattggagaaagaaatggattcatttgccataacttttttctgagtgcaaattgacaaggaataattattgcataattggcgactctttgtggaaaatgcgcaagtgatacggtatttccaaaatgtaagtatactgtagttggtataccgtaggtagttttgtttcctctccatccaagtcacacaaaaattcagatcaccaaaactgactgcccatccctattttgtaccgtataccattttttccattagcaccatacataattttatcattttttgcactgcctttgcaccgagcgaaccggaggaaattcaaattcagagcgtgaatttctgaatatctggcaatcatgtcgatcattggtccgaaaatttttttctgtaaattctaataacatgtttataggggtgttttgaggcgctgagcacgaacccggcctccatttcgaccattcagaaaaaaattaagaaaaaatttcgagacaaatgatcgacatgattgccaaactcttttccatatgccgtaattgtgccgttaatttcggcgggtgcgaatttaacttcggggaccttttttccaatttttctgcgttcgacaccctttcctctcacgttcaatgaattctgctgaaggattcgtttcaaattctcgactattcccgagtccgtccttatctgatcaatgatcagttggtctctgtttgggactcaattggctgtccctcttacccccaagtggcacttttgatcagatcattgatacttaattgcaatttgttcattttccagttggacttgcgcatgccgatgctgcactttctgcacaatgcggtgcccgccctgtttctgctcgtccgacttgcgctgtcgcccgaccggcgtccgctggtgccgcgactgctctgtgccattgtgcgcgcaccgctccgctcgctgctgtggcggcccgtcgcagcacaactgttggtcagcgcgttgtccgcccgcg

SEQ ID NO: 12990 - DNA, 2236 bp, Heterodera glycines
aaaattttcttttcgctttgaattttaataattgctctttcttggattaaatttttgagatatatgactgactagttggagaaaatatttgaaaatttaatttgttttcaaggtaagattttaatttttaaattggtttttgtgtaattcataactaaaactcaatctattttttaaaaagcctttgtttttcctcaaattgatctacccataatcaacctcaggcaaaaatttcaattttatttttttaaattaaagcacaaaaccccaaaaaagccccctccccctcattagattagccagttgaagctgatgggggaggtgatgagtaagtaatttgtggaggagtgagggggaggggtcgagaattgatgatgggaggggtggaggcacaaggattcttaaacgagtcgagaattgagtgcctgttttgcctagtggttgccgtttgtgagtgtgcgagtgtgcgcgctgtgccaaaactgggagggtggggtggaggcataagtgtcgtggtgcccctgagggcggaagggaagggcactttcttcacttcgcgtcacgacggcactgttttgcctgaggggcgggcaaaaatggggagaatttgtggcggggtgggagagaggcgccgtcggggatggcataattgaattggggcgaagaaagtgaacggaagcggggggggggggggggagggccggccgaaaatgcaaaacttcctcaactgtgaggatggaaaaaaggggatgagttaaataaaatgatgaataaaatagcaaaatgtgtgatgaaacaaatttaacacgctaaaatgaggaattttagttatgaaaaattgttaaaaatagattcaaattcattttaaattttttaggggttcggttgtttattatttataaaaatgtattaaaaaaaattaaaaataaaattatatatttttacaaaaaagaagtaaattgtatttcagcaggtgatcagtttattatgtttgacaaaaatataataaagaaaataataatttgattaaaaaaaataaaattgtaattttttatttttccaaaaagttcaatttcattcatataaaattttatattcattaaaagtatgtcccaattcaacctaaaaattttcaggggatcaattttttatcctaggcaaaaatatagttgaaaaacttaaaattttacccatttaaaagttttctttttattgttttaaataaacaattttcatttttcaacgtgtaaatattaatttattaattaaattaatattttttatttaaataaatttctattaaaaataaatttgaagaaactgtgacaaagatggaataatgatggagctaaaccgcacaattaacgacgaaacgatatggcataaaaaatttggattggttgagctaaaagtgcgctgcgcacttataaattttaaaatgagacggcggcgtttgaaaatgaaatgaatggggacggaggaaagccgaaaagccgcgcgggaacaaaaaaaatctctaagtaaaaaattaaataacggagaataattttatataaattattaattgatatgacaacgaattagttaataaattaaattaaattgggcaattaattagcgtccaattaatagaaaattaccgaaggttcttaattaactaatattacattttctattatttgttatgctatccaaaatagaaaggctctaatgtatatttttgaaatcttgaccacagaattaatttgttttttaaaatctcccactatttttaaattaaaatggctcttaatttcataactgtttaccgaaaaactcaaaaggaataccaagctgctttatttgtccgataaaaggtgcataattcataaattattttacaaacttatgtgcataatcactttcatttgaaacccaaaacctaaaaatccaagttctaaaaattattctcatagcaaatccaaaatagtgataacctagctacgattatggcactagaattattatttacgagctaaaaatatttttcatacatttcctagtgaaaaagccacataaaagggttaaaaaaaaactaaaaagcccatcctcactaatgaccctcatcagtgtccattaaacaaatggagcgattaatttggggcgctgacaaatcattaaattatacaataatgggacaacaatagacgaaacttaggggatgatggtggtggaaatgtaataaaatttttggtcg

SEQ ID NO: 12991 - DNA, 2633 bp, Heterodera glycines
taattttttttaaatttatatgctctaggaagagggaacacaattatttagcgaatccacaccaaaaatcaatggcatttggtcaaataaaatgaccaatggaacgcatgcctcccttacgcttactccgtttctttcaatttttccgtctctctcactcctttttttctcacttacactctctctctcctctctctaatcccattctctcacgcacagacacacacacacacacacacgcgggtcaccgctgtctgccatagcctataacacagcacaccattaccccccccccccccctaaataaactgataattctgatcgtcaaatttacatttttcaataacgacaagtggcgacttgtcgttattgaaaaatgtaaatttgacgatcagaattatcagtttatttaggggggggggggggggtaatggtgtgctgtgttataggctatggcagacagcggtgacccgcgtgtgtgtgtgtgtgtgtgtctgtgcgtgagagaatgggattagagagaggagagagagagtgtaagtgagaaaaaaaggagtgagagagacggaaaaattgaaaggaacggagtaagcgtaagggaggtatgcgttccattggtcattttattgaccaaatgccattgatttttggtgtggattcgctaaataattgtgtcccctcttcctagagcaaataaatttaaaaataattaatttcattaaatgtttctaaattaatgttttcctccccaattttcagtatttgtgaaaaacaaatgtcacggaagcgtaagacggcagcggaggaacagcgaaacaaacggaaaaagcggagcgaccggaaaaaggaaaacggcaaagaaatggtgggtttgaatttcgggaatgagaaggggaatgggactttttttaaaacaaaatttggggtagtttaatgcttcccattttttaaatttgtaatactggggcgccgcaaaaaaaaaaaagtttttctggcatacatttcttaaatctttacagctttattgccgtcatccaccgagggccatcctcgaaaagcaccaacggcgagagcagcagcagaatgccgtcaacgaccagcaacaacaacaaaatgagcagcagcagcaaaatggacacaatgagcaacagtttgacgagcaacaacacgaacagaatgatggcgatgagcagcagcagcaaaatcagaacgacggaggagagcagcagcacgcagaacagcaccagcccaacaacaacaacaacaactcgctcatttttgaggaggaggaggaggaagaaatgacaaatgccgacgaggaggaacagcaaagcggaattgaggccgatgagtcgacgcacgagcaacaacaaccagaagaggaggaggacggcaatgaaggcgaacaccatcaacacgggaatgatcaacagcagagggaggaagaagtgagagaggggcagtatgagctcgaccgagcatacgcgtgctacacgcacagcaacggccaacgagcgttctacgtgaagtggacccgtaagtaaaaattgattggattaaaaaaaattggaattgttaggaggggagcaaattggctagacgataaaagatatccccccgtccccactaattttaatggtcaaaattttggaaaatttacttgtgagggtgactaagggatgccgcccgaggctccaaattataaatggatttaattacacccgtatttgtcggaaacagcgagcggttgagttcagcttgctgaacttcacgcctaattgtgactggtgaatatcccccgcccattattcgcccctcccgggggtaacggtcgagtttactggtgacggcggtcgcttgcagaacttcccgtcccctgggaggggcgaattgtctcatccccttttcgtttactttaggggaaacggttgagtttaggcatgcgacggcggtctcatgctggaacttcccgtccccctttggtaaacgaaacccgaaaaatttctaaattgtaatgttcttggacggcatccctttatagtccttgcttccatgaagagggcttaggcacaaaaaaaaatgttcttgataggttggcggaatcgcgaatggatattgtcagttgattcatcagcaggcgagctcactaatcaatttatgttgacgtccgggagtgatgcgactttggatgcgttaggaggccaatcaattgcgggcacacatgcagattggctaaacaaaaatccaaaatttcagaaatgtaaaaaaaaacttttacatttgaaaaaaaaaatttttttgtttaagtggcgcacaaatggaacactggtgcggcaaaagcatcagaacacgacattctatgggcggcggacacggacaagaggacacgacagacggtatccaattttgtgttgcttttcataataataataacaaacaacaattcccagaattatagcaaacaacaattttcaggcggagaaacaattacgtgcattcatcgacaaatgtatgtaaggaagcgaggaggttgaagaaacggcattgaattaacatattttacatttaaaaatcaaaacatttctcacaactataacaattttcataacacatttcacactcttttctcattt

SEQ ID NO: 12992 - DNA, 2675 bp, Heterodera glycines
  unsure (1)..(2675): unsure at all n locations
ataacaaaaaatgaaaaatgaaaacgaaaaaattaccggttctccaaggaaatactacaaaattaaaatttatggaaatttttttaataagacaaaatcaaaaaacgaaaaaatgtagtctttgttctggacagttcttcaacaaaatatataccaatcggggtaaatttagaaaaaaaactcaaattttagaatagaaatgccaaaaaaaaattaattacaaaccgatttagggaattggacaaatttttgaaaattttggttcatttgattattgtaatatttaacattgtaatttttattttgcttctggcttttcgaatcccattttctttacaattaaataatatttagtcattagaacataactttgaaacagcgtgctgcatagcaaatttcatatccatcaaagcaataaattttaattgtttggccatatcctttcgcatcgagccagccaccaacgcatccttgccctattatttttaatgtaaaaaacattaaatagccaaattacagaccatggtttactgtaaaaagagaaattacccaaaaataattcaattcatttgaaaacatttattaatactaatttgcctaattagaaaggaaataagagtcagaaatcattataaaggaccaaaatttataaaattactgaagaataggaaaaataaataaacgcaaaagaactgaggatggccattaattgatgcataaactggggaaatagagcgcattaagagctcatttgtcagaaaatgatatcccccctccctccttttaatagagaggccctattaaagattattagcgagcacacatggcatgccaattaattatcaacactcactttttttggtgattggaggaggagtgttcagcgcatttgcccagtcgacacccttgttacccaatgaacaatcgcaggtaacattctcagatctggtcgttttttgcgtccgagcccgttcattatcacattcattctccatttcggatttggcacaaccccaataatgaaaagtgtttccaggctgatcccctaaaaaatggacagcaaaatgatcagaccaaatgtttcttgttgattaaataatttgaaaaaaagttcgacttcagtaccaaaatccatccctcttttcatcattcattttccctattttgcactactcaagtcattttttgcatgagaaaatggttaactttttggtatttttcaataaatttttcaaaatgattcagtagtccatgcaaaaaaaaaaaataccggaaaatttgaattttaaaattctaaaaaaaaaatctggttaatgcataataaatccattgacatgctgtgcaggtgacagtgtaacagtgctgaaaaccagctttgcatacaccctttttgttgcggtacacggcaccagacaattcttcggcaaatccttttttgcagaacaatgctttattaaaaaattcatttttttattttattaaaaaaacgattaccaaatgaacgtggcaaaagccagcagatggtagtgccaaaaattataagtgcaatttttgtgttcattttggtttgtaaattagttgagctgctgtaataaataagttagcttgaaaaacgattaataattttgataaacaaatttaatgcttcaaactcgcacttaaaatttttttttgcaagaaattctctcaaagaaatttttttttagaattttttaagaaaacaatctcaaagaaagttaataaagtaaaaatttttttataaatttaaatttctaggaataatcgtttgtcgagagaatttaattggtttcaaatttatttgaattaatggcacaaatagattataatctaaaatcacattaatgcattttttgttttggaattattttccaatgcaaaaaatgattgtgaattgatgattggacttgttaatttgtacgtccatcagtgaatattattcaattggttctgatgcttttctatccaatgtttaatggaaaataatgatgaatcatgatataggactttgattagaaaattaacatcaaaacaaaactcgcactatataattttttgggagaaaaaaaataacctcaaagaaagttagaaaaataaaaagatttctggaaacgggggggggggggcaaactgcttccccgtggacacttcgacagtgaggacaccgacaatgaggacaatccggcagatgtggacgatcggacagtgaggccaataggacaaaaattaacaatccgatagtgaggccaataggacaaaaatgtctgctgtgatttataattgctaaaaatctccacaaaatgccaacgaattctgtttagtttggccaaagattttttttcagtattgaaatgacttttttgtagagcaatagtaaacacataaagatttcggcgctactttaaaagctttagattttgaaattttttcacttttttggtcttatttgggatcccggcaccgaacttgaacaaaaagtcgactaaattcgaacttcgacttttgttagaatttgggttcggggtttggaataggcccaaataattgtcatattcatgttcagcgacctcgaaaacacccggttacggctctaatgcactttatgagtccaatcgacattgtatgagtccaaaangtattttatgagtcccaatcaa

SEQ ID NO: 12993 - DNA, 944 bp, Heterodera glycines
tcatattattacattaattagactttgtgctttggaatgataccaaaaagataggtttagctcaacccgaacaaagtttattgtataaaaacccggggattttgtcactgattggactcataaagtgcattagagccccggttacttggctttaggactttttaaaccgaaaaaaaaatttgaaaaaaaattagaccaaaaaagtgcaaaaatttttcaaaatgtaccgcttttaaagtagcgccaagatttcgatgttttggtgtgcataatgtgtgcggtgcgattagccccattccaccagccgaaatggaaaatttaatattttatgattaaaaaatatatttaattaacactttaaatatttcgttctcattgtcaggcacttacagaaatattaattacaaaactgatggtaccccaaaacgcatgagatataccatataagtcagaataagcataccaaagaaaaaaaatttatattttcaaatgattttgaaccgtttatgtatgtaccttcaactcgccatttttgattgtcaattaataatctttgttttcagttaagaacatagagtgataaaaaaagcagcatttttaattgtctctctccgaaatatttaataaacattaaggattaatcaattttaaaaaattttatgggtaagttaagatgtttttttgtgaaaaatgaaggtctttttgtttttaacttaaacaagaaattggcaagatttcaattcctttcccgcagtcccgctttttttgaatccccgttttcctttcctaaaaatttttctcagcctaactataccgtatattctctaattaaggccctgtctccattaaaggctctgtctccaattatgtccccctttctgaggatgttgaaaaataatcccccatctctatttatccccccgggggataaatagaattattat

SEQ ID NO: 12994 - DNA, 2120 bp, Heterodera glycines
tgaaccctaaaaattcaaaaagaatgaatttttacgtcacaaattataatttacttgcctttcggcgccgccaaaccaggacaatctttttaattttgttttaaaagggcttctaaaagggtgagattactgaaaattaatgaaaaatttttgaaaattctaccacagctctgaatctgccattttcccccctatttttctatcttcctcccgcggctcatattttgggatttttcagctcaaaaaatcatgcaaagctttttattctgatcataagttactcttaaccaatttttagattggatttttttttaaataaaatttttacaattaaatttttttttttgcaaattacggattacgccaaattacggcctttttggacctccgcaatgacggattacggatggccgtaattgaaaaaacgccgtaattacggatttccgtaattgaaaatcagttacgtccagccctgatccctgctgtataccgtatttcctaaaacaaaagccgtcccctgaaatagaagcccacttcgagggggttgaaaaatagaagctctagggcttattttaggaaataatgtgtgtaaaaagatttgctttttattttatttacgaaaatatgttttcagctgctaaccaggaattagctgcacaatttttcgctgaaaatgttaagccacggttcaaatttgctggagaagacgaagaaatcgctgtgaatttatttgacctgaccagaagtctgattgggatttggaagttttattttaactcaaaagaaggcaaaaaatataaatggaaactgagcaatttatttaagtactcatttgaaccaattttgctaaatgagaatgaatttaagaagaatgaagagggaatggacggaagaaacaaaacagcagcggaaagctcatcacagtcattagcagctaatgagcaaacgggcaacgcggacaatgatctgctgaaattaatggaagacaaatttaagaatttggtgaaaaaaatggcaaaaattgcacaaaaaatgaacaaaacatggcgcacttccatttatttttagccgtattaaacacaacaatttatcatggcacggattttatcgaccccatcgaaaagagaaaaaaatatttttcaatttttttatgttgttgtatgtttttttcccgtgtattttgaggaaacagagaatttgttggtattttgaaactgcaaactctaacattaaactgaaaaaatttgaggacacttcggccaaatgagcctgacaaaattagtgacggtcgtaactctaatgggttaattaataatccaatcctatttaggatctttgactcgacttttcagttgcctatcatgtttcgcaccaatttccttcctttttattcaactcataacaatattgccatgacggactattaaattgggttgtaagtaatcacaatcaccgcaggaggagtcgaacttataacttcctttaaagcgactttttccgctgctttcctgtccaatagaatttcaatcctttttcctgtgtcatgccatgccgttatgcaggagaagcaggacaaaatgtacattgtttcatggccaaacttgtcttatttatgcttaagatcgagaatttcaaatatccaaaacttttttttttactgccgtctgaggtgtcaagatttccatggaaatgttccgatcaaccttttgcataatttcctttttattcgcatcaacaattatacatagtagcaggttttttgatttttcttggtgacataaaattacgatttattattttgaaaaaataaacaataagtgtcctaatttgtaagccaaaaagtgactttacagtgccgtgccctcaccggaagcaacatgagaagcaaaaaaagagaccgattaagaaaaaaacggcaaatccgacaatgcccaaaaccatcacaatggcaacccattcgtgggcacccaaatgggtgaaagcgccgaaggcaacggcacccaaaattagtgcgctggtcatggcagtgacgcattggccggaattgtcaccgccacgcttctttcttctcccgttcttgatggcatttttaggctggacaataatttcatgtggaaaat

SEQ ID NO: 12995 - DNA, 1814 bp, Heterodera glycines
aattatattaaaatttgccaattgtgtataaaatgaccaatatgttttcggcatttctttgttttgtcatcgaggaacgaaatttttttcaagtttttgatggttttaattttatcaaaaccttgaattgattcctccataaatttctttaaataattaatatattcctctggttgttccgtatttttaccctcttccaattttttgcagaaatttttgagaattttttgaaaactttcatcaaattttatggccaaattttcacagcacaaaatgccaaaaatgggtttttgatgccattcaccaatgctaaattcaccatcaaattttttgtttttcattcctttaaataaaatttctgctgaatttaacattgccattccgtttttgaacagatctaaagaatagggcttcgttatcaatttcattgaaaaatcataattttggtttattcttaaaagttaaattaagtattcttttttttaattaaaaaataataattcttatttgtttctggtattttcgcttattgtataaaacactatccaatcgattttttaaaattatttttgatatggaaaaaactttaacttgaagctgtattctttttttctattacctcgttggcattttggcatctctggcacttcttcatgactcaatattaataaaagcgtaaatacaaaagatatttgtttgcaaagtttttgaattaaaataaaacatgttatattaattatttcaattttaagaaagataatttgataaaagaatttatattacggctatttaattatataatatagccaactcatgagcatatgaatatttttttccgttatttgccaacaaaatcaccaagaattaatttccgactgttattctaaaatgtctcttcctttttttatgaatttttatatttttaatgttataatttttaattgaaataaaaaaatttttttttttcaaaaatatggaaattttccgaatagagggataaattttcaaaaatttcttcaatcattaaattatagtaaaatacatctaaaatggctgaatacgctataataacttgttttagaaggaaaaaaagcattttttagagaaacccgagcaaaaatctgaaaatttccatttttttgtttttttatttttgaattaaatttaccaatttttaagaaaattgaaaatttaaacaaaatctcgagaagattttgcgaaaaaatgattttttttgaaaaattttccggtctctaggaccaaaacggccaatttagctgatgggggccgttctaataggtttttttggaaaatgccaaaatatggaaataaaatatggactaaaatgcaaaaatatagaaacatgggcataaatcgcgaaatatggaaaaatatggaaaatatttatatagaaatccttcctagaagcttcaaaccaagctaaaaacatgttttttgtgcgtttcaggcctcccacagtccaggaaaaaaatatggatttccatataatcccgagctctaataatgaaagagcgtacttaaaaattaagcataaaaaataaaaataatgattggaatttgattaaaattgtaaggaaataaaagtgatgtaaataaaacgaggaaaaaaattacagaatatctataaacttagacttttagttagtttgcaggaaccgcccacttcgggtccgccactttggcgtaatccattttggtgcccattatgaatggcttttttgggtacacatatacaattgtaagcactacaaaaataaatttaatatcaatcggttcctctaggatccgaattt

SEQ ID NO: 12996 - DNA, 734 bp, Heterodera glycines
  unsure (1)..(734): unsure at all n locations
gcatcggcggcatcgccagctcgaagtccaacgacatggtttcaggtgcaaaattcggccatctttggacaatcagttgaagcatccttgtgtatatcacttcacactttgaagtgagaatgcagtacgtaatcggaaaatccaacacttcgcttaaaaatacaaaaaaaatatatgaaaaattaggcttttactttgcaagaagaacacaaatttggctgaacaacggtggggccaaactgaaagtgccatcagcgtacacatttttcataatcccagtccattgcgaagtcgaagagcgagctaacaccaaaagcattaatatagaattatgaaattttattattttcatttcacctttgaggtcagcttccaaacagagtgatgcagcaggtggtacactttcgtcatggcaaacacgttttataacctaaaataaatgaacaaatcaaaccttggcataaaaattcgcaaaaattgacctttttttgccgcagatttggtcggaaaagcagttaacattgaggttgctgtcgtcactgagttggtaaaaaactaaagtgcacactcatgttccagcttctgcttgtttcactttgttttaatttcctgattggaattgtctatttgtatttgtagtaacaaaaaaagttttttattaaaagtaattaatttatgggtgaaaacagctaaccagactaaaacgaccccctgactanaacggtcagactaaa

SEQ ID NO: 12997 - DNA, 4023 bp, Heterodera glycines
  unsure (1)..(4023): unsure at all n locations
ttttcaactttatctgcgccgatggtgggttttggtgttggatttccttgcgcctttttcaacttggcttggaaattgcattatcaaccgtcgatttgctttttacgttgatgaacacttcaagacacgcaaaaggatgttgggcaaaatgggaatttgccacaaaattggagagaatggcaccaagaaaatgcaaattgacgatgccgatggaaatccattgccaatcccgcgaaatccgttgccgaacaaagtcatcggattcagacgcattcagatcaagtaaaaactgattagatagaaatttttcataatttatctgcacttttcagttacatcgatcaaaatgtcatcgaatttctccaccgttttcaccgtcttttccccatttgttcaaccactatgaacattaccactgaaaatgtgcgcattttggactactttttgctccatatttggccaatgttctgcgattccatgcatctgatgcttttgaacaccatcctttttcgccgcttccgtcaattggccccgtcatcactcagcgattgtccatcccttcgcgttgtgtggttggatgacggcactttccccgaatttccgcccgatgacagtgccatggcgtcggatggccaagcggtgaccaaatgggtgttgacgccccgtccggatggtcagcccaagttgctcaaatcacctgttaattcaccggatcaatggtcgtcaacgatggaacagttcaaagcggtcggtgattatcacggggcattttattcgttttttgcgcttttttgtcccatttttaggaattttccaatgcttcttctccggtttccttttcaattaactttctgccgtcttctccgcttgactccgctgtgccattcgatctgatcaaccaagcgactggggagcaattgacactggaacaatatgcaaatggtttttggctcagccgttgcccaattggatgggatgagatgaaatgggacaatgtgtggaaggaattgattgatgctcgaacgaacccaattgacattgtgatcaaagatggtggatacgacgacgggtgaacaaaacaattttaaaatgatcagtgcttttatgagtctaatcgacaattgagcaatgttttttcttcagttttctcgacgccgcttcgcccgggccaagtgatcactgatcagcaacagaaatgaatgaattaattgatggttaattgatgcgattatgttaccgaaatgatgtgggcactttgccatttcaatattgtattatgtccaatttgtctgtctgtatttgacctttgcttgctcgcaaatgcgtccatttccatggtattttatttatatgtgataattcatggtgattaatcgtggataaaatggcaaaatcccaccccaataaagcaatgctttgccacaccaaattcttgttgaccttaggccaagtgatggcaggatatgcccaattaaatttaaaaaaaacccatacttttgcgtagagttgagcggtaatcggtaattgtaaaaaaaccggtaccggtactgaccggtaatgcaaaaaccggtaccggtaccaactttttccaccggtaccggtaccggtaaaaaccggtaattttccaacgtaaaaatttttggacaaaatttttcaaatacaaaatttttattcagttttcgcgcgagtgcctgttttttagcattagaattgttcagaagtatatgtatattgagggtgaccaagtttttttttcaaattcaggataaagaacactaaaattcagatgtagacctcaaaattcagattattgcaaaacaagggatcagcggccaattttccaattttgcgaaggggtctccggccatgtaaattaatgtaaatcaatgaccttttttgctttcaacaccgcttttttcgcggcacgtttttctcaagacttttggggaacaaggagggccggcggtgccgataggcgccgccgggaaaaattttgtattttttaatgcgatttgttaacagaatttgtaaaaaaagaccaattgattaatttttgggtttttaggatgcttaaaatgaaagaaaaaaagttggaatattttttttaattaaaatttcaattaaaataatggtaaagaaaatatgaagaatattctatcccagtggggaattgaacccaagcgagaaataataaaatcagaaggtttagccacttgaccacttatgcatatgaacaaatgctttaaatgaaaataaataatttaattttttttttctcaaaaaatttctccttcttcaccattccctactcttttctcacccagacccccattcttaccagtgcaaatttttaccggcggtaccggtactagacaaaccggtaccgatactttgatttttgaaaaaaccggtaccggtaccagtaccaaaaaaaccggtaattaccggtcggtaccggtaccggtaccggtaccgctgaaccctacgtacaaggcaaatacaatagtaaaatattaaataatttttgtataattgaacacatgcaacttttagagtattaaattttaaaattgtaaatgaattcctatttttggttttttggtaataataaataggggtgaaaaatacatccctatgaatggaaaatttgctcaaaaacttatgccaaaatttattatttttttaaataaattttatttttattttaggcgacaattcaaataaatttttattaaaaattataaactttaaataatttttaaattttcaatatcaatcatgaaataaaattttaaatcattagagtaaaattaagttcataggatggcccctaaattgccgaaaaaacaatatgaatgatggatgataaatttgaacgttgcttttagacaattaataattcaaaaaatcattatcatataaatttgattttgtgctcataaccccaggtggagataattaaaaaaaaacttttttgacaataaataatctcattaaaaataatcgattaaaaatgaaaaaagaaattaagcagtccaaataattgtaaaagaaatgcatattataatgttaatgaataataaaataattaacttacaaaattttgtagcaaaagaagaaaaaaccaaaaataggttgaattttctgagaaaattgaaagtgaggccaagaaaaaggcaagtaagcttcgttatgagcaaagcgggagtcgtgaaaggcaagcaacgtgaaaattatgaaaaatttgcttataacacattcaagattaaaaataataataaacaaactttaattatttaaataatacatatctcttttagctaaagaaatattatatatatatatatttttaacatgacatttctaaaacgatttatcagaacgaactcatatgaagcaaacaattaaaaataaataaataattcaattagcacttctccatttttagcaaaaatataaaattaatagctgctgcacaaattcgcgaaaaattataattaggacaaaaacaaataatttttataaaattgcaattttaaataatttcagaaaaatatgcgcaaaatttaactcatatacacacatgaaaatgagcaaaatcgctcaagtcagcaatcaccatcaaacggatctttttggttcttgccctttgggtatgccaattttatttttattatagtatgaaatacaatgaatattaatattcgggagggatgatgttatatttctctttacttgataccgatttttgactcagacctttttataaattcttgatttatttttacattattaacatcgcctcaaaatcatttcgtaatggtctaaatatttttttgaataaaaaaacacgaaattaatcggtaaacagacgacgttcgaattgcccgaaccgtgtaggggatcaactcttctttaatcatttaatgaccagcatctcactttgaccagtgtaaaaataaaatatgatacctttgaaagccanaaaaaaaagtttatttagttttgcagtctccattccat

SEQ ID NO: 12998 - DNA, 2240 bp, Heterodera glycines
  unsure (1)..(2240): unsure at all n locations
agaattcgaaccgttactgcacgatntagtcccagagctacgcccgttgcaccgcctgaaaaatgggaaacgtttttttaaaaaaaacaggcctagaaaattttttttcccaccggtggccatcacatacgcctgcaacagttgcgagttgctcaacgcatcgcccgaacggttggagtagttagtaattgcgttgaaagtctgaaaaaatcatgtaaaaaagaaattttctgaatttttttttatctacctggttgacgaattgccagccaaaaactgcaggggttgacctgaaattttaaaacagaattttttacaatgcttgtaaatgaatgaaacgcgtgatactgacttgtagaaagtgagcataccgccaaggctgaaaaaattttccaagaatttcgttggggggatttaacgcacattaatgtgacgaccggcactcgtgcactcattcgtcctaacagaagcaccttttcaccagtgtctggatggaatgccgagtcgtacaaatgtttggcacgccacagctcatcgacggacaaattgtcggagtaattgcctgtcctggaaaaaaatgggggaaaattagtggaattaatgccattttagtgaatatggcttaaaacatagaatttcatggcgtaatgatggctaacagagatgaatcaaaaatccataagcgatttttcagtattttcaacaaaaatttttgagaggattctgaaaactatggaattcaggttattaaaatcacaaaactaaatgaaaaatcaaaaggattttgcttttggcactttgctttttagggcccccgaaaaaattgaaaagggcggaccttttatagagatttggaattggttgaatagatgtcagattcattattagcgacccgaaaactatagatatttacataatattagtgctgctcgagagtctcgctctcaagaaaagtctcgggtttttggttgaccgccatcctcattttaatgtatggtttttcaatgttcttcgatgttaatcttggccgacatacaatcattttttccgattgtgtattgtataaacaagaattttgcatttaatttaaaaaaatatgcatttttaaaatttaatttcgtgaactaataaatttantttgatatttaggaaaatactaatgagcaggaaaaaaaatattttattaatgggtggaattattagaaattaaaatttttttattaaccaatgttgggatgaatttttaaaataatttttattgaatcatccaaattaaaaaaaaaaaattccggactgactcctgagtcgaaatttgtcgatttttttattgagtctcggtttcgttctcgagtctcggcgtcaatacccggcttcggtatcggttctcgactatcggaaaatttcgactctcggtcagcccaaacatttactgtacagtacttgtttgtgttggacacagtatttcttggcacgaatgtcttcggtcaaatcaaggcgcataaatgtgtaatttgtactcctcaaatagcactccaacgagctttgagccaccccataataactgataattttaaataatatatcttttttttttaatttgcattaattataatttttaagcattttattgaaaagctaggtaaattttgtaaaaaaaaaaattcgccaaacggaggacaaatccggaaatattatatatatataatttcttaaaaaaagaaaatttttcatggtaataaatttttatcagtttttgagccaccctttaataactgaattttttaaaaatatttttatatttgcattatataattttttaagctattgaaatgaaaaacttggcccaaaaacatcaatgttttcgcctttagtcatacaaatttgcttaaaaaatatttttctttaacttaatgaataaaaaaaagtcaaattttctttaaacattttttttaaaataattattttcttgcgcagcatttttatgcataaaattgggtaaatttttgagaaaaaaaaattcgtaaaacagtggtagacaaacccggaactatatatagaaatttattttattttcacccactttttcaatgttttgttcatattttgaacaaaaaacagcaccataatgcgtccaaaattgggtggacatttgcccatgttttccctctttaaatatggcgtttttggcccaattgtcatggcatttggcaaagtgtacaacaattttttgttttgaattt

SEQ ID NO: 12999 - DNA, 3412 bp, Heterodera glycines
taggtaaattttgtaaaaaaaaaaaaattcgccaaacagaggacaaatccggaaatattatatatatatataatttcttaaaaaaagaaaatttttcatggtaataaatttttatcagtttttgagccaccctttaataactgaatttttttttaatatttttatatttgcattatataattttttaaactattgaaatgaaaaacttggcccaaaaacatcaatgttttcgactttagtcatacaaatttgtaaaaaatatttttctttaagttaatgaataaaaaaaagtcaaattttctgtaaacatttttttttaaataattattttcttgcgcagcatttttatgcataaaattgggtaaatttttgagaaaaaaaaattcgtaaaacggtggtggacaaacccggaactatatatagaattttattttattttcacccacttttccaatgttttgttcatattttgaacaaaaaccagcaccataatgcgtccaaaattgggtggacatttgcccatgttttccctctttaaatatggcgtttttggcccaattgtcatggcatttggcaaagtgtacaacaattttttgtttgaatttttgttttcttcaaccgacgaaattcgcaacggacgatattggtggaacagtgtaattaagcacaaaattgttgaaaatgatccaatgatagccaaataaacaaatgttggcttcatttttctcatcattttcatgtcagtgcgcttaaatttaaaaaaatgttattaatatgtctggatatgtaaataaaatttttttaaattatcttttttggacaaaatttattagaaaagggtgaataaggaataaaatattataaaaaggaacaaaacagcttaaaataacaatttatttatttaaaaaattattttgagactgatttttaggaggattatttttcaaaaaaattcttttgaatttttgttcaagaatttataattaatctcaaaatctcaaaatatattaaaaaaaaatgaaaatatatttgaaaaaattttgattttttggacatttcaaaaaatttccttaaaaaagcctttaaaaaaatagcgaatatatacgggaaaaaacgcaaaaagaattcaaaatacaaaatatatataaaaaatccggttgattttaaaaaagtcttaaaaggtttgacttgagaaaaatcttatccaaccgattcaagaatttttttctcgacacttttgaaagttggtaaaaatttgttgaaataaaaattaaatacaaaaaattgtagaataaatgtgagatttgcgcgaaagctctctgctacacatttcagagatggcgtcgatttcgctgattgttttaaagtacaaaacaatgacagaaaagtgggttaattgcggaagaatttattttcatatgtttttttctttatcagctgaattatctaatggaagaaattgtgtcaaattttttaaatttacgattaaaattaaacaattttaattgttacattcatgaatttaatactcacaaattagtaatttaataggattataagttgttttaaagctgtttaggcgatcagggattgaaaaaacttaagtttgaggcccgattttggacaaaggcatgaatgtcggcgaactcttaaggtctcaggaatataaaatgctagaaaagagcaaatagtgacatttagaaaattacaatgagaaaacacgaaatacagcttttttcgagtaagtctattgcgttagtccagaatttagttagtcaaaaattcagtagattttaaagcttttgtttgctaccaaaatattggcattgacgtaagtaagtaaaaaaaaatatggcttaagaaactaaggatggtctccattaattggacgcgcagtaagtgattggacgcctgacttttggttcacaaaatttgtttttgaaaatcaaaaaggtccatcgataccgttttgactaattgcaattttccgcactttcgtcgcatcaccgggatgttgacacaatttgcaaatgcaacggtggcgaacggcatcaggctaacccaaattggtggcattttctgcaacaacaaaaaaaatgcttaaaatagaaaaattattggtaaagtacagaattcgaactaggtaattactagtgaagcaacttttagtgacgaaaaatcccaaaatagttaactaaaatagtgagtaaaaatgccaaaatagtgaagaaatagtggcaaaaattccgaaatagtgacgaatagtgagtgacatattttcagccaaaaattaagcaaaacgaactcttttcaattgcggctaattgctttcggactgcatcgatagaaattctctaaaaaattaaaaataattttgacaaatctgaggccaactcggctccagggacaaataggcttttaggaccgacaactcacaatgggaaaaaatcaaaaattctactttaaaaaaaataataaattgggactctcaatatggaaaatggtcaaaaatttaaaaaaaaacgctagctttttcaaaaatctaagtttttcgcaattcaaaagaaaatacaaataagtattttaaaaaatctaccttttaaaagacaaactttaaaaacccttttttaaattatcaaaaaaagctttcaacgaaaataaaaaatttttattgaaaaatggatttcatcatcacctagttgagttgattggtcctgacgcaattttgaaaataattataaattcaatttgaataattataaattcaatttgataattataaattcaatttgaataattataaattcaatttgataattataaattcaatttgaataattataaattcaatttgataattataaattcaatttgaataattataaattcaatttgataattataaattcaatttgaataattataaattcaatttgataattataaattcaatttgaataattataaattcaatttgataattataaattcaatttgaataattataaattcaatttgataattataaattcaatttgaataattataaattcaatttgataattataaattcaatttgaataattataaattcaatttgataattataaattcaatttgaataattttataaattcaatttgaataattataaattcaattttaataattataaattaatttttaaatcctttattcaattttgcaccttattggcccgccaattccatcccaaatagccgtcagtgcattcggaagcattcggcactttttcaaatggtgattgccatccattaaaatttatgttcattgccttccatccttaaaaatttttttcgaaaaatggggggggggggcaaattgacaaatttaagccttcttgggcctgaaatttgaccatttctcacttggt

SEQ ID NO: 13000 - DNA, 3079 bp, Heterodera glycines
ctccctggtggtattttcttaacacctttcaccacttccaccgatggtgctttgttagaattaaactaaatagggtgttggtatatcttcggtagtgtctatttcgaccgtaaatttaaaaattattaaaatttaattcctttcgagtggatttatacaaatacagtttctagttgttttttattactcatcgtaatccacagtaccccacctcccctcactttcgccttaacaatttgaatcgtcaacaaataaaatactcattccaaaaagggtttgaagacccaaaatgatttaggacaccgtaacttccaacaacggggggacggactcgccgaacaatgtattcttgaaaaattatgcataaacacagcgcctaaaaagcactcattcagtgccaatgccaactcagtccactgtcattccaaagtttggcatttggtcagcatcaccaccttctacaacagaatcgggccgttcttcttcccttccaaccagtcttttgtctgtgaacaatgacagttttggggaagtgccattgtcgaatcggtgcttttgtaattacggcccgtcggtgtgcgacatggaggacacttgcataaaagtgggtggccatcccttccgagtgaatttacccttcagcacacttcggctgcctgttttcacgcgattgtgctggtcattcgtttgctgtgagtgtccaaatagtgctgtccttctcctttaaggagtttaattctggcacgggtgccatcgaacgccgtcacttttttggttgtgctccactcgaaaaaggctcagacgcatcgcatcttacggttggcgacttctgcaggaaaaaaagcgccgactttttagtgcaacgcgtggcgttcctcccactcaaacggccgaaccgtcgcgtgctgttacgagggcaatttttgcaatcggaatttgactttgcccgactctccggctctcgaagtgagcaccggtctcaaattggcactttcgctccgcgcgcagttcgcccctcggcaccgcccttctcccgcctttcccgtgccgtccttcgctccatttgcttttcttctgtttggctttttggtcggcctttgccttttgttgactttcgctgttccctttcgctgttggcttctcaaaaagaaaggcattccccgggggaatcattcgccaatggcgcccctttctaaggcattccttcgggcgtcgttggctcctcatcctccaccgattcggccatcgcattgttgaagcagttccaacagaagcggcacagcccggcgcccctccagcgacaagcgccgcttgggtgccgtggcataattttccctattgtcgttgtcggatgtttaagtttcgagcaaagctgttcagcatccgtcgatggggtgactctcgtccaacggagtatcgctttggacctccaacttatggaagtgttcgcccgggggcgatacggcgagttgcgaaaggcattttacagggggacggtggtggcggtgaaggtaaagtcggactgacggaatgggggaaaagcgcaaaacaaacgcacagatattttatacgacggaggaggaatcgtggcagaacgagcgcgacatttaccagtgccaaatgctcaaccacgagaacattttgcgtaaggactccacaaaatgacaccctttgacttgtaacagaatttgtggcggcggacattctcagcagcgtcgagtcacttacccaaatgttcgccccccggcgttcgcctcaattcggcgttttttcaggcttcttatcaccgacttccaccctttgggctcgctttacgactttttgcgtgccaacggtcgtctcagtttggacgaggccctccaattcgcccttaggtgatttggtagttggaaattgcgggaaattgaacttcagcaccatttcggggttggagcaccttcacaatgcgttgagagggacggcggggcggagaaagccggagatcgcacacagagacatcaaagtgaaagcaattaactcaaacaatcagccgttaattgaaattagtctaaaaatgtgctggtgaagcggcgcggggtttgctgcgtggccgacttcggattggccgtccgattgttcgtttttttgtgccgttccattttcacatggatagtttcagtgaagatggacaaatcgttccccgaagtgtgaacataggcgttggcaccaaagttcgccattcgtccgccctttgctccattccttccaatttagcgttacatggcccccgaattgctccttggcacattaaacgtgcggaatttcgatgccttcaaaagtgccgacatttactcttttgccctcgtcctttgggaaattctccactgtgtccaggtcagcagcagaggggacacagaaggattttccagtttcaaattagaattgggtttttcgcaggtgtccgctgcttcttccgagtgccctccgtctttttcgtctgtccctccgccagcgtcgtcccttcccttttccgctccgtacgcatgcaccggcgttcgtccccaacggatgctcggcggtcgttcctccggcggttccagcggtttcgcctccagcggatgctccgccgatcgaaattttgcggcattttcaaattcgttgccaatgggtggtcaaagtgagcagcagcattttggagaagtaatgaatgcaataacagcatactgaggcattttgcaagtgatgatgatggcactttaacagttggaagtgaaaacggcggagaagacgagcagagacggagaggaaggcaagcggaggacggaggacagacaacaaaaagtgcagagagagcacagggaaaacagagagcagagagagtacagagagcacgcgcttccctttaagggaatggtgggcaacggtaagaagccaaaaatagaggcaaaattgataaaatccattcagacccgagctttgagcagatgcgtcaaattgtgtgcgttcaggtggcgaatccctccccctcccctaataattcacaaattttagaaactccgtgaggacgatggaaaccccaatggaatgacggcgccaatgt

SEQ ID NO: 13001 - DNA, 931 bp, Heterodera glycines
gaagaaagaagcagaaacagaagagacttttgaaaaaggaaatacccatctttggccttcgagatggcttattcatatgcttctgataaagatttgcgatttatcattcttaaattgaaatcccagtggtaagcagaaaaatttgaaaaaaaaaataaagggacgaagatggaaaagaaggaacagagagagaggagacgggagagagaaaatgaggaagagaaaaaagagggacaaagagagaaaagaaggatgagataaaagaggaacgaagagggaaaagaagggggagagagagagagagaggagacggaagagagaaaatgaggaagagaaaaaagagggacaaagagagaaaagaaggaagagagagagagagaggagacggaagagagaaaatgtggaagagaaaaaagagggacaaagagagaaaagaaggatgagataaaagagggacgaagagggaaaagaagggagagagagagagaggagacggaagagagaaaatgaggaagagaaaaaagagggacaaagagagaaaagaaggaagagagaaaagaaggaagagagagagagagaggagacggaagagagaaaatgaggaagagaaaaaagagggacaaagagagaaaagaaggatgagataaaagaggaacgaagagggaaaagaagggagagagagagagagaggagacggaagagagaaaatgaggaagagaaaaaagagggacaaagagagaaaagaaggatgagataaaagaggaacgaagagggaaaagaagggagagagagagagagaggagacggaagagagagagagagagaggagacggaagagagaaaatgaggaagagaaaaaagagggacaaagagagaaaagaaggagcaataaaggagggacaaagagagaaaagaaggatgagataaaaga

SEQ ID NO: 13002 - DNA, 1345 bp, Heterodera glycines
tttttatgtggataggtaaatggggagaattttgggtctcgggtgatgggaatagacaattacagagaaaaattaatatatcgatgttttatgaccaaataatattaatgtcaaagttgaaatcaaaatgtgttgtcaagttttattctcattatcagacaaaacataatatttaaaaagaacaaatgacaaaattggaagttggatggatgtgccggccgcttattctttcgtactgttgctgattttgagggagaattattgctggccattgttgttcagtgccccttggaaaagatggatgaattaacagggagcagctcgtttccccacatgaatttttttaaatttaataaattagaaatttcatattaaggaaacattggaaaagtctaaattttaaattcaatttttttgtttgccaaaaacaacatgcaaattcctatttttcgtgttgtgtggtcaaggaaagaactgacaatgactttaatggaacaaaaggaatgacaaaccaccgttctgctggtcgaggggcggctgaaacacaacatcatccagattaaaattcgcattcggaggcacttctaaaccaatgaatgccattttgacacaaatttaaatgccttttcgggcttaaagagggtgttgccaaattttacaagtaaaaccggagagaagaaaatttccgataaaattagcagttttctctgtaaaacttaagctcataaatttatttatttttggttttggtatccgatttgaaacaaacctgtcagaggttcaagttgttccgtcaattgatcgttcatatatcccaaaagggaattttcctccgtaaaacggtcaatggtctccgataattccgcatgcaaacgctgaaggcgctaaatttcagctggtttacataaggttataaaagaaaaaaataaataggatttgctggactttctttgtattggagaaaccaaatttcccaaatcagaaacttttaaaaatttgttatttcgccggaatcgggatccggtctaaattagccgagaacgcgattaagaactaatgggttcccggtccgcctttattccccgctgtttctttaataaggtaagaaataaaaacatacgttataattctgtccattgggattggcattggcgataaccgcagtcacattgaccactaaaatgtgccaaaaatgagcagattggtaaaacgaagggaaatgacaactcacccggctgtgcagcagcagcaaaatgagcatgattaaaatttggcgggatgccacctaaatcgaggaattctctgttagaatataaatttaactactttttaaggtataatggat

SEQ ID NO: 13003 - DNA, 2364 bp, Heterodera glycines
tattgctggccattgttgttcagtgccccttggaaaagatggatgaattaacagggagcagctcgtttccccacatgaatttttttaaatttaataaattagaaatttcatattaaggaaacattggaaaagtctaaattgtaaattcaattttctgtttgccaaaaacaacatgcaaattcctatttttcgtgttgtgtggccaaggaaagaactgacaatgactttaatggaacaaaagaaatgacaaaccaccgtgctgttggtcgaggggcggctgaagcccaacatcatcaaactcaagcaaagccggattaaaattcgggttcggaggcacttctaaaccaatgaatgccattttgacacaaatttaaatgccttttcgggcttaaagagggtgttgccaaattttaagtaaaaccggagaaaaaaagaaaatttccgataaaattagtagtttcatttgtaaaacttaagcccataaaattatttttggttttggtatccgatttgaaacaaacaagaactgacaatgactttaatggaacaaaagaaatgacaaatcaccgtgctgttggtcgaggggcggatgaaacacaacatcatccagattaaaattcgcattcggaggcacttctaaaccaatgaatgccattttgacacaaatttaaatgccttttcgggcttaaagagggtgtcgccaaattttaagtaaaaccggagaaaaaaagaaaatttccgataaaattagtagtttcatttgtaaaacttaagcccataaaattatttttggttttggtatccgatttgaaacaaacaagaactgacaatgactttaatggaacaaaagaaatgacaaatcaccgtgctgttggtcgaggggcggctgaagcccaacatcatccagattaaaattcgcattcggaggcacttctaaaccaatgaatgccattttgacacaaatttaaatgccttttcgggcttaaagagggtgttgccaaattttaagtaaaaccggagaaaaaaagaaaatttccgataaaattagtagttttatttgtaaaacttaagctcataaaattatttttggttttggtatccgatttgaaacaaacccgtgagatgttcaagttgttccgtcaattgctcatacatatatcccaactgagaaatttctacagttaaacgggcgatggtctccgtcaaatcagcgtgcaaacgctgaaggcgctaaatttcagctggtttacattgggttgtaaaagaaaaaataaataggatttgctggactttctttttatttgagaatccaaatttcccaaaccagaaacttaaaaaaaatttgttatttcgccggaatcgggatccggtctaaattagccgagaacgcgattaagaactaatgggttcccggtccgcctttattccccgctgtttctttaataaggtaagaaataaaaacatacgttataattctgtccattgggattggcattggcgataaccgcagtcacattgaccactaaaatgtgccaaaaatgagcagattggtaaaacgaagggaaatgacaacccaccgttctgttgctgtggcataacagcagcaaagtttggcaagaagcctcctaaatcgaggaattttccgtaagatataaatttaactactttttaaggcataatggatatgggctcgataaaaataattttctgttatcgataaagaccaaccccgctgctggggatttcggggcttctgatcacgcactaataacattgatttgcaaatcagtgattttgaaaagcatagatttagggtcaataattaattagatttgtcaaaatttctaaatatatgatataaactatggtaaataaataattgcaaatccgatattcatattcgtgatcagaagccccgacgaccccctggtttaatctttttgtttaattttcaaacaatgaaaacaaagggtgagctgacaatgcgcgcggtttgttcaccattaaactgctaaaattggacatcgttttaaaaaataacctgtcaaacgcacgatcatccgtagcaaagccccgttctgacgcacaaatcgggccctttcagtgttcagacgaacgatagagcgtcgctgacaggcaattgccgaaaacaattcctaaattttgacggtttcattggtgtccaaatcacataatccgaaactatgtatgtagttaaaaatttaaatttatttcttcctcaactataacaatcttttagcctaaaaaatcaaatttcattattctcgaacatctctagtaggacgaaagcaagaacgaagcggattgaataaaacccagggagtgctcatctggagattctaa

SEQ ID NO: 13004 - DNA, 2734 bp, Heterodera glycines
  unsure (1)..(2734): unsure at all n locations
atgaagggcctttgctattcccaggtaaaatttaaatattccattttgaaaaataatttgacaaggaaatatacaattttaaattttccttgttttagtattttcatctttcccgaaagttggaaataaaatgccctatttttaaaaggttgggcctttatgctgtgccatgtaaattttcgaatttttttaacaacctttgtgtaattgaaattggtctctcattgtcttctttcacacatttcctcccattttaggtgatttgcggttgcattcgtggcgcgttggaggcactgcacatggaagtgcaagcagtgttggtcagcgacgttccggagcccaccgaactgcgcatcaaagtgcaccgggtgttgcaagagtccatcccggcgggggacgaaccgtagctgaggaattgaggataaaactctctttttgtgattatatcccatcaaaatgtttattaatttaattaaattttaaagaattaaaaaagacctttaaccgttgtaattggcatttgatgcacgaaatttcataaccttaccttttttaaattcttaaaattactttatttgttgtttaacagagatgggttcgttggcggtgcaaccaccgagcggtgtgacgaggaatctgacggaggtatggattacgggcgaaagttttatttttgaagcttttagtgttatttgtctgtcaaactagtaattttttgatcacttggagggtcgtattttacgaaaaaattacacaccaaaaaattaaatttaaaaaatggaagatttttttttcttcaaattccatgttcaggtgtttgtgtttctgcggaacaatgcccagcaagagcatttggtggaattgaacagccaacaacgtgtcaatttggacaccggtaaaaaggaattgccatttgcacattgtttttgttattgtatattgcgtttagatgacaaaatgtgcctgatcgccatcgatgagggtaaaagtgttggnttngggggnggaaagatanaggtttgggtcaacatgatcgacgaggtcaactacgaactgaccaggcaagtgttgtgcgcaacaaaagtgtcggttgattggagttaaaataattgccggatttttttaattgcggaagaaagctccttcgttgttttgccaaatgctcttgctattctttagaataaaagctcgtcagaccgcgcttcgagaattgcaacaagttcgtctcaacaaaatttatttgtttacgggaaatttcaatttttgcagaagcaattgaccgacttggacttttccgatgacaaaggcgcatcagcagaagcaggaaaagtggccgaactgacggaagagctcacggcaatgtttgggcacagcaaacggttgataaagtgagcacaaaaaaatacttgcctaattgactgacaatgaacccattcaattttgcttttattttctggtttttattaaaaaacaccatttgaacggatttttgcaaaaaaaaaattgtaccaattataaggctaatcgaagaggacgacacggacaaattggcatcatcatcctcatccttcagcaaattgcggcacaatgttgtcgccagtctgctgttggtgctgaactcgttgatgcatgattttcggacaaggtatatttgtttctaaagagtttcggacattaatgaaatcctgaattttcttttccattcttattcattgtcagccaatccgccttccttcgccaattggactcgcggacagcaaatttggacacttttgtgctcaaatcatcgacaaatgttgtgccaactgctgcttctgtttgtgccggtgacagtgggaccacggacggtgccatgacaagttgcacgagagacgctgacaagcaacagcaggaagaattgacaatcgaccaaattcagtacatcatgcaaaatgagcacgtgtccaaggagcgcgaacaggaggtgcgaagaacaacaagatccccatcccctgctgtttcccccgatttttttttatttctaacttattgttagaattttttcaaaaaaacctatgagcttttggtcattaataaagggtttttggaaatatattaaaaaccaaaagggggggggcccttctggtttgcaaaattttgtgttttatttgagtttgggttgtggattatttgtcttgacatacaatttttaagtctgacaaagagcggacccactctttcgaagcaatttgaaaagcgcattggttattcaggtgctcaaaatcagcaaatcaattctggaattgcatagcatgttcaaggacattgcgtcgatgattattgaccagggcacaattttggacagaatcgattacaatgttgagcagtcggcgtctcgtattacatcggcgtttaaaaggtgggttgttttggcattcatgacaaacaattcattgccaactgaccaggggcactcccaagtcccatctcttgtcagtaaccagaaaaataagaaaatttttctttttatttactaccatttttgtgaaatggtcgatagaattttacttttgttcaattgttacgtgattttggtaaatgtcctttttgagtcaaagagttttaaaaaatttatcaaactgaacttcttcgaagctgattggtgttcagggactttgtcttttgtgaattacatttttaagaaattttcagtgtccacaaggcggacaggtaccagaagaagaacaagaaaatg

SEQ ID NO: 13005 - DNA, 2064 bp, Heterodera glycines
  unsure (1)..(2064): unsure at all n locations
agtttcgaaccttctaaacgcagtgcttgtttgtccttttctgcactaatactggagtatgtgtttctggttcactggctttctcaaccatgtttcaaagtctgactctattgaagaacttgaggttgatcctccgtcagattcatcggaactttgttggaccgtttctcgatctgattcattcaaatttcttggactattcatttcttcatcagattgatcagaccccgtgaaatataccgattctttgcttgcattgctgccagcttccactctttccgcttcctttcctttatatattttggtgtctttttgtctcatttttccatgtccctgactttctggttttccagaataatattgaaccctttcatggtcaaattgttctgaagttacactgtgttttttcggttctttgtttttgactcgttttgggacttcatgttgtccataaatatatcttgtactacttcggctgtgactttgttgcctctccaattttcggtgggaagtttcctcatcagtaatttctaatgaatttttgtagtagtattcttttgaatgcgttctctcttccttttccggttcatcttcattaaaattggttcttgtcctgactcgaccatggtctgttgatctgttggccgacttccgattggaattctccaaataagacaggtcagactgattcccgtattcttagnctcgtctgtttttagtttgtttcggcacttccttttcattatgagttggtctttccctaatacgaccctgactctgcgatcgagctgaattttgttgtgtttcatcgtagcctgtcggttggtaatttgctaaggcatctctctctgactcccttccgtcataagtgatcggcgaattttgttgtatttcttcattatactcaggttgatggggtgcatcattgtatctttgtcgctcccgtctgctataattattcggtgattcgtcattatcataataggtgaccagacgattgcgtcggttttccgtttcttcataactttcgcggtgagcttggtcttcataggagctcctgagtcttctcgaagctgttctctcatgtactccccgcatttccttatcgaaaaatgttggtttgattcgttcataacttcttgacaattcgttatcatttatttctggtgataaaagctcgttggcgcattctctatccgaaaagtattgattattctcatagttattaaatgaagtcgatgaatacgaattggagccttggccttcatataattcataattttctaaattaatgctatttaattgttttatgttaataatgtcaagaatgttagcaaaatttttgtgaatataaagtttttgccatatttatcaatgacttatttcccgacttgagaatcacacggaataatttcagaatctcttcccgcccttttatcttaattttttcctaaccaactaaattcataaatttactatttatttaaaatatatttttatttaattataagtttttttgaaaccagtctaaacaggtaggctggtcattttatgctgttgtgtgcccaaataaccttggctcaactattccctttttaaaccttgtcttcgtaatggttcaagtgtacacatcaaaatgccatggctttctgtcaattctttgatgtctctcatggctataattcgtttcatgtccaaatttctgccgtccaacagtggaattccattgtctctcgcacaatgcaacaagtagccatccaatggctgggtgggccaatcgcatttcatttttttcaaagcgttcaaatccaattttgccctcgttgagttttccatatggacgagtattgggtaacggacgcccatacaatgcaaaatgctagccaaattgctgacaaaagtgttctgagcacatccnnncnattnaccaaacaaaaatataccactnaatnntncaaaaattntaataaatataaattaatatgatggagtcatctaaacaaaagatatttcagcaaacttgagggaaatttgttttctataaccataaattataaattgtca

SEQ ID NO: 13006 - DNA, 1708 bp, Heterodera glycines
attcaaatgattaatttcctgagagaatcgataaaataaaataaatatttataatttttcggtttctgatgtattagccggaaattgtttacatgcatattaaattgagctggattaaaaaaaatattctaattgtttgttaaaattttaaataattggattaatcgtccgggaatcttcgcttctatctgtccgtaagtcggtcattttcggaaatgaatcaaattttcgaattttcatccggcggcacatgtcagcaccgttggacctaaaactattaattttctaaattaactgaaatattaagggtttgccgtgactttagaaatagggaaaggggccggcggtgccgttaggcgccgccgacgaatttttgaaacttttgccccgatttcttcgcagattttgtttatatgaaacaattatgtaattctgaaattttcaattttatacaatgtaaattattcacggaaaccgtggagagagagagagagagaaatgtaggtaacaaaaagaagagaataaaaaggttcaatttgcaattcaagattggccgacatatgcggcgctgacatttgcggcgctgacatttgcgtcgcagacatttgcggcgcccagtcaaagcgacacttgcggcgcaaacacttgcggcgctgacacttgcggcgcagacatttgcggcgcccagtcaaagcgacacttgcggcgcagacacttgcggcgccgacaaatgcggcggccagtcaaaaggacttttgtggcgccgacacttgcggcactcagtcaaaacgacatttgcggtgcagaattaaatgatcccaaaaaatttcaacaatttatttaagtcaacagaattgtattttaatagtttattttttaacaatgactaatttaacaataattcttgcaacctaatcacaaagataaaggtagagttgtttgccgttgtaacagcttcagaaaacctttcacttagcctcacccagcattttcaaagtataaatggaataatgtaataaaaatatttttataaggttcattatcgccattaaaaaagaggaagagcaccaacaaaaccgcctgaggccttatggaattgacccaactcgtgggattgctgaaaggcctcgcttaaaaaagattttcgaaatgatgaagcgatccgtcgattagtcctcgattttgacaataaagaaaatataaactatgatgatatttgcaagtcgaaaggacaattggttcattccaaatatgtccaacacgttaacaaatgcttaaatattttataatttatattcttaaatttaataattacggcttttatttagagaccggggttttaagtgctaaaaacactgaaataggtactaaaataggtgtgaaaaaagtggaaaataggtgataaaaacgcccaaaatgccaaaataggttcgaaaataggtgttaaaaattggaaaagcccagtgtctttatgcacaaaaattacaaaagtgactaatttttttataatttcgcccgcacactttcaactggtcaagaaaataaaaataaattttggaaatgttttttaaaatttatttccattcttagggggtgtgttttttcagaaatttttgggaccgattcttaggggtgtgttttccttttttattgcacttttgctatgaaatttatggaaaaaggccaaaatatgtgctaaagttcgaaa

SEQ ID NO: 13007 - DNA, 2365 bp, Heterodera glycines
aagagaagaataaaataacagcgaaatataaaaaaaacaaacatatttcttgacctcatttattttctacctcatttgcaactgcaaaaagtgaataaaaattatttttgcttaatttttgactgaaaattatgtcactattcgtcactatttcggattttttcactattttggcattttccaaactctttgttggcttatttgggaaattatagcattaatctaatcccgttaggaattgggcccccccccaatcccaaaaccgaacccgctaatttgattttccccatgaacagtctaatctggcaaatcgacccggtaaaaaattggacgactccaattccgaaatcgaacccgcaaattggatttgtcgacctagtcaaaaggtgacaaataacttcttattaaaaagttcatttaattttgaacattcaaatgcatattttgcagtagcattttctgccgctgcataaatttaaattcggagagaccaaaaaacggtgggaggggcggcggggggggacggactgacaccacccaacgcattcattcattcactcaattttgacagttccttcaattttgttttccaaattagctcgtcatccaaaaaccgtttttgttaaattctgtcttttatcggttcgttcgattttatttccctttttccgttagtccttccagttcatttttaaatgacctgctgtcccaacttgattggtaatttgggaaattctgggattaatccggcaaacccacccggcaataaattgggccccaatctcgaaatcggtgctagcgcgtttgttaaaaactgccaatgggtttgaaaacaaaaaacaggctatgttttttgcaatggtaatgcatatataataataaacatttaaaattttaaagtctttaaaatgaaatttaaccaaaattaatttatatttcgatagccctaataattctctatttatatttaaaattttagaaaatttcattgagtttcaaaaaagttctgaacaaaaaatgctgacttaagattttttgcaattttgtgaccataacttttttttatacttaagttaaaaatataagaaaattatattctgaaagagaacaattaaagctattgaatgataccacgaaatattaatttggttgaatttgagccaagctattaatttaattattttacccattttttgttttcaaacccattggcagtttttaacaaacgcgccagcacggttgtatccagaaaattccctgaattttcattttttaacgcattaatccgttgctgataaacagtgctgtcaaaaatatgcaaatgcatattttttttcctggattctgcgtagtctaattagtaggaaaaacactttctttttggtatttgcgtatgaaagtcgggacttttatttgcatattttgggttttttctgcatatttcatgcatattttgccactttttgtacatattttcagattttgcatattttgccatttttcgacaaatatttccgatttaaatatcctcttaggaaaaaaaaatttgattatgcctaaaattaaatccaaatcggaatggatgcgcgagtgggtcaacagtgagcttcactgccgaaaatcttgataaatttttgattttgcaattgcaaaaataatcgataacatttatgaggagtaaaattttttaaattaatttgcacccctaattttcaagttttttgtgcatatttggtgcatattttgcgatttttgtgcatatttggtgcatatttcacgactttatttgcatatttatgcgcatattttggccatttttcgtgcattttttgacagccctgctgataaataattgcctaatttaaatttaatcaccataaaattttcggaaaaattatatacacctaaaatgcaaaaaatacggattcctcaaagtttctgataaatgtcgtaggaccccgtcccgcgccagaaaatctaatatcgactgccgaattaataaatattttaatttttattgtttttttttgaaaattaatttgaaatatatatttggtatagcttggttcgaaagcatttgaagaagattgcaatgaatcaaatgatgcaaatgcgacaaatggttctgtgccacagcaagcaacagatcatgagacagaaaaaacgggagttattccaatgacattggataaaaaggcggaaaattcggaggataatgatgctgattcaatggcaacggaacaaatgcaagaaaattcggaggataatgatgctgattcaatggcaacggaacaaatgccggaaaactcggatgaagaatattcaatggcatcggaacaaatgccgtattcggatgatgatgatg

SEQ ID NO: 13008 - DNA, 832 bp, Heterodera glycines
aatgatgaaaagggcaaaggcaaaatgacgaggaattaatgataacattgaaccaaaaatggactatttaggtaaacaaattagggataaaattggtaaatatagctgtaaatttgagttgaaaataatttaaattcataaaatttaaattaattttcagcattaaattttttgtagataaatgatagcattttgaacaacttaatgccatttttttcgttcaaatttttctgcgcttttttaaatggagttcagtgaaagttctcaagttttttttcaaattctgaacaaattgcattggaatcagattttcgaaaaaatcaaaaattcgaaatttaatattagcttccgatatgatcaggcgaaaaaaaataatatttttgtgtgattttctgtgaaaaaataattttgaaggtaaaaaatttccgaaaaaattatcatgccctcaaaatgcagcaaaagctaaaaattcagtactttttgggcttaatctccatttaataaaccctaaaaaattcctaaattttagtgtccgaaattcgtcgcgttttttggctgagcatagaaccattaaaaaaaattaaaaatcttgaaatttatttaaaaaatcttaaatccatcaaaaaccctaaaaaattcctaaattttagtgtccgaaattcgtcgcgttttttggctgagcatagaaccattaaaaaaattaaaaatcttgaaatttatttaaaaatcttaaatccatcaaaaaccctaaaaaattcctaaattttagtgtccgaaattcgtcgcgtttttttgctgagcatggaaccatttggcatcacagcttctcaaa

SEQ ID NO: 13009 - DNA, 973 bp, Heterodera glycines
  unsure (1)..(973): unsure at all n locations
atattttgttacctccaagtcaaaaagacgagcctggcaaaaggccaggaaaacattggacagcttcggaattggaatttgcaaacacggactgaccaagcgatcaatgccgtactttttggctgaaaaatgcttttttgaatggcgctattccttttttccaaaaatttcacagcctcaaataggaaaattctcttcctcttactatttatatatataagatataactattataaattaatcacccaattaaaattaatttgctccaaattttttgacccgcgtaaagcactgcaattgcgttttccataagaagctacccccccccctcctttacaaccgccccctaaattaatttgtgccaattttcaccggcataaagcactgccatcgcgttgtctccgtccaattcactcaaatcgtccgagtaaatgaaactgagcatcactctgaacgccgttggctcaacgtcgggcacttccacaatggcactttcaacagaggctaattgaaaagtaattatggctagggatgggatttttagtgataaaaaatctcaaaataattaactaaatagtgaccaaaaaatgccaaaatagtggtaaaaatagtggcgaaaaagttccaaatttaggggtgtaattttttaaatagctgtttttaatttgaaaataatttaaaattaaggaaaaagattttattcactgattgcagttacaaaatattttcgtagcaaatattgaacaggaaaaaaaaattgggggaagaatttttgcgaaatttttccaattcttaggggtgtaattttgaaaatttttagttcgtttcttaggggtgtattttttgaattttttaggtcgattcttaggngtttatttttcgtttttattgcaattttgnngaaagttttcaaaaatgccaaaatagtggcaaaaaattattttagtggccaacttccgaaatagtttttttt

SEQ ID NO: 13010 - DNA, 3278 bp, Heterodera glycines
  unsure (1)..(3278): unsure at all n locations
gcaggtcgaccaaacaatggggttaaaggaccataatcccacttttctaaacaggagggagaactcagaatttattgcatcctaatgagaaaagagagagagagagaagcaaaagacaaacaaagggaaaggggacggactgtttgagatgataccaacaaaacatgtgacgaatggcgttttttggcgttattttatatatttttaatttaaaaaatcggatgacatccacaaatttttgtgtgcgctgtgaactgtgaaagcccttataattcgaatccctaacccgactcgaaaaagtcgaaaatcattcaaattttatttggtaatagtaccgatggtacatcatttataccaatcgtggactggtaaattggacaccggaaaacaggacaccaaattcctaaaataaaccctggaattatgttgaaaataaatttgtgtacggtaaatggataataattaaggctttaaagtagattaggcattcaacaggtacgatgatagatcaataaggatgagatttttagtgataaaaaatctcaaaataattaactaaatagtgaccaaaaaatgccaaaatagtggtaaaaatagtggcgaaaaagttacaaatttaggggtgtaattttttaaatagctgttttttaatttgaaaataatttaaaattaaggaaaaagattttattcactgattgcagttacaaaatattttcgtagcaaatattgaacaggaaaaaaaaaatttgggggaagaatttttgcgaaatttttccaattcataggggtgtaattttgaaaatttttagttcgtttcttagaggtgtatttttggaattttttaggtcgattcttggggtatatttttcatttttattgcaattttgggaagtttttcaaaaatgccaaaatagtggcaaaaataatgacgaaacgccaaaatagtggcaaaaaattattttagtggccaacttccgaaatagttttttttagtggcaaagctccaaaatagtgattcctagtgatgaatagtggcactaaaaatgaaaaattttcgaaaaagaatgtgtttttcgtgcatttctcgtcgagttaaagccgcagaaaaaatagttaaaaaactaagaatcccatccctaattatggcaattagcaggggttaatttcaaaaaaaaatcaacaaatttttattttctcaccattttctgttttttctttctgtgagtcaaaacggaacattgcttcaaaaacttcggaagcgtgctttaaaatcagtttatgcgccggcagaagctgaaaaatttaaaagttgacataaattatatttcaaattgaaatattaaaaaaaactcgcctcttttttgtctccgtcccccaccaaaaattggatgtccgcgtcttctcccgagctaaccaaatgcttcatccgttcaatcggattcccctgctttgaggacgatgacatttttaaaaccaaactccgaaatttaaaatgagaaatcttatcgaaaaaagcttaaatcagtctaattgtaagcaaatatggaaatggaaatggagaggatagctttttgttagaaagggaaaatggctattgttttattttatttttaataggtttaaatcatggttcccagatcaaaattttcaaaagcctcatttggtaggtaaaaaagcctcattcttacaaaaattattcaaaacacgtttaaaatgttcaaatgttatatttctgattgtccgtgatcaatttgagcaattttttgggtacttgtgggttatcagtactcagattttcaaaaaaaatttttgtaataaacttgcaattttttgagattttcttatgccaaaacaaaaaacaatttgcaaaggcattgcacaaaaaattactgaaaaaatcgattttctccaaaatgtcataatgtaaatatgcaataaatgttttgaggaagggcgggggtaatctgaaggaaaggcgtcggagaggaatgggtaaaaaataaatttatcaagtgtaaacaaaatggtgaggaatggggatgtaaattatattttcaaaaatcgcaaaaccgtatttcctcgaatatagccccaggggctctattgttcaccctccttcaaaagggggctctattcgaaagagctaaatattgacattaagaaaaaaattacaacgagaaaatacgaaacagagcttttttcgtgtatattcaaaaataatttttttgtctggactttagctttttcgtttgtaccgaaaatgtaggcattgaccaagaaaaaggtattggccaaagtaattgaagattggacgcctaaagtgcacatacagtaaaataaattcacaatttatattcttcggccccgaaaacctataaaacaactttatttcgaaaaaatttaatttttttttctgagctccccgtggcctgaaatgcacgaaaaacatgtttttttttctactgtgttaagctacttttcgagtcattagcaactattttctagttttttatttttagcaactaaaaaactataaaattttgaaaaaaactattttcaactattttggcgttttgcccaaaatttgttaacaaaaatgcaataaaaaggaaaagtaccccccccccccccttaagaattgagtcaattcaagacttaaaattcttttcaaaaatacatccctaagaaatgaaaaattttcaaaaaatcatctccaaaattaatttaattattttattgatgataatttttgattttgaaacttgtgtctcattaatggtttggcataatttttttgctttttgaagaaaattttcgattttacacccctttcccctccaagtatttattttttttcttcatatttttcaaaattaaatttattcgatgggaattcaatcacaattttaacaattaaaatcgtaaaatatgtcatttttggagttttttctttacaaattgcactaaaaagttcaaaaatttccccggcagcgcctatcggcaccgccggacccctgttcctgaaaagtcttttgaaaagggcaccacaaaaaatggtgtaaaaactcaatcatatgaaaaggaaaaatggatggtagcttaaattagagaaaaaaaaaacaaacatttgtgagaaaaaacctcaaaagattgattttttatcgattttaagtgtgtgagaaaaatttttctcgagttncgactcgagaaaagtctcgggttntttgggtctcggtaccgagtctcggggtcaagtctaggtctcgggaaaatttttg

SEQ ID NO: 13011 - DNA, 3360 bp, Heterodera glycines
ctcattcggtgccgacattttgcgaatgaattctgattgttcggggtcagggtgaattcgttccgaagacattatgtggcccaagaaaagcaattccttttgaagaaatttgcatttttccagttgaatgtggaggccatattcattgaatcgcgcgaaaagttggtaaagcgctgacacatgttcctccagtgtctttgatgcaatgagcccatcatcaagataagcaaaaacgcctggaatgccactgcatatttggtccatcaaatgttgaaaaatcgatggtgccgatttgactccgaatggaagacgttgacattggaacaatcctcgatgcgtgctcagagcgcagagctgttttgattgttcgtcaagttccatttgtaaataagcgtcgcttaaatccaaatttgaaaagtatgctgctccgttgagtgccgcataaatgtcatcaggtcgaggcaatggatggcgattgagttcgcgtgcattatttaatcctgtagaaaaatcaatgcaaactcgggttttgccatttttctttttcactgccaagattggtgcagcccaatggctgaatttgattggcttaattgctccaagttgttgaagtcggtccaactcggcattaacggcttcggtggcgccgtgcggaattggcctcgctttgcaaaacacgggttttgcatccgacttcaaaatcaaatgtgcctttgcttttgtgcaatggcccaattcgttgctgaaaacatcagaaaaatctttctgaagtgccgaaatcagtgatttttcgtcttggatcactttggcctttggcattgcttccttttggatgattgtcggcttagtgttcacttcttggaacattatttccctgggaataacttccagcgcgacaatccatggcattcccaataagtcatgtttgatggcatcactgacgtatgctgtgagcatttttggttcgtcgttgcccatgcttacgatgccgaaaaatttgccttttatcggtactgcttctccgttgcagttccttgcttcaatgtcggcaggcgacaatttcggtttgccaattttgcaccacgttttgctggtgatgatggtggcttgagcaccagtgtcgacattaatccgtattttaacgccgttgactgtgatcaaaattcgccaataccagtgatcagcagttccaacctctgtgcaggttgtgttcacttcaattgtgagaactgatcggccttttctgatgaatggctggctgttcttttgttggcaaactttggcgatgtgtcatttcttctgacacttgtggcaaattgcatcattcaatttgcattccgatcgccaatggcctaaaaacccacatgctggacatgggtcagtcggctgtcggtgtttgcctttgtccacatttttagaacaattctgttggttgtgactccgttgttcagttttgacaaaaggttttgactttccttttgagtccttccactgttgaggacgtgtgtgaattgcgtttgttgcggcgggttgtgccattagcgagagtgcgctttcttttaccatttggatggtccgcaactcttcttcaatttgcttcagtgtgatgtctgtgccgtttttctggccatcctccaacattttcaagcacttttgccgcaggtcgtgatgctcatctcgaagagcaatgaccaaaataatgcatttgagttgctcctttgtgaggctcaaattcgcattttcacaggacgcattgatttgtgcgatcaatgaagtgatgtcctgatttggctgttgtctgattttgaaacattcatagcgtcggacaaacagcgatcgcgtttcggcgtacaaacttttcaatttgtcgagagtgtccgcccatgaaatttgatcgggttgggtcggacttacgctgtctcggtatttgttgtagtcctcgtccgataattttcccaatagaagacggacttttgtcgcttcaggtaagtcttttccatcgtcctcgattagtgtgccaaaacgtttgaaccattgttcaaatgtgtttccgctctccgcgtcgtaataaaatttcgaaattcgggcgtcaattgaactcgccaaattggattgctgaggttgttgttcgctggcactgcatttccaagcagttgctgcatccttgtttcggattgcgtaagcacagcgttcaaaatttgttccaattgtgccgcgttcatgtcgaatttttgtcgaaaatttgttgaattttcaaaaccgcacccagcggaaacttacaccccccaggtgatcagtttttttgtcgatgaaaaccgcacccagcggaaacttacacccccaggtggtcagtttttttttgtcgatgaaaaccgcacccagcggaaacttacaccacccaggtgatcagtttttttatgaatgtccgatgaaagccgcttaggcttttgttgctgactgcgccaaatttgttgtgtccttacccaaaggaacgacaacaaatataaacaataaagtttattgaagaaaaataaaataataaattggtgacggagagaggcgaatatcgattggctttatgccacaataaaattggagaatgaattaaggaagtccaaatgtggggaagggagccaacattaaatagacagaaatgggggagggaagaagggacaaacaaagggtcagagatcacaaatgtcaatggtcactatctctaacaatttgtcatgagaattggcataatccacgtcaatttatgccaatctatcgctgatggatccaataaatgggggcatggcccacgctgaggccaccattttaaatttggcatagcccaactcaaacaaattacatggcattcttttaaagaaattataaacacaattccaaattactaaaatttttaggaaaatgaaaacaaatctctttcttcaaattttcctaaattttcttcaattttccatttgtgtgccctccccctacaattgggacccaatgaacttggccaacaatgttcacacctttgccgagtttatggacgatctttacaaaaattatagagacgaaaacgacaaaatgggtcagtttattgatatgcgaataatttgcttttttcacatatttaattgcgttttggccgattcagaccgtttttggtctttttattggtccgctgatgtctcgttccaatgaaaaacacacactaaaatgtgttaagttgttacaaaaatggtaaaaaaaacgataaaatattgaatttttcctggcggatgattttttaatttaaatttttttgcaccaaaatatgataatccatttatcatttcccttggagtggtgaataattttcggtttgcc

SEQ ID NO: 13012 - DNA, 334 bp, Heterodera glycines
ggttccatcgtactttggcatgctcagatttacggctgttgttgcgttctgtttggccctgccgtcgttgatcagctccatcaatgcttgttcactatttggataggcattccaccgatttctattaatgtgttttgaataattcagtaaatctgctgttacgggcgagggcagagaggacagagaaggcattttgtggatgagagagaagggtttgaatgtgcaggagaagcggtcaacgggcggcgggtcacaaaggacggacgagcgatgagtggacgacggcgaatggcccccgggggaggggacaatgtcgagaggggcgggggggggg

SEQ ID NO: 13013 - DNA, 2558 bp, Heterodera glycines
agtgattagcaaaaaaagttaaccataaagcgggacccactagggtacctttccgttatgccctcccccataaaaacattagccatattagtacccttgttttcgccagtgaaactgccgcaattttgaaaaatataataatttttcttggcgaaatgtcttcagttcaaagtctaatgataataataggtcttatgggatttttggatctatgtacatgtacattttctactgtttaaaatttgtaaaatattccccggtgcgcctaccggcatcgtctaatccaaaagtaaaaatagcaattttttgatttacaaaatttggtcattttttggacaacatctgttaacaaatcgctttcaaaatttttactagggttgcaaccccgacgtcggggttggaaaattcgaggttgtcggggttggaagcgtcggggttcggggtcggggttgccaaatcgttcggagtcggggtttttcaatttttgccttataccatatagtcaaaaactttacattatttttgcttaaaatttttttattttcattaataatttatgtgtttttttaatttttttttttatcataaatatttttgtatagaattaatataaaacgcataaggcatttaaaatggccaattttcagtgaaaatctgtaaaaatagtcaagatttcaaatttttcctccggcgcctggcccccaattaaaaatagagggattttattcaaaaaaatgcccaaaattttttgatcgcctttcttttttttttgtttttcgaatcatcttttttttcgcggcgttctttttctaaagacttttaggagaaaggggtccggcggtgccgacaggcgccgccggaaaaatttttgaaatttaaagtctattttgtaacagattttcaccaaaaaatttatgaatttctgataattttttttttctcttggttttttgtcaaaattattttgaaatatattaaattttgatgatttagtcaaaaaatttaatgtttaatttcaactaaaggaaaagaaaacgtcaacaggtatcgaactcataagaaaagtactgtattattgttgaagcactaaccactagagcccggagcaggaccggatcctgcgcaggattttgcaggatcccagtccgcaatcctgcattttttggaaaatgcaggatttgcaggattaatccggccggatccggtccggcaaaaaattttgaattccaatcctgcaacaggatccgcaaatttgatttttgtgcgggatccggcaggatccgcatacattctttgaaaattttataagacggaatgtcaaaatttttgaataaatttataataaaatcaatcaaaataaattcaattttcatctcaaatttcacctagaatttgcaaaaaaatttcccggcggcgcctatcgacaccattggatcgacattagtcctgtagaattgagtcaaaaggtgtgacatttggtcatttttttggtcaaaatcagttaattaattgataaaattttcaaaaatttcagacggcgcctatcggcatagatggacccctttgttcctagtttttgaaaaaattgcgccgaaaaaaagcatttttgaaaagcaaaaaatagtcaaatttattgaccgacctaacagatttgatttccgatctctttttaccgtctgacccattcgaataatcttagtcgcccttttaatgcatcccgccagcccctaaaaatttctttttcaaaatgtcaggtattttttcttttttggaaatttaattgaaattttttcaaatttctaagaatccgcaatcctgcgcgggatcctgcaaatttaaaatgcaggatttgcaggattaatccggccgggtccggtcctgcaaaaatttttgaattccaatcctgcaacaggatccgcaaatttgaaatttccgggctctagttgacaaaacgtgcatttttggcatactgttgcccgccagtgtttttattcaaaataaatcaaagccaagattgcaaaattttttgcgatgattaccaaaaattttcataaaatttaaaaatcctgtctcaatatcgaaatctcagttcaggatctacatattagattacggaatgataatttttaaaattcaaatgacctgatatggaagtggatttgtgaaccaatcataaatgttgccaatgtccaacctcatcgggtccaacgttggtggaacttaatttaaaaataaattaattaaaatcattaaaaaatagtttttaccaaaataaatatagccgacatatgccttttcgtccattgctttgcccgtttggggctggaagtacacagttttggtgccccaatcgtaaatttttggcaaattacatcgtgcaactgacggattcagcaccatacaggtggcactcggaaaaattgaaaaaatagaaaatttagaatttttaataatattgaaaaataataaaaataaatacatatatattcttgaaaacatttgcattttaataatcagttgtctcttaattgtaaattcattaaaataaaaaatttatc

SEQ ID NO: 13014 - DNA, 2171 bp, Heterodera glycines
  unsure (1)..(2171): unsure at all n locations
ggaaaattaaggctttctcatttttgttttttttattcctataaatttatcattttaaatcagtttcaatgattatttttattttctgccaggttagcagcgtcgatgaagtaattgtgcctaaacagacggactctccatcaaaaaacggcccatccaacagaatactctgtagacaattgcgcatttggaacagagagttaggtgggtttgaaaatgaatttaataagaacatattttattgtttcccttttttcaagattttatgagtcaatgcgattttttggccggtctggaagctgcctgctcaattaagtacgaagaatcacaaaaaattcaatattcatttttccgaagacctagagggaatttgattgttgtgccggcggtggtgtcgaatgagcgacacctttggttttatgagcggaatggcgaaatccgaaacaaactcaagctgttctgcccacaatccgtaccttcgtcaaattccgattgcgacggtggcgagttgcacacgcacagtgttgttcgacatttggcgtggaattcgaccggttccattctcatgctctgttacgaggacattttgtcaaagacaacgcaatgtccgtgttattttaaccatctgcatttttttttattattaattttagtgcaattttgggtcgtttcgaattattcgtggacagagaaactgcgcttttctgttggcgaattggccgactttttttgggaccctgaggaccccaacaaattccattatctgacaaagttgggcgtttatcacagattaatattgtgttcggaatacaattgcgaggacatgatcgttgtgtcgatcaacggcggttcgttcaatttctgagcttttgtcccatttccgtttttcagacagagtccgtgtcaccgacttcaaatacgcccccattccgccgccaatgtgccattacgaattgtgtttggaatttgtcggcactccgtctgcctttgctcagtccccagtctttgggttggcttttctcagctccgactttacacggatcagcacttgtgggcccaaatcattttgcactgccagaactggtcattctttgtttagtttctcttcagaatcgacgttttattcgttccaaacgcattgaattcggtcagagtttgggcttgttgctcaatttgatttggcgtgatgcaaatgctcttttggcatttcgaaagagcaaacgaagtgatggcgcctatgaattgaccgaatttcacctggaccctttttcgatgtgctgaatttcggttcattttttcctcccaattcatatgttactatttagttcttctctgagggaatttgactatttgccatttgcactttcgcttattaatgtcccaaatgagcatcagttgcccaattggactcccagcgaagaaaacagtgtgaaagttgaccatgttgaacttgaagacaacaaatatatacttacattgtgcagaacggaagcaccggcagtgtcaaaatggggaggaggagcaccgaaaacaattgaattggacgtcaaagttcgttttaagcccatgccatggcgaacccccgaaagaaaatgagaaaattaaagtttatgcttacaattagttgtgtccgtccgtcttctttcatatcgtttaaacattttcccatgctttaggatgttctcattttctatttgaattccgcacaactttttgtcaatggcaaaaagtttcagtcgaacgtctttaattattgttgtacgaaagaatttcttgttctgatctctggctgttctctgttctgttttcccatcgctttggttcaaaagtttgtcgctagcgatgaaaagactttcgaatgtattggtgcaggtgagtaaaaacagtgggacaataatgtggaaattgtattttaatgctaattattaatccattaagctcgggaggttgaacgactttccgaactaattgcaaacgaaccgaacggaacgcgcgtttggcttcaaatgccaaggggtagcggctgattgcttggcggttattgttatgttcatttatatttaagngcaatttggaggtcatccatccacgcccaattctccttgaacggcttaagctttgtttggatgcccgagaatggtccaaagcgtttgtcgaaatgcggaggcatc

SEQ ID NO: 13015 - DNA, 880 bp, Heterodera glycines
  unsure (1)..(880): unsure at all n locations
ttttttttttgcaaaattcatccacctcttctcggtgttttcgtttggcatagttgtaattccaacgcatatttgacggtgaaggagcagaagccgccctaacttcaatcggcaaatcggcacgcagtttatctttagtattaatttgcccacgggatgaatttggtccgatctggcgaaaacaatcaccggcgagttcacttactcggcgaaatcaaatacagacgccgagaaaaagagaaatagttcactggcgaaatcactcactggcgaaatcaatcactggcgaaatcccactggcgaaatcactcactggcgaattcactcactggcgaaatcacctgccacccacaatacatattgtatatcctaaaaataagcatcatctttacatcatcatatatcatatcttatcatatcatccatcattgatctgctgattatgggcggcactttctgtcatttgccttcacggaccgacacggcttcttcggctcggcttgaactgttggcgatgaatgaagcggacttctgctgcttggtcttcttgtacgcacggaagatgatgtgttcattttagtctgcaattgtttattgaatttgagtgctttgctcaattaaacaaaataatgtaaatttagaatagcgttcgtggaattattacaattttttaacggacattcctggcgctaaaaattaggcaacaatataattagggtatagaactaggatggcacggaattccgantattttttgggtttcgatttccgaaaatttttgggcctcagaatgccatccctggtataaagattggtaatcagattttttcgggatttacatagttaatttgaattaattccantccatcactaattttcg

SEQ ID NO: 13016 - DNA, 3341 bp, Heterodera glycines
  unsure (1)..(3341): unsure at all n locations
aatatataatatcgcagcgttcaggcaattacaaaaaaagatttgattaattaagcgcattgttgattattttggtttgtaactttcttgaaatattagaattctcttgttttttcgtattattacattatttagacttaatgttttcgaatgataccaaaaagataggatttgttcgaacatgaacaaagttattgtataaaaacacgggattgtcaattgattggactcataaaatacatttggactcataaagtgcaagacccaaaaaaaaaaaaaataagtttttagcttagtttctggcatctaggacctattttggactttttgtgcttaatgcttggcacctatttatgcctttttaggtgtctatttcacgattttttatgccgaaaaaaacgaatccttaattatgaattttatacggaccaaaaatttaaacacataatgaatccaatttgtcgtaaaagttttttcctaccatatttactgcaacgaaatcgacagtaagtttatcgctacagtatacgtcagcaaatcaatatatgcaatcaatacacgtaaaaatatacaacagcacagacagacaatgcaataattattccacaatacatattgtatatcctaaaaataagcatcatctttacatcatcatatatcatatcatccatcattgatctgctgattatgggcggcactttctgtcatttgccttcacggaccgacacggcttcttcggctcggcttgaactgttggcgatgaatgaagcggacttctgctgcttggtcttcttgtacgcacggaagatgatgtgttcattttagtctgcaattgtttattgaatttgagtgctttgctcaattaaacaaaataatgtaaatttagaatagcgttcgtggaattattacaattttttaacggacattcctggcgctaaaaattaggcaacaatataattagggtatagaactaggatggcacggaattccgatattttttggtttcgatttccgaaaatttttgggcctcagaatgccatccctggtataaagattggtaaatcagatttttcgggattttacatagttaatttgaattaattccatccaatcactaattttcgacactttctccgcttctgtgtgaatgaggccccgttttccgattttgttgtccgtctgtgtaccgtcagttgtttatttacacattcattatatattcttctgcccatcgtcgtcaccaccagccattatgacccccccccccccctccattgtgtgttagtcattcgagaaaatttatggctcgatggaacttctgccggtcgcgaatgaatgggacgaaaagagggagggaggaaatgaatacatagcggtcggatgagtggggcttatcagcagccactgccacagcgagaaaggcatttggccagattctcacacaatggaaaatttttcgaaaaattcatttggtatgtaacattagaataagaaaggatcattttcggagttttaccacttcctgtgaaccgactgagccgaaatgacattttcaatttattctttctttgccctcctttcgatggctttcggcattttcctccgattaattaaatttccctctctccttatttttgttcgtccattcctcaacaactttacaacaccattgtcttcgtcgttcatcgattaatgtgtgtgtgtgttgtgtaaatggggcattcccaccacattccaaacacaaattcaaacagtccagcaatcaaatcctcccattattataattccttattaataattcggactattgacattctcattgtcggtgacaaaattccccctaaatttatcatttaaattgtgtgttaattaatgagataaaaaacccaattcgttttcgcggattcgttttttgtctttatatttatgtaggaatgccgacagcgaaaagtcaatgtaaaaaacgaatccgcgaaaaacgaattggggttcgttcaattaatgacttagaaaacacaaatcgttcacagcgaagcaaactaaatttaggtaattctattgttaaaattccaattacactaatttctttccgtttcccatccatttttaaagtttccaccggccttttaaccgttgcgaaaatgattaacgagcaaaacaaaaaaaaaattgtcactattttaatcaatttttgtgtgcctgttcattttcgttaattgcctaatttcaaatgcatggctatccttatcagaattattcgcctggtgaattcaatttccattttaaaattaaatttgaattggatctctctttcgcttcagttttttattacccacagtttctatgtttatgtttgggcagaagttttaatttaaaagcgcgtcgatcgatatggcaaaaaaaagaaataaagaaagggagaaaggcttttcccaaaaggcggaagagagagagagagatggtgtagagcaagcaacaattccttccacaaattggcgaatgaatatggtttaaatttaagatgggccccgccggtcggttgttgttgcattttgcattgaatttgttttcctatttttaatcaattccttaattatttaataacccatattaatttaatttattagcggtacttatactgtttaggccacatgaatatttttctagcgaaactcgaaaatttgaactttcgattttttgttcgaattcgggtcaggggttcggaattggtcgaaatgaatgtcatattcgtgatcagcgaccccaaaaaccccatggttacattttttgtgtcattaacaacaaaaaaatccatgtggcctaaactgtataagtaagtaccttattagtagggagtccaattatatacacatgcatatttttttcctggactgtgggaggcctgaaacgcacgaaaaacatgtttttagcgtgttttgaagcttctaggatgactttccatatgcatatttgtgcatatttcgcgatttatgtgcatattttggcatttcgtgcatattttatgtgcatattttggcgtttttccaaaaaacctctaatagatcggcccccaacagacaaattggcctttttgacctcaaaaaccggaaaattttcccaaaaaataattttttagcaaaattttcacgaaaaatattgaataaataaattttctcaaaaaatggttaatttatgtncaaaatacgcaaaaaaagcaaaatttcgctttttgagatggtttttcgcaaaaatgagtaaatttttgctttatcatgtttttttcttctaaaatgatttttaataccacattcagccatttttttgagattttacttaatatt

SEQ ID NO: 13017 - DNA, 3548 bp, Heterodera glycines
catggaagactgtctacagaagtttttgtataatttgcttttggtctatatataggcaatagacaaaaaatattcttgagtatactcgaaaaattctgaatcccgattcttcatattgcattttttccttaatgttagcattagttattttattaggtttctaaattctagatactttaagctttcgtttaataccaagaaaataagatttgaataagttagaaaaaaatttttatagcctaagaaactatggatagtcaatcactgattggacacgtaaactggaatagagccaaactttaagtaaaaagatcaaaatattaatattcaaatgaaaaaataaaataaattttgtcaataccaaatttaatagataatattaaaattgaaatataactattttctttcattttataataaattatatttattgcttaaaagtaaaattttcaatttcaaaaaattatttgttattttattttaacaaaaaaaaaaattcttgaagaaaaaagatattttgaatactatttctggtttccatgtctaatttccgtcactctcatgttctcaatcattgtgtttaatggagtcacggttacactttgagatgatgtttgtgactgggccacaaacctgaaaaaaaaaattaaatattatttttattaaaccaatttgaaaaagatttaaatattatttcatcgtattttaaaagaggaaaaaaaagttaagacaaaaatgttaagcctggtccaattttagccccccaaaaaggctaatgccggacttagactctggcactaatcccgggtctgtccaatccgatttatcttttaaattatcgatacaaaaatgaaaatttgttttcttgactgtcccaaatctccaattttatttcaataaattatatttgtttttaaatttaccaaatatgatggactcatcgtatacgcttgggtgccgtcacaaaagtcctggagacagtaacaaatagccaatcaatatttaggtactgtaaaatcgcttttacccggcatgccccataaatgccaacaacgccatggtcttcgcaacattcggtgttgttatgtccgccggtgtaacacttgataaaatctttaataaaaattaacaaatagtaattaattaaaaatttttaattcaatatttacccgaaatataagtcatcatacacctaagaaaattttaaatttaaaaagtgaaaatccaatttttatttttgttttaccattgttcagaaaatgaaaaagcaggtggtgggtaagtgcaaactaaaatatttaaaattcaattaattaatccaattttttaattaattgtaccctctgagcatgaaatttcattgtccttgcagcatttcataaatttgtctccaatcaaatcgttgttttggaattttggcgtttcgttgggcccattctttgctgttgcctcataatttggcaaaattgcgccataagtgataaatgaaagcagagggaataagaaaagcaaaactttaaaattgaacattctaaaataattttatttaaataatttataaaaaagtccaaattttattttcagattcactttttaattttaaacgttcttattagaaagaaatttaatgaaaaaatataatatttatttaacaacataataattagaactcattttaaaatataattcaataataactgcttaatagccttaattaggtgctaattatgttatttacactaaatactcaaatataaatacgcatttgttggcttaaaatttagaaataataattctgattttaacgagaaaataattaattattaaacgatgaaattgatgcttgctttataaacaaataaattaatacacaaaatctctctgttttcggccgaatatcgcggattaattgtttatcatcacgatgagcagcagcaggcatcggccgattaattttcttcccacattcacaatgcataaaataaacatttgtcagggggacttttatgtattttgcactcccattaaatagaaaagataaaaaagataatgaatggtcaaagatgagtcatttaaaaaataaaagtattagaaaaatatattgcaaataacaaattgacttattattattatcagcaatccaatcgtctgatatggtccgacatgactaatatttgaattaatcatttttttattttgacatcactaataattgattaattttttaattatccaaatttaaactaatttttttttgttaagaaatattaataaagcatttgaattctatacaaaacataatttttaaattgtttaagtgattaaaacaataattatatttttgattatttgccttcattaaaaattggactaatacctaacagacaaaccgtccaagattaggaattaaaatatgaaaacattttaaatccaactaaaaaaaaattttgttaacataaataaaatttaaaaaataaaatgaaaagaaaaagaaaaaaataatagaaatttgcactatctctctgcaaaatgggttctttgtttcgtcatttctctgctcaacactcaattaagcatggaaccggtgcaacaaaagtgcagtccgtggcgggcactggcaataggcaccgtcgtggcccggctgtccgggcaggcctggctgacccggctgtcccggcgtgccggcagtgccgggctgaccaggcgcacccggcacgccgggcagtccctggccaccggggtttcctggctgtccaggcgcgccgggttggcccggaggtccggcattgccaggcagtccgggtggtccaggcacaaaagtgcttaacaaaaggtttttatagtgaaaatttgggattaggcgccggctaacatccctagtcccctcactccctacctttgtgttgccgatgcaccgggttgtcccggctgaccaggcgatcctggtgggcccggcactcccgctgggccaggcgcacccggcggtccggctgctcctggtccagcggattgtcccggttggccaggcgtgccgtcattgcccagtgtgccaggctgtccttgggctcccggctgtcccgtcggtccggcagggcatttcttacaaaatttaatttaattttattgctaaaatattcattttaccatacttgacagccgaccgctgcggcaggtgggcatggcccgctttgctgtcccggttggcccggctctcccgcgtttccagggcttcccggaagcccaggcgtaccggctggcccgggtggtccaggaggccccggtgggcatttgggctgtaccatgttcatacaggaacaatgctcttcaaaaataaaataaattattaaatttttctcccacaattaggccttaatttgagggtacatataatagactttaaagaagggagaggaaattagtcataaattgatttttatgaaattcatgaaaaacttgccgtatttcgcccaaacttctaaattggtttttaggcaacgagttaatatttgttcatcataaatcggatataagcatttttacatcggacg

SEQ ID NO: 13018 - DNA, 3494 bp, Heterodera glycines
gatcagcattccggcgcacagggccaagtaaatcatttaagaattttttttacatttttcatgtcaattttttcatctttttttaatatttttgtgcagaaaaacatgtgcatttgacgcttatttaaattaaaaaagtgcgtgttttcctcgttccatccaatttgaaaaatttttagccatttttggaaagttttttgaaaaacagtaatttatcataaaatttcaacaattttcttttaaattttttacgaatttcttctcccccatttccccatcagaaagaaagcattttttcctgtaaaaaacattttcgtcctcagttggaccaccactcgcaagctgttcggcgaccagttgggctggccccaattcagcgcccttttcttcgccagtgcgctgcgcggcgacggcatcgatccgttgcgccaacatttgcgctcggtggccaaaggcgtggacaaatggcgcatgcgcgcgaaggacattagcacatcggtcggtgtgtgtgccctcgcaaataaatgccgtgccgaaattaataatgctatacatatttaatttaaaaaataattctaaatttttctaaaagaaaatttaatatttttcaattttgtttggatttttcttaaaattacatttaaaactcgcaaataatgccatgccaaaaaaaatgctatattcaattttaaaaaataattttaaatttttctaaaagaaaatgtaatctatttaatttttttttgaatttttctttaaaaataaaataaaatattttcctaataatagaacatgcaaattttcatatattttttcaggcgacattggatatactttagaattgagaattccaatcaatctccagtgaccactaatcattaaaaaaatagtcccgaggtgcgcaaaaaccagaaaccggtttaaatcatgaaaattgcaccaaaaatcagccaaaaacacattttaaataaaaaaaaattttttgaacatatcggttcgacttcatcacctgttttttagacttataattggtctcatcaagagctttcaaatgataccaaatttgctggaaaatttatatttaaaatgggttttcggctgattttggtgccatttttgtgatttaaaccgattcaatatccggttttttggttttccacaccttcaagtgtttttataatgattagaggtcattagagatagattggaacacgttaggtgcggcttgccactatttttcgtatgtttacgccgcatttcactttttttcctctccgcacaccattattccgttccgttttgcacaggacccgcgcatgctgtgcgcggagcacacgcgttccgcgctgctcaaccgctgccccgcgtacattgcgtacgcgctgcgcacgcgcatcaccgagtgggaggagtcggagcgcggcggcgtgctgcgcattgcggtcgacgtgttctgtgagttgattggcaatggatgcactcactcatttggcactcgcgaattctcgactttttttgagggggggggggagtcggtctcgacttccgccctcattttggttacggtcatttatttatacagtagccaatttggactcctttttaagatccaatttgatcgatcgaaaattcatgccttttttgtttgcattcggcgccaagacaaaaattaaattgtgccacataaattattcccatcagtcaaaggaacatcacgaactgtgagtgtccaaatcgctttgaaacttttatcaaattgttgtgaatggaataattaaatttaattaaaaaacaatttctttttgctaattgttattcgctccaaatattgtgcttaaaaataaagggatctttgctgatcattttgaaaaaaagtttatcggttttttggaacattggtcgattttttgcttatcatttttggctccggagcaccaaaaaaagccgaaagactctcatattcgcaatgttcccttgtaagcgccagccgggccttgaggcattcgtgccgcgctttctgttcatttgcttaacgcactcacatttctcattttgcctacaattaggcgacaaggagcgctgggtgaccgtggtgggcagtgttgcggaggaaattgaacgggaactgtgcgaactgatggcccggctgttcggcatgccggtccagttccgtctgttcatctgcggaccggaccggaagcggcgcatcgtcttcaacgatggcactgaacaacaacaacggcatggacaggaaaacgttgacggaacgacgaatggggcgccgagggccaccgcgaaaatgggcgccgccccgaggaggaggcggatggggtgggagatgtcaacatgacatttgaacagcatgtgctgcttgggcatgttggtggaggtggtggaagcggagttggtggtactgaatctgcggcgaagcgacgaccaaattataccaataaaagtcgaaaacgtttttgatttctttgtttgttgttcttacaatttatgcgaaaaattttttatatttaataaataaataatatgtttaattaaattattcgtcctcgcttttttgagttttatactacgaatttaaatttgcagtttaggccacataatttttttttgttttaatgataaaaacgtgtttctgtgggtattaggggccgctgatcacgactttgacatccatttcgaccaatttcaaactccgggcccgaattcgaacaaaagtcaaaaattcatatgcgattcattgccattccatatgcatttgaatcgtttaaacaaacgtaaattcgattgcggaatcaattatttagataaaaataaaagtatgtattaatccgccacatacaggtaaatgtgtgtaaaatggcaaatgttaacaaattggcataaaaactgatcgatcggtccattaaaaatcagtgttacggtgccacggttgacggctatttgttttggcaatagattatgtctccatcctcgatgccgtaggaaaccagagttcgcttgttgtccagttctcccacgcctattcaaaataaaaattcaacatatttaagtacatgtttcggaattttaagttcaattattcaattataagtagggctgggaattttatgcaattctacatcttttgaggtttttgagaatattttttaaaattaaatttgtttgagcttttttccctaaaaattggttttaattcttaaaaaatatgtattaacaaaaataattataagaccgtatcgttttggcgccagaaaaaatacaaaataataggcgagggtagtctgagactttgtctattattttccctatccctgttaaggaataaaattgtgtaaaaaattttgaaatttttctagcttaatgcatgatttttaatcgtgcactctatcactttttgatgctgtttatggtatttggtagagttgagcgggaccgggccgggaattcccggtcctccgaggtcccagtcccggattttgaaa

SEQ ID NO: 13019 - DNA, 2547 bp, Heterodera glycines
  unsure (1)..(2547): unsure at all n locations
ttttttttgactagtctctgaatggggttatcccagttttagtatcctttttgaaaaacaacaattttaataactgatacggtagcccaacatccattgccccaatgtactatgccgaggccgagctgtgcgcgaaccggcaattcggaggaatgcgggagcagcgagtgagtgacaggggggagaaatattacattatataatgagcggaagagagggggggggcgagcaatcggaggaatgacagaagggacggggaagcgatcggaggaatgacagaagggagggggaagcgatcggaggaatgacagaagggatggggaagcgatcggaggatcagggcggcgactttaggatcaaaggaggggaggaggactcacaaataatattagggattaattttgtttaattataaaatattttattattgcaatcaattagtaaatgagaaaaataattatggatccaatctgtttttaaataagtcaaaattaacagttatttgtggtgcgactcgcgaacaaatggtggtcacgcggtttgtacgtcaaagataaagcccggggggaattgtgccggcttcgaatggagtgccgaagtgtgctacgggggcagtcaatgtgtcgaagggcggtgcacaaaggcaaaaacgatggacaaagagaatgacgagggaaaagcgaagaaaatggacgacgacggcacggcatttaggaggggcggcgccgaaaggggcgacggatggcattcgacgatcagttttatgaaaaaacgataaacaaattggccgagacaaaagccattctatctgatgctagtgtgtttaattgtgatggagaaattgatgaaatcccaatttttggcactttaatttaaaagtgaaccttttcaaagattcaataaaatatgggctctactgcattttacgcgtccaatcgacttttacgcgtccaatcaaaaatttatgtgtccaatcaattattagaaattatttaattatttaaaatattggcattaaatgcttaaatgtcaaaatgaagactttgattaatacaacgaaaagatgattagacagggtattgaatacgtatttcttcgagaatttgctgaaaaattttttcgttattgttagatctccgaaacatatactgatacaaataagattgtaaaagctcggggttagtgccctggagatgacgaagaccatttttcactgcacgccaagttgcctcaatgccctgtgtgtgaactagtgtgtcttgagatctattattaaattttataacaattgattgaatgcgtatatacctatcgatactttgataataagtagggcagcaactnttagtgaaaaaactttttttttgctcaattgttttgaagaaaggagctcaaaaaacgcatttctgcgttaaaattttttcatttggacgtcacttttcgtcactagaaatcacattttggcgacttcgtcactaaaatagttaaaaatcactattttggcgttttgtcactttttttcactatttcgacattttttggaaaattccttaacaaaaatgcaataaaaccaaaaaatacacccctaagaatcgacctaaaaattttttcaaaaaatacacccctaagaatcgacaaaaaaaatttcaaaaagcactcctaagaaatgaaaaaaattttctcaaaaaggtattttcgtggcaagaattttaattttaaaaattatttttttatgtacctattttgtttttttgcccttaaaaatcccagccctactcatttgcaactgcaatcagtgaataaaaattatttttgctcaatttttggctgaaaattatgtcactattttggacttttttcactattttgtcactattttggcactttttcgtcactattttagttaactattttttatttctcttggtgttacgttttaatatttaaattattatttctttttgcactggttggtaccttatgtcaaaaggatgttcgatttaggaaaattttgattggacgcgtaaaatgtagtagagccaaaatttttattgtatgaaatgaaaaatggttaatatttattcaaatttgtatttttcaccggaatggattttttccaacatttttttgttttcactgatctttttcctaatttgcgacgacttttttctgctttaaagacgctattttttgcggcgcgcttcttcaaaaattttgtgggacaggggggggtgccgacggcgccgataggcgccgccgggaaaaatttgtaatttttattgcgattcatttacagatttttgtccaaaaatgaccaatttgcgattttgggccaattttttaagaaaaatagtgactttatgtcataaaatttcaaaaattctcaaccatgagaaaaaaatttacatttttaatgacataatgccataatttaaccaaaatattgttgaaaattacaaatatttcccaaatttctttgaatttatttaaaacttttccaaatgctcatttccaaggacgtccttggcatccaaggacattttttat

SEQ ID NO: 13020 - DNA, 999 bp, Heterodera glycines
tctcccttattattatattgttatcactcttcacacattttcaatccatcattattcattcacccctctctcgtctcctttccctcctcgccccccctaacccccaaaattttcccaatcaaatttttgtcggcagcggcgctcgtcctcctccgtcactcatctcatcaaaatggtagcaaaatgtgtccatgttcatatttcctcctcctgccgttttctctcaatgtgtcgctctgttctcgtaccactttcttctttctcttcccccctcccatttattctgctgtattatttatgtaccattttcaaaatttgggggtcataaatgagactcttcctctatcattatttccctttaattatttttacaaataaaacaaaaattttagttttttttgaagcatatgactcactcatttgggcaatggctgcgaaattcccgagataacaataagcaaaaaagcgacaaaataatttcaaaaaataaaaaaattgtgcattttgtaaatttttcacattctcgagatacaccgatcgggttcgcaactgaaaatatttctcgattccgagaaaattattccccactcgagacttttggccaagtctcactctagcaccatgtaaatgaattgatgtttaattttgcacaattcgttttctttgtgccacttatctgactcatttcaagatttattttacatatttttaagttccaaaaatttcaaataatatcgtagaaacctggcgtttcgcattccactttttgtcactaaaaagacccctcccttcccccccccctccaatataattgcgctctgacaatgaggcggttcattcattcatttcttcgtcgcccttttcaccaccgatcaatttgttctcctcctcttcctcctcatcatcattcactcttttctcttctcatcacatcggtggcagtacacatagatctcactaatcaccgccacaaccaattcattcatttgttcattcatt

SEQ ID NO: 13021 - DNA, 738 bp, Heterodera glycines
  unsure (1)..(738): unsure at all n locations
ttgggtgcgggtggaatccgccgggcggatacctccccagctgcggctgctgttgttgcgggtgctgtgccgatcgtgagaagcggngcttcttcggcgtttccatcattgccatggcattcggtccagcggcggtggcgttggccgaagtgccggaaggcggcggatgaaagtcaatgggcgtcgaagtgaacttcggcttgggctcgtcttcaaaattatattttaaaattgcccctttcttggtggccttttcatttctattttctatgtgaatggaaattccatctaggtatttgacatttttttttaattcgcctttctttggatgattggctaaatttattgaaaaaatcggcacacacccagttttttaaagtgtaagtcgtttctttaaaactgccgtgaattaattaaatttgtaaagttgttggttgactttgttttgaattttgggcagaatttttgaaattttgcaggatagtagagaagatttaaagcacatttaatgaaatgatataaagaatttaaattaatttagttttgagtcattaaaaaaatgccggtttttacgaaacatcccagaaccacccatttttacggcaaaaatcttagagcttaattttacgcgatgcccaatttttccaacttataaaatctaacacttaaccagagaaacatttcggcggagggggcggcgggggggggggggggaggaatcataggagatttttgaga

SEQ ID NO: 13022 - DNA, 3429 bp, Heterodera glycines
  unsure (1)..(3429): unsure at all n locations
attccagccgtagtcaccaggcacagcgccggcgaagccgtgttaaaaaaatatatacaatgaaacataacaataatcaggggataaaaaatattttaaaattctcttataactgatgcctatatatttgctataaaaaattttaattaaattaataaaatttgaatcctaattaaccgacctttggcgttgtgtagccggacggactgtcgccgccggcgccgccgcctcctccgccaccgccgtgcgctcgaatccactgacttttcttcttttgtagccaaaggcggaacagacccgagcaaaaagctaaaatgaaaatttttttaaaattctgttcgaattttgcagcgctttaaaatgtttccaataattaaatttaagaaaaatccaaaatgtaatattccaaaatttttactgaagattaattgccaaatatttaatgcttttttaccgcttgccacaacgcggtcggtgtgtgcttcgatgtaataaaacagcagcaaattgccggtccgaaactgttccgcaaatttgttcatctgatcctgctcccaaggcgagaagtcgtccttgtcacaaagccatttgcgaagcacctgcgattatttttgaaattaaatttaaattttttaattttcaatttcgaacccatttccgcctctgagttttcagcttcatgcgaaatgcccattccagccaaaacatcaaattgccaaggttgaccacagtgagaaatgcaagcatgaccctgcaaaattaaatacttattacaaattaatcaattttaaaatcggactgcactgtttttaaatgattagaaagtcttttcagaagatgaattgtgacatttaaaattgtattttaagggtctattgaaattttatttatcgttcattacgcacccataaagctagctttaaaaactgttgcttctatagctagaaatggaagaggaattgaatttcacgcttttatggcgcctagaatttcctggcgctgaaatggcagtgtacccaatggttattcccttattatctaaataattttcatgatttagggcgccttgaatttattggcgcccaactggtggcgctcaatattcagtttccgttaattaatcccccgtattttgtccaccatgtgaatagcgcggtccgctcgtgccaattcgcatccaaatagcagcggtaggtcagcgtgtgggtgttgcccagcgacacgtagttgtagtcgcagtaagtgatcctcgggattaacggaatgcgcggcggactgcgctcccagtcgcgcaacggccgctggaacagtcgctgctgctgatgctcgtcgacggcgcccagcacaggcgtaagggtggtgccatgcctgaacaggcgcaatttgaagcaaagtaaaatggacagacagtgcaatgaaatttggaaaactaagaaattgaataattcaaagcaattattatttttaaataaattattcatttaaatttaaaaaaataaaattttaacaaacaaaagtattaaaggtgtaaaattagccatttaattgatttaaaaggcatactaaaataaagtacaactaaaaaaacttaaaataaaataaatataaaatccctttttaatttttaaatattccttttaaataatacttttaaacaattttttcaaatttcaattctttaccattccttgcgttcccaccacgcccgcgcaacgtccaggccccaggtacggtagccggcgccgaccatcaacggtaggacgaacatcagcagcacaatgggagcaaaaacgagtgaaagctcgaagaaaatgaagcctgaaattataaaagatttaaataaattttaaaaagcgaaatttttaaaaattcgcaccggcaaatgcacgtgaataggtggccactttgaaattgtccgcaatggtcggaatgcgctcgtccagcttgtcagtgtccacttccatgatgccgtcgttgtccatcagcacattctgagacgcgttcacgacattgttgaaattgatgcctgaaatttttgggaaaaatttaaattttttgaaattgatacttcaattttttgaaaaatattatttaaattaatttatatttgaaacttatttcccttggttttcgagaaggagtgaccaaagaaaagcgtgtcatcacgtacatgacgaacacaatgggcgcccaaaaccatagaatccactaaaacagtgatttgtttaaataaagaatttttatttaattttacattttttatcgcttttgtcttgtgcacaaagtataaatttgctctcagtttttttaaatgtttttttttttttgcattttgcagaccgataaaacttcagaaggatttcattttaccaaatacggtattgcagtatttgctaatccatcgaaaattaacccgagtaatacaaaattccaattcgagaaaataaacaaaatttcaaatttaatatgatcacccacctccggattcttcacttcccgctcctcgcgccacctgtgctcgtacgagaagggctcttccggtgccacgtaatacctcttcgcggtttgacagtgccgttgcgcgtcatcgtccaacgttgtgccggacagatcgtagatggacccgctctgaaaggagggcacacaatttaatggaaatattttttaattgacaaaaattaatgtattaatggcaaaaaaattttatgtagataatttgcatcgcaatcttttatattatatatgttttttgatcataatatatatttgaattgtattgatatttgtgaattacattaaaacataattttaatatatttttagtttctgtgtatgcataatgaatgataattataaatattaatttattgagtctttaaaaagtgtacgatcgctcactcacccgacaaactgattcttcgagcgcgattttcgatctgaaattagcaaatacgtaaaaaacaaaaataaaacaaatggatgaatttaataattttatgaattaaattcaaataattccaaataggaatattcttgttagattaataaatattttctttataaattatttttgtgctcccccccccccctttcttctttttctgttcacaattttgttgtccaaaggccggcgaacacgagaatggtgaagccgggcacaatccacagattgcccttgtccattttgtcgccaatgccatccttcaccagaccacgtgccaacttcttcattcggccccccaatgtgcgtccatccctttcggaagatttctgtcccaagaatgggtggaaccatcggcaaatttgggcgagaataaagcccaaccactgaaaattgcaaaaaatatatattttttaatgtaaaaaaggatggcatgagagaatggcaanataatatattaattttaaaatatcattagaatgaaaaat

SEQ ID NO: 13023 - DNA, 2741 bp, Heterodera glycines
ttagtctggacacacttatgttaacagggttcatttcctccccgaaggacagataaaggggcaaacaagacaatttaataaacatttttgtccattttcaagtgcgtccttgaaatttaagggggccaaaaaaggctgaaacaatcttaaaacattattttcaaatttttcgatgacagctaaacagataacaaaaatgctcaagattcatctgttttcaaggacgtccgtgccatctgagagcaactgaaaggatcaataattgttttaattttttttttggggtttttctcatatttttataaaaatttgttcattttcaaacacgtcctttccccattcgaggggaccaaaatggacgatgaagagaatattttacaaaaaatttatttagaattttatttcgacaggaaaatgttcggcgacccaaacgcaatcattttgtatgtcaatcaacccgacctgttcccggtgtgccactttgagcagctccaatttgtgatgttccaagtggaaaagctggccaagcaggacggtaaccatgtgctggtccgtcgggcgtcatttattgaactgcgcaaaaggtgaacaaatttggaaatgtctcaaattgacatccaaatgccattcgagacagggccacatgcttagtaaatagtcagaaatttcgaaaaattggggtcaagatacaggaattgaatctggatcagattttttaatttaaccctatttttgcggtctcatgaccggatcagtatcatggaaaaaaaccctatcatcataatctatctaaactgtggccgaaactttattttaaaaaaaaattaattaattgcactatttctggaggcagcaaggatagcctcctcaattgcccttattatctaagccattggttcatgatccacggatcacttaacgtggatcgaaaaatctgtaatcgaaatccgtatgcataaagaccgttttggtgatcccaggctcacgatccattgttctaaggatccgatcctcgtatcaattttaatttttttctgaaaaaaaaaattttattggattctttgaaaacctaaaaattacattaatccgcagccgaatttctatttttgtttagacttagacttgacgaggccggcgactattcactgtattttgacggtaccaagcgtgttgcattagttcacatggcctacggttatttgcctgaacattatcctgagaaggactttgacctgcgcgtgatgatggagcgttcaacagctatcgtaaaaatttaaatattaaattgaaataaaactgtactaccaaattaaataataaacattaattaatgttaatccaaaaagagttttaaaccaagaaaaatttttttgaggcaaacaaaaaaccaacaaaaaaagaattttgtggcgcccaatttttttttataggcctatgcaaaaaattttgatttttgattttcaaggctaaatgatagaaatttaaaaaagtttcgaccttaactcgaaatatttttcaaaagatctatcaccgacttaaataaggaattaacgaatgttcatccctaaaagaatgttgacttaagaaaatttacgaggctaacaaatagagaaataaaaagaggattttcgcatcaaataaattttttaattgatttttaatttccaatgttaaaagaatataaatttaatttattcgaccaaaaaatatttaaaattattaattaattctattaattacttttattcataattatcttctaaatattatttagctgtcgccaaaccttcgtcttcaacttgccggaacgaagaaaatccaacaggtgttcgctggaaaatgatgccataaaattaattttattttttttaagattttgagcaaacccggcacattggaacatttcttccccaacgaccctcaacaggtggccaaaattcgaaacacattcaccgaactgtggggcctagaggagaatgatgaaattaccaaggcggtgattgtggtaaaaaaaaatttgaaaaattaaaaaaaaaattttaaatgtttaaggacgccatgaaaaattgccatgactatgtgatgaaatcgcagatggacggcgggcatggcatttatttcgatgaagaaattccgaaaatgttggccacgttgagcctggaagagcgaggcgcgttcattctgatgaagaagatcaatccggtggtggccaaagtgggaaattcaagtttaaaattaattgtatataaaattaaaaggcgaaaataaaaattatttaaaaatatatttttgaagaaaaaaaaattattaaaaattaaatttataaaccaaaaaaattactaaaagatatatttttaaatattttatctaccagataaaaacagattttcaatttgaccaatttttaataataaaatattttttcctaattataataataattttaatttcaaaaaataaacaattctagaacaaaataaattttcatgtttatatttagttttaattcccgtaagaataaaatatttctttttaattctcgaaaatatattaaatataaaaataataattaaaagtatcatgtgtcttaattataatattttagtgtttttgttcctaatttttgctcattattaagaacttcatggttcgcccgttcgaaaagccccaccaagaggaagtgaacagtgagatggccatatagaggcgcactgatcggtgatcagagtacgggaaaagtg

SEQ ID NO: 13024 - DNA, 1240 bp, Heterodera glycines
aaaaaaagtggataatttttttggtcaatcactaaattaagtttaaaaaaaattgccctaaaagataattggtgaagatttagttagacaagcccatcaaaaagcttaaaaataaccaatttttgttaaaaaaagtccattcgactaaaaattgtaaatggaagttgacacaaattagcaataaatgtttattctgataaaatattttaataattaaaaatgtatggcagacaattcatttgatgcggtcaattcatgtaataatttttgtttaaatggaaaattaaatttaaaaaaatgatttgcggtgaaaaaattggctatattttgacgaattgttaacattttgaagaacatgtgaaaaatgctgccaattgtacacggattcataatttttttatgaaattaaaaatgccattttttaaaaattaatttaagcaattaaatttaattggctcaattagcagctattcttgatcataaatgattgattaattgattgtgtgtgtttttggtgtgatattcaacggaattcgcttgacgggaacagtaacacggagtcgatcacgccactgccactgcacacgccaccgtggttctgcgaagcggcctaaatgtgtgtgaacgtttagaaccatcattaatagaggatcattagttaaatttttaattaaaagttaatcaaatgtcaataaattctcttaattgtagtcccagccgattagatgggctttcgtattcaacgcctaattaacacctaattaaggtcattgtccattagaaaagggaaaagcattaccccaacctccaccagataaagatttcttaaaatccccaaaattttcccggtgccgcaaaaaaaaaggatcatcataggggaaaggacctatggctgagctaataaaaaagatttttgtatttcaattaagtcttattacaatttaaaagaaaataataaataaaaatattattgatacctagtctaattaatggaagaacaatagaattgacacgtatttgctaatatacatttaaaaaaataaattttaatttaaatagtcaaattaaatttatttttttgattaaactctgaccttgcttcgcaccaaatgcccattcaccgagttgaccagcacttttcccgtactctgatcaccgatcagtgagccatagatgcccatctcactgttcacttcctcttggtggggcttttcgaacgggcgaaccatgaagttcttaa

SEQ ID NO: 13025 - DNA, 1782 bp, Heterodera glycines
acgtcctctacagaaagctgtgctcgaagaagtcgcgactcgattggaagaacacaaaggggatgagacgagcgttgaaagtcaggctgaggaagttacgagtacgacgttgcagcgtggtctgcttcagcacgaagtgggaggaatggaggcacagcaaatggttgtgggtgagcaggcgcaatgcccatctgctgagggtaaccgtttgctgtttttaaacatttaaagaaatgagtaaataagcgtttttaggtgttccgcatgccttcctttgcgccgggtgtcagttccgcgcggattgtgccaacttgcttcgtgccatcggtgctcttttgaaagacttcggcagtgctgcatctgttgacggaggacgcaacaacgggactacctaaaagacataacgaatcgtcataaatatcgccaccgtattttaacactgaatttgtgttctagatttccatttaattttcttagaaaatgtttgtgttcttttatcaatttcctgagttttcataagaaatacacagtacgctctctcctaagtattttgcgttgttttgtttacattcaaaagacatatcttcattttttgattcttttttattatggtgttactcggagtcgttatgaatgttctttgttttctcgtttggcttttcctttttttggagttttctttggcgcttgaggcgcctttgtgggttattcaggtcgttgttctcttactttttgcaaaatttccgacaattttagcggaagcgggatttgtatgagcgcaattccgtatgcatggacacacaacgaaaagaaattgaaacatttggaatgcagccatttcatgccattgtaacaccggcgaacacgacgatttggctcaaatgctcccagtggtaagtttcagcgcatttttaattggatttagtctaatgtccatttaatcccaaatgaatttacagcttgcatccggacgatacggaggagttggaggacgtgtggaagcccagtccttcggtcattggaagaaaaatacaacaatttctcaaaaaaattcgtgaagtttgtcactttctgtttcaaatttattttaacaattccagaaaataatacgttctaaatcgccttacgcaaaatctcgccgtgtaaatctggcaacttattgctggcaaaagttgggcaatatcaatgaaaaggacacatcgaagaaaaaatgggtaactataaagagcccaacgtttcagaagacaggcggaagggacaaccaaacggaagtgaccaaattcgtggaagagtaaattggactgaattgagtccacatattcgattttttaactttttaggcttacgaaaaaggacgacgagaacatgagaaatttttatctcggggaccattttgagttggaaatacgcaacattgacgctgcaaaaaaaggatggtatcggtgtcgcaacttaactggaaactatgccgaggacatttcgcaaatttatcatgtggatatattggaacactttcgcactgttatggtagaaacaaaattaattcaaaaaacaaaatgcatgcaaaaaattcagtactcagtagaccaaatgcctgatgaagtgaagaaagccgactttgccgaacgaataataaatgaaaatccgaaaattgaactgttctggcgtgagagtgagtggacgccgtgcaacatgtgcgggcacaaagtgggcgaacaacgccgggtcaaatcatgctatttgaaggtagtcgttaagactgcgtgggggagaggggggggg

SEQ ID NO: 13026 - DNA, 1485 bp, Heterodera glycines
  unsure (1)..(1485): unsure at all n locations
attgtttttactactaatnttgttacataattaatgcgaatntcacgaaacggtttttgtttctcccaatataggaaaaaagaaaatcgtctaaccttgacaaattactatagaaaaattaaatattatgacgagatccagagtacctgatttcggcttactttacccccactcttgcacattttgatttaaaaaacgatgcctgaattcataatttttaaatattaatttttaatacatgtcttaatttagcgaaagtgggctgtaaggaagcaagttaaagtcccttatgaagttttttcgttattcggtgaattgccatgtcacagttcgttagtgcctgaagaactgaagtcaaaattgggaggaaatcttactttctacgaggaattcgccgaatgcaaagtgcgtttataacaaacacattttaaacgtgaaatgtccttcagaagccgtgcaccccatcaaaacaaaatagcgaagaagtgcgtgaagtgacggtaaatgagacaggacatgcggaagtgctggacgtgttgccgccgggagagttcagcaccaacgaacggctgcccccattggcaccaccgatcattcggagaacaatttttgtatgtttttcgattgatgaaaatgcataatctgttatgaacggtgaattttaaggcaactgaaggcgactggctgatgatggactgcaccaaccaagacgcgaccgcactgatttggcgtaaggaattcgtcgagctgaatgcgacgcgtattctttcgctggaggatgggaaggagaggcagaggcgagtgatcacttctcgtgggattttcgtcataagttccgctcgacttgacgatgccggactttactcgtgagtttaccaagtttttatcacgtctaccaagaccgaaaaatctgatgttcaggtgtactgcgtatccaagtgggcatattttgcgtacctttcgacttttcattaatctcggtgatcggtctgccgaagtattggctgctattgcaattgttgtgcgaacattgcttatctttttcctattgctcctcatctttgatttgttaaatgtgaaaattccgaatgtatgattgtgaatcttatttatcatctgaatgtttttcccgaaattgttttttataacatgtaaacccataaagtgctccaagtatttccaaataaaaaagatggtgtaccaacggcagtataaccgaaaattaattttttgaatttcacattcttggtctcaatatggcttaccaaaacggaaatgataagccttatgtaactgtaaaaaatccgtacaggctgccgacatatttgtttcagtacatgttcagaagataccacgaaaacgcagaaatatttcagcatattttggaagaaatgcgattaaattaccccgtatagtttgaactattgagaaatcttgtaaaaatagattagtcaatgacggaaaattgtaaatgcactgaaatta

SEQ ID NO: 13027 - DNA, 1837 bp, Heterodera glycines
ataagtcagttacaaatcaataagataaaaaggggagacaaaaaccagacatgcacacaaaacaaaatgccaataattataataaaaattaaatcatataacacaaaaacacttaaaaataacagtgaattgataatggatctgcgcctatgtatgacattgaatttatgttgttttttctgttcatttttagttttgaattttattttgttgtttaaatgcagggtgcgaccgaaaatttttcaaaagcagaacatcgggctcaaaaaatcagattttcggttaaaatcagaaaattttgcggaattgcttcaaatctattattttttacaaaaatgtattaaatgtttgttttttttcgactccgattatcgaatttaaaattttggggaggaaataagcaaatcgtaagtttcagtgcattcaggatcaaaaaatcagatttttaacaatttttttgcagctcatttttccaaaaaacttttggtgaatgggcgagggtagagggtccggcggtgcctataggcgccgcaggaaaattttttgtaatttcgttctgatttgttaacagattttcaccaaaaaatgccaagtcgccagaagaaagattagttttgcataccgacaaactgatcaacgaactgatcgccaaaatcgacctgaaaacgtaatataaaaaacagctctcactcaagaaaactaactcaattcacaacaacttcacactttaattcaagtaaaacagaacattacagcagacaaacacaccaaaagaaggagaccaaccaacaacaactcaatgaatgaggaaagggcataagtcagttacaaatcaataagataaaagggagacaaaaacagacatgcacacaaacaaaatgccaataattataataaaattaaatcatataacacaaaaacacttaaaaataacagtgaattgataatggatctgcgcctatgtatgacattgaatttatgttgttttttctgttcatttttagttttgaattttattttgttgtttaaatgcagggtgcgaccgaaaatttttcaaaagcagaacatcgggctcaaaaaatcagattttcggttaaaatcagaaaattttgcggaattgcttcaaatctattattttttacaaaaatgtattaaatgtttgttttttttcgactccgattatcgaatttaaaattttggggaggaaataagcaaatcgtaagtttcagtgcattcaggatcaaaaaatcagatttttaacaatttttttgcagctcatttttccaaaaaacttttggtgaatgggcgagggtagagggtccggcggtgcctataggcgccgcaggaaaattttttttttataatttcgttctgatttattaactgattttcaccaaaaaaatgccaatttttgcaattaaaagccaagcgacggtgcttgaatgttagttttgtaatggtttcctttcagccattttgaatctttggcataccgtctctgaaacgaatttgcataagtgttcaaaattataaattatttacagaaatttatccaaagttatgcaataatttggcaaaaatgaccgtccaataaatatgagttcactttttttaagattgataacattttttatagaggaagaaaaaatctgaaaaactttagactgttataaccttttatactgatcaaaaaagtcaattgcaccaccatatgttttctataatcatgtaaaatttcagaaaatttcgttaagtttcaagaaagttgtgaccaaaaatattcaaaaaaaccattggttttttgagtttctcaggtcataacttttttgaaacttaa

SEQ ID NO: 13028 - DNA, 1594 bp, Heterodera glycines
atggacgcagaaatggccaagttcaaaaagttacgagtgatgccagaaagttatgacaaattgaaaaggactcacgaaaatttgtattatggggcggtgaaagcactgatgggacagctggggaagaatatgtacaagagactgtccaaaggcaaagaaaacaatggcatttggcaaaatggtcgaaccattctttaggggagcagcggcgattggccaaatgtctggaccgaattgagaaccgattcgacctaaagtcgccggcaatttgcctggttgaaagcaaacggcgattaatgaagacgcaacggacgaagagcgacgaattgttggcatttgtccaagaagagggtacgatagctgggaggagattgatacggtagggaaatgagcggaaatggccgtttagaaaagcaccaaagcgacagtcatcgtgtagaagtggcattcatgcgagacagtgatgcagttacggtagaaggcactcacaaaacggtacggtatttggacgacaaatggactaattaaacagataatgaaccacagaatgtaggacagaaaaaacaacaaattcaatcagttcagcaacggaatggtcacctgctgggaaaagttgaaaagggacgaaaacggacagagtcggcgcggctgattcggtacggcaaaaagggcagacggagggtgccgagaagggtggaggacggatttgagcagttgctgaaggtgccaattggactcatttaagaaaaggaagcattgagggaatggaaggggagagatcaaaaaatgaaaatggcaatggcaaacaaaaaaacaattggcataaattgaacagacgcgaaaggagcgcgaaaaatggctgaccaatggacgaatggggcgatgggaaagtgcggaagaggcacaaggaaacgcggaagaacggtttaaggtggggttagcaaacgaagaaatgaccgaccactcattccttaattacaatattcgattatttccgatcaaatcgatgaacacttcgcttccgctgagcaccgacgccgacaaatccatcggatcacgcgtaagtgccggaaaagcggaaccaattgaaattcgtcaaacgtactgacaaaagaaatcccaaaaaaaggtgtcaaatttgctgattaaaatgatgggcgaaaggggagaaaaggcggaaaacaaatggacaaaagtgcacggattgttggcacgactttcggaagaaacggaacgacgcaaaaaatttcccggcacaaaagtatttgagaagcgaatgtacggcacggaacatttgaaacttttcattcgtttggcattctttaggtatgacattgttttggaccgggaagagccttctctgagtcccaaggaaaaggttggtctctcatcagtagggatgggatttttaagggcgaacatccaaaataaggatttttaagggcgaacatcaaaaataaggatttctaaggtcgaataagggcgtgaaaacgcaaaattttcagacaaaaaatgtgtttttcgtgtatttctcgttgagttaaagccgcagaaaaaataagtaaaaacttagaaatcccatccctactcatca

SEQ ID NO: 13029 - DNA, 2284 bp, Heterodera glycines
ccagctaaagctaatgcaattggtattgacctcggcacgacgtattcgtgtgttggagtcttccagcacggaaaggtggagatcatcgcgaacgaccaaggtgcagtaaagaccggacgtgctttccctcaaaatattgttaccatcccgaatttcaggcaaccgcaccacgccgtcctatgtcgcgttcaccgacaccgaacgtttgatcggcgatgcggccaagaaccaggcaacttttcacaaaatcaactgtttaagcagtttaaactgatttgtttgacaggtggcgatgaacccatccaacaccgtgttcgacgccaaacgtctcatcggacgcaagttcgacgacccggcggtgcagtcggacatgaagcactggccgttcaaagtggtgcagggagagggtgctcgtccgaaagtgatggtggaagtcaaaggcgaggacaaagcgttcttccctgaggtttgtgctgtttgctaaactgctccatccccccgccccagttgaaaattttgaatggaggcaatttcgtatgcttgattctttttcggaaaatctacaatctgaggaattaaagctttcagaaaaatgaaatttgggagggaagaggactctaaaagcaaccaaaattggcgtttgttgagtgtttgcttgttgtacttaaatgtgtttttttttttgcaggaggtttcgtccatggtgcttatcaagatgaaggagacggccgaggccttccttggccagactgtcacggatgcggtggtcacagtgcccgcttacttcaacgactcgcagcgtcaggccaccaaggacgcggggaccatcgccgggctgaacgtgttgcgcatcatcaacgagccgacagccgccgcgattgcctacggcttggacaagaaggggcagggtgagcgccatgtgctcattttcgacttgggcggtggcactttcgacgtgtccatccttaccatcgaggacggcatcttcgaggtgaaatcgaccgccggtgacactcatctcggtggcgaggacttcgacaatcgaatggtttgattttcgaatttgccagcaattcaaaatggttcgaactaaggtttaagaaaaatgaaaaagatagtttggtcgaaccaacacttaaaatgaatgaaaagcattttcttttgcttgtttgaatttaaactgcttttccttcaggtcaaccactttgtcgcggagttcaagcgcaagcacaagaaggacctcagttcgaaccctcgtgcgttgcgtcgtttgcgtacggcctgcgagcgcgccaagcgcactctgtccggttccacccaggccaggtttgtttctttccctttttggcgggtcatttcacaaactcatttgccccatgtaaaactaattccttcaatttcagcatcgaaattgactctctcttcgacggcatcgacttctacaccaacatcacgcgcgcccgcttcgaggagctttgcgccgaccttttccgcaacaccatggaccctgtggagaaggctttgcgcgacgcgaagatggacaagtcccagatccacgacattgtgttggtcggcggctcgactcgaattccgaaggtgcagaagcttctctccgactttttctccggcaaggagctgaacaaaagcatcaacccggacgaggcggtggcctacggagcggctgtccaggcggccattctttccggcgacaagtcggaaactgttcaggtgaacgattaagcctacctatcttaaatttcgaattaaattttgtttttcttgtttgttttttttgactgttgtgtattcctttctttttaggacttgctgctgcttgacgttgcccctctctccctgggcattgaaacggccggcggcgtgatgacttcactcatcaagcgcaacacgaccattccgacaaagacgtcgcagacattcaccacctattcggacaatcagcctggtgtgctgattcaggtaaagcaacggcatttccccttttgattgtttctgtgtgaaaactgttcaatttgaggtctacgaaggcgagcgcgcgatgaccaaggacaacaacctgctgggcaagttcgagctcagcggcattccgccggcgccacgaggagtgcctcaaatcgaagtcactttcgacatcgacgccaacggcattttgaacgtgtcggcccaggacaagtctaccgggaaacagaacaagatcaccatcaccaacgacaaaggccgcctttacaaggaggaaattgagcgcatggtgcaggaggcggagaag

SEQ ID NO: 13030 - DNA, 2298 bp, Heterodera glycines
  unsure (1)..(2298): unsure at all n locations
attgacttttatgaatatatgtttagtagaattgattaaatgtatcggatgtttattgttaaatgccgaagttaaatttaaaaaaattgagcaaatgataaagctgacaagaaaagggaaaaaggagagggggttggagattcagttgatggcattttctgttctcgtcctcctcctgccaccgcttttgctgtgtttgttacaagcgtcgaaaaaaatagcaccaaaaacgaggaaaaggccgcaaaaaccctgcaaattgattggatggacgaagtaaagagaagagagaatgatggagaaaatttggcgaagtgtcataatgacggaaagaacgacggggccgaagttttggatggtcaaataaatgaacacctggcaaaagcaaattcaaagaaaggctaagggaatgtgaataaatgacctggccaagggacgagcccaaagaaaggaacagacaatcgaccaaaacggactcatggacaaacagaaaatggacggaggagggcaaagtccattgttggaggagagggaccagacaaatgagcacactgaacgcattcacacagaacatcatctgaatggaaagaaaatgatgaggggacgaacgaacggacaacaaaacacgaaaggacctgggagcacgaaattcggggcggttgttcgagcaattctgaaaccaattaattcattaggccattctcaaatttaaattaatgggccaagaccgatcaaagaaaaccaaataaaacaaatgaaccctaacaataaaccatccttacttttctgccaattcggagtgaacgcgtcgaacagcaaatagccgagcatcagaagaaaacccgaaacagcgttggaataagcccgtaaagattgtgccaaaacgataaaaaggcctttttcttccttctcagaaggtttttcaaaatgggaagtgccacgagcggaagtgaaatgggaagaatccgaggaagtggcgagaaaaaacaccgaagttccgaggacgagggtcagcgcaaaagcatattggctggtggaatagcgctggccgcgcagcaatattcccatgagcatcgtcggcacaattttcgatgctttgcacacagtctaatgggggggggggaattgctttaaatggcactccaacggtgaaaagaatggcacctgagcgggaaaggaaacgtatttcaatgcctcgtattggcaccacgaagcgatgacattggagaaggaggaaaaagagtgcaggtaaaggggcgcaacgtgcggaggctgcgctttccgagtgacgaaaagataagcgccggaaagtgccaatgccacctcaaaacagcggggtcatttggtgggtcaatgccagtacgtacaattcgattggagaacaccaaaaactgagtgtcccggaaaaagtctgtccttttcggctccgttctgtggggataaccgcgcgtcacaatgcgttcctggaagaagcccatacaaatcaaagtcacctgaaaacggtgggggggggggatcgatgcacaaaggatggacaaaatgacttggattccggcgaaacagacggacacggacagacagtcagccaacaacgacttccgtctccgcaattgtgccgtgccgccgactgaacaaatgcgccctccctcctcgtcctccgccccgtctctcagctgttccttctccgaaagtgtgcccctttccttcgcgctttgggccgtccgaagttcggccgattgtccgacggcgaattggcgaagcaatcgcaaaaggaaatggcggcggaaaatattggcattccctacacatttttacgctaaatgatgcgaagaaaagtgtgctacttttcgcctcttttcgaatgcatcggactataaagtagccgaggagaagcaaagtgccgtaggcagtcaaagtgggcaaaagtcggaacagccaaaagacatcggcggaggggtcatccgaagacgggaataataatgcgaaagtggaaacattaaccatcctgaaacagccaaacttaaatcggaagcaaccaaatgaaacaattactgaatgagagcacactcgcgagagagagatgcaaattttgaggataaattaaacgccggcgcatataaaaagcatccacgcggcggtctttgcgacaatcgtcgagaaaaacgacgacggagagcaaagagaccgagcgaaagctacnaaaaagatagacaaaatgataagaaaaaacattggaaaatcgcaaaatgagcgaagtngtgtcgacagaatgaaaaaaaacaaatttaattanataaa

SEQ ID NO: 13031 - DNA, 2287 bp, Heterodera glycines
agggataatgaagtcgaaatactcctcccaaccggcgtccgtcccatccgtcgcggttatctgtcggcgcttcttcacccgttttggcatcattcgttcgacggcacttcgttccgcttccgtcccgtgctgtgcctcaaagtcgcgccactgctccaacaacaaaagacgttcctccgccggcgctccctcaagtgcttggttcgcgcgtttgtaaagtgcacgggcgcggtcgaattcgccgttgctcgcctcccattcgacccaactgatccaaacctagcaaaaggacatcgaaatgcattggcacagccctcccccccggaaatgcctttaagtgttgggtacgtcgaagcaaactttcgtacaaaatgcgcgctctttcgggttcgccctgctcaatttcgaagtcaatgtacgccttccacagcacttcgggcatgtccaaactgggctgttggacggctatttgaaagacggcacgtgcccgctgctcatcgcccaacagagtttccaactcggcatatttcatccagctgatactgttgtcaggtgagaactcgaggaatttttcgtagagttttcgacatctgtgaaaaaaaacaataaattcgttttgaagtgccaacgcaccggtcgaactccctcagctgcaactccatctccaatgtactcgcggaaaagcttcttctttggacattttccaattgccgtgcccaaaatcttacgagcggagcctaaattgagttgtctgagctcaaattgggcgaacatcagccaagtgaaggcgaaggtgaactgcttgtgggggacgatgtccaaacaggcacgccacacttcacgacactttcccacgtcctcaacatcgagctcttcgtaaatggcgtaatacacccacagccaaatgtaacgacgccaaaaccgtttttcctaaaggttgaaaagaaaatgcattcggatgtaagcccaccattctgttaaatcttatttttgtaaattaaaaaattcgtcagggtcttggtcacagaaaccagttacccgaaatgtctattatttagcccacctaccacataaggcggcacattggaaatggccctctcaaaacattcctccacttcggcccggtcggcctcctccgccatcaacagtcgcacataattgaaccacgcgtcgtaattgaatgggttctccttgacttgctgaaaagggacatttggccaagtgatgggccaccactccgacctcttcgtattggtgacggcgttttgagaaaatgactccctcaattcgcaatcgttcgccaaattttttttcatgcattgtgagacatttgaacagttcagtggtgcgagtagttggcaaatggtctgaaaagggggcaaaaaaggaattcaaaacggtaggaccatttacccccctccccctcccaaattcgtaccgatgccgaattgataaatcacgcgcgccctttcgaattccttttgccgctcttcgaattgcgcaaaggcgatcaaaatgttttctgtcagattctcctccccaaaaaactccaacatttgttcgtaaattgcccttgcatttccagtgaatccgttgcgctcttcgaactttgcgtaccgtacccaatttttgaagtcgtgcccatggacatgcaaataacgctgaattcctcgcgttgttctgtttgttcggtttccgttccctttgctccctcttcacctggtaaaggtccctcgctctgtccacttctttgtagcgcatttcgaagttgatgaatgtcagccacgcctgctcatccggctcccactccatccaccgttcgaacacttgccgtgcgccggggatgttgccgaccaattcctccatgtaggagtacttcagccaaaactgcgtggccctcggcagaatggtcaccgcccggtcccaaatgtttcgggcgtggttcacctgcttgtttctgtacgaaaatggatagattagaagcaaggaaaaatgcagtgaaattgggtggtatccaagtcaaaaggaaagacgaattccaatttagaaaattcgtgcacaatggagttgatgggtcattccgaagtatttaacgaataattttgaaattttatggcttgctaaaaaataaagtgggccctctccccccctcccccccccatttggctctcccgtggtcagaggtgagtcaatccacctcatttccatttcggcatattgcaaccagatggtgatgctgcgatggtccacgtccaacccccgctcgaacaccgaccgcgccccgtgc

SEQ ID NO: 13032 - DNA, 1002 bp, Heterodera glycines
ttgactcatttccatgtcttggattgcctccctttcctccaatttacctccaactcgcgctccttcgcttcacgcaaaagttgctcggcagtgatttgaacgacggccgccgccttaagaggaaaaattggaaatgaatggaagtcgggcactgactgaccttgttcttcactttctccgccttttttggcaatcggatttgcttggctttctcctccatttctatccaaaataataattaaaattaattaattaataataatccgccgcatcgtaaaaatattttccgttttgaaaacaacagataaaataaaaaaataaattgtcgtctcatttttacagattaactgaagcaatcgcagtaaagccttgttaaatgaatgtccaatgtgagaggtatttaaacggaaagcatcgcctcattcgccgttggacgttgaagacgattgctgtacaaaagagggggccattttcgggttcatcggaacatccctcaacataggctccaaaaaagaaaattgcggaacgcgagaaacggccattttgctgaaagttgggatttgaaagaacggaagcaaaagtctaaattccactctaactattgtagcaatttctcattccgcttctccctttaagaatttgcttatttgccgcttcttcctttacatgtgcattggagagagcgttttggttgaactgtgctggacactttcggccgctgcgagcaacaatttctccgcaaaaacttccatggcactgccgatagccaccggcacactggccaccattctgccgatgtcttcgtcactttgcattacttttttcactctcgtctaaaaaaaattagggaattaaaatagattattaaattttattaattggataaattaacactaaatgtaaaattgtatgaatacctaaacagtaaaaaggtgaaaaaatcatcatcgaaaaatgctcatttaaactcgttttaacacaacacattaatgaatttcgaaa

SEQ ID NO: 13033 - DNA, 1612 bp, Heterodera glycines
ctaaaagttataaagaaaaaattcaaaaacttttactttttgtaattttcattttaataatttttgggtcctctaattgagaagcaatatacatgttaagcttgcgaatgataccaagattattggatttgattgacagtgaaaaaattaacagtccaaaaacttgggctggcgccgaaacgacccttattcattttgtaaatattttttgccgaaaaaagaaatgctattcggtaacaactaaaaaatattaggttgtttcataattttgtcgttttttaataaaaatgaaaacatctaaaaaattaggcctaaaaaagctactaatggagaaccaccttcaccaaataaaacaaaaacctatcaccaaaatggaatttgatatcgggaaattgttttggcgaattcggaaagcttcaaaaatcaagggctaatcttaaaatcttttcttaggctttggcttcagatttttatcttgccaagaataaaaaaaggtaaagaattagtcgcttttcgctgcgtttgttccttcgctgaaagagagtgcaccaaagagagaaggcaaagaagacatacaacgggagaaatataacgcagtatttttccttgtccctcctctgttttaactcatcataaataatttttattttccaaatattcatccattttacccgctgttttttatccctggttcctctgtattcggacgatgaaatctttcgccttttactaaaggtttccgtgcagggggacgcttatgggttaaacccaatttttggacagcgctctctccagggagggcgcgaaaatttattagaaaaatcaataattatcttttcctcacccggcataagcagccaacaaatgccaaatggcatgcaaatacggcgtgccaagctgaagccacaggtcgcaaatcattttgtcggccagccaacagctcactgccattatccatgcgaacaaaatgcgtttagtcaattggggaacctcggaaatgccaccttttctgagtagaaatagcaaaactatttcacacaatttcaaaataaacttttgccaaacaaaccgagtgccctcgtggtaaatgaaaatggcacagggcaatgaagaagctatcaaaacgaatgcattcactcgccggttcaataaaaccgagaacggacaccgaaacggacaaaagaatgacggccaaacgaaagtgaggcctaagggggaaaagaatggtcaattagtgggaaaaaatcaataatttaattatttacatttaaaatttaattaaaatacaatatatgttgtaattaaaacaaattttcaaaataaaatttgaaagttgtagctaactcctaagtttctgttaaatgctttcctcaagaattaacatgttttttaagccaaattattatgatagaaatttatttttaaaattaaattaatttttgtaataaaacaaaaataattgcaagaaaatgaaaagatgctttttttaaatttaataaaagttattttttatattctttgttgatcataataaggtacttgtagattttgtcaccctccgcaaatttttttagataattttttctatgctgatttattgtgctaatcacga

SEQ ID NO: 13034 - DNA, 1608 bp, Heterodera glycines
tgcattcactgccgggtcaatgaaaccgagaacggacaccgaaacggacaaaagaatgacggccaaacgaaagtgaggcctaagggggaaaagaatggttaattagtgggaaaaaatcaataatttaattatttacatttaaaatttaattaaaatacaatacatatatgttgtaattaaaacaaattttcaaagtaaaatttgaaagttctagctaactcctaagtttctgttaaatgctttcctcaagaattaacatgttttttaagccgaattattatgatagagatttatttttaaaattaaattaatttttgtaataaaacaaaaataattgcaagaaaatgaaaagatgcttttttttaatttaataaaagttattttttatattctttgttgataataataaggtacttgtagattttgtcaccctccgcaaatttttttagataattttttctatgctgatttattgtgctaatcacgacccatcttggcccatcgcgaaccccggattcgaacaaaaagtctaaaccccaatttttgaaaattcgatttttgttctaaaataaattaaaacaagcaaaaactgatcataaaccattacaacaacaaaaaataatcattacacaaagattcgaacataaaagagaatttctgaaaaattcgaatttcgacttttattttaattcggttccgagattcgaaataggccaaaatatatgccatattcttgatcagtaacccaatccgaattggcatgatgcccttctctttgatcagtaacccaatccgaattggcatgatgctcttctctctctctcacaaatgttccttgagcagtttgcgcggcaccatattgtggttgagcagcaccggcgtgtacgccaccagacacgtggtcatcatgtgcagaaggaacagttcgtccaccaattggccgaacagcgaaagggtggcgtggtaataagccgacgcgagcccattaagtgcgagaaaagcgtggggacaaatggccacggggttcacccggctgagaaagggccacaggcggacgacgttcagcaggggcaacagcagcagcggaaggttggaaatagtgttggcaaatcggaaataaaggcaaagacaatttaaaaagtgccaaatttataaatcaaatttttagttgggcaaatcgcaaccgaaaataatggaaataaaattgaaaaacatttaatgtattaaggaaatggatgtatttgtaattagtttaaaatttgggaatttattaaaaattaaaagataaaatattttaaaataattgaaacaatttatattgtttaaaaaatgttcgaattttcttagccaataattcttaaaaaaggaaggaatattgaaaaaataacaacaactcactcggcaacgaatggcacaattttgtatttgttgtcggacagtgactcgcaccagggcatgcccgactcaaaggcgaaccaatggtccattaaagtcacaaattgtcaattatctgacaaaacattttaaaattagattttaaaatagaataaaatgaaaaaatctaaagagaattattttttgttttttaaacttgtaattaattgagaa

SEQ ID NO: 13035 - DNA, 961 bp, Heterodera glycines
atcagatgctcattctatttgctttaattttgcattttgttttttcaaaaaaatattctccgacgaaaaccatcacatttttgatcacacttttcacacgaggttggttggttggctgaacaaattctgtcattcaatggacaatttgttatgtaatttaaatgttcatcatttgtctctaatcgcagcaaaaaaaaattgggggaaattgtaaaacaattaaatttttaaagaaagggcggaactcattataaaagcgaaaaaaaatacatagggaaaataattggaaaacaacaatttaacaccagacaattaaaattggaataaaaagtacagagagaatagtgcgggaaaattgaaatattaaaataaaaaagcaattaatttgaccatattataaataaaaattttgaaaatgcaaattaaaataaaaaatttcaaatattttacagttatggagatttttgagacgatttctccggccgaattccctcccccccccattttgttaattataaccggggaattggacaactgattgagcggaagcagaaaaaaacacaatgcatttatttgtcaaatactttacactttcggccatagtgtggcagatgttttttgtcattgatcaatcatttgaggggcggggagggatgtgagggacagcacagagagagagagagcgagaaagagggagagaagagagagagagagaagagagagaaggagaaagaagagagagagagggagagaagagaaagagagaagagagagaaggagaaagaagagatagagagggagagaagagaaagagagaagagagagaagagaaagaggcagagaagagagggagaaataagagagagagagggagagaagagaaagagagaagagagagagggaaaaagaagagagagagagaagagagagagggagaaagaagagatagagagggagagaa

SEQ ID NO: 13036 - DNA, 3854 bp, Heterodera glycines
  unsure (1)..(3854): unsure at all n locations
aaagagaaaatgaatcatttttgtggagcatgcggagaaagcaaaccaaaaanttggcatggaatgaggcggaaaaagcgtcgnccgtccccgcgagagcaatttgttggcccccaaatgatgaatgaaagctgtgccatcattaagtgccacaaacatggcccgcaagacgcccacacaaaaattgaaaagccaaccgcctccaactttttaacatagcccacccgccgactctccttggggacacgtgttcccaaaaaggcggcggattcagggtcaatgggtcaatttttagacaattggacaatccagccgaaatagacaatccgtcgacggtggacgtaatgatgctaaatgagttaataaacgaatccaaaaaaaggaaagagcccaaaattgccggggcgccataatttgtaactctaatgattgccacaccatttatctcatcatgataattccatttattgtcatattatattgtccattgtcggatttatcagtgtccaattgtcatttgccgaattgtccggaaacgttcggggtcgagctattaaggtttgaaccaatccattgaaataaatcggtgattcaattccactcaaccagttaatttaaattttttgccggatctatttttttgattattccaaaccgctagcctacccccatcaatggtaagagatttataaaatggtagcctcaagtgattgtcgatcccatgacttcggtgcagcgaccgcctttcacccaaaccagaccagtgctcagcctttctcgggcacttagtatttggtttttggcacctatttatgtgcctaatttgagatattgagcaccgaaaaacaaagccgttacaattataggcttttcctccctttttgccttgcaaatgttccgctgcttacgtctttttccgccaatgcttttcctcccacttcttctggtgcttctcctccctttgtactcctccgtcttcgtccaatctgtttcccaacggcgtccggtccgaattacgcccttcctttactccgacgcgttgaacatcgctgcggctggagggtatgttgtgtattttttgaacaaaatttcagggaattttgtggcatttttcagggttttccgccttctcccctcgccgaagcaataagaatttttcaattttttaacatttttttattctcagaagaacataaaatacaacaaaaatttttttttataaattttggcttttctccagttctgttgctcctctgaagaaggaaaatgccatgtttgatgtgccaacaaagtttggctgggacagccaaacgatgcgccagatcactcccttcctctattcatcagtgaacagcggacagcagcaggagagaaagcgatttgaataacggattataatgtgaatgatggtgataatggagatactatactaccgtataatttctaccgttgatggatgtgctctgatcagttataagcaaattatgggaatttgatcattcaaattaataatatcaaaaagttgcgtctgcgtattttataattgtacaagtgcattacatttgtgagctagctgtttttttaatgtacatgccatagcaaatagtatagcaaaattttgctgccttttcatagtttgaattttacgaaattcggtgcccattttttaaatacgcaaatggcgctagcaatgtttatcccctgctggaatctctatcaattcgggttatatctctcaaatatgaactatcatcatatgcaggtttattttccatttagaattctatataaaccaagaagccgaaaaataaattttaggcttagtttggtgaaactgacccggcgatattattcggacccccccccccccccccctctcggctggttttaatggttaagtgaattttggtgccttgggcatttgcttctccgccaaaattggttgaaaatttaagtttttcatcacaagaataacattttaatcaaaaaaaaacaccttgccttggcacaagcgcaaattaaatcaattgttgggaataaatgataattattttaaaattctctaagaaaaaatgtttaatcactcctatcatctctatctatctatttaatggtgttttatgaatcgaatgaaataatttttcaacaaatataaagaaaatttttaaaattgctattttaaaaataaaatttacgcctccgatccttctccaagacatttttttatattcttactaatgaatggtcactcattttttaattgtttcatttattttccaatatgtcattttttccatctttttctttccccgtttattgctcattccgaattgtttcttcacattttccagcccattatttttttacggctaacttcgattttcttcgaaatttcatctttattttgtccatttcttttgatatttttgcttattttctttacattagctcctttaatccattaataattatttcactatcttgaaatttttttagcctagacttaaaaattcaagtgtaaaatttaatattttaagcttttatggaagtcctttacgccttagtcagacaacggaaatttttggaatttaaaaaattaaataatttttttgtcaaattgcgcgagtttttgggcgcaaatcacacaacacaaataggttaatgttaatgtaatcaactaaccgcgttcattgccacaatttttcgcgcactttggcccaacccctccccccgtcgcccggcccaaaacaaatttaaaaaagaaaacaaaatttcattttcaattcccatcaatcacttttcttccaatcgaacttttaattggtttctcgaaatgcgaaattctctatttgatataggaagaaataaatacgccaatcgcaaaatattttttcatcaatttgctgtcgtgtatttaccctttaaaatattttcgtaaaaaatacccaaaaagtttaaattagctggcgttctctcaggtgtccatgcatttgatcaaatatgaaagcagaagccgaactgatcgattagttggtgaggtagtgatcagttaataaggaggataagacaagatagggacatagaaaaaagagagagagagagacagagagaggggggggggggagggggaaagatagagagagagagagagagtatggagagatagagagtgacaaaaaaattggtctctgcaacaaatttttttcatgctttaaaacaaaaagcttttttccaccccttcttttgcctcaagctaaacaatttggcacacttccgtatgcttctcctctctgctgtcagcttttattgtttctctctctcaccccctttctccgctcatctctaactttgcccactattttaggcatttattctttctttttctgtggcatttttggccattgcatgttttcgtccattgttcatctgtttttctctcattttgcccttttattgatcccccacaatttcgtcggtgtacatcaaagctcaacaaacagcacgggagggggaatgatgatgcaccttctccctcctgtttttgcacatcaaccgcacattttctcctctcattttccaggccaatttcatctccgatgccttaaataattctcaaaaaaacatcagaaaataatttataaaatcattttttatttttactttatttttgagagaaaaaacaaccagagaattaatgagtttaataggagatccacaattttcaagtacccccccccaccctttattgagagaatttctttttcagagtgaaaggggtagaaaaagagagagagagagagaaagagagagagagagagaaagagagagagagagagagagagagaagagagaga

SEQ ID NO: 13037 - DNA, 4021 bp, Heterodera glycines
tggagcgccactgctgcgcctcggtctgctcgcgcgaatttgacggagcaggttggacttgctggacagctcttcctccaacgtgtctctggcattgtaaatatttgttaaattatttacaattaaagctaatttaaatctccaattgatcacctgagctgctccaactcgtgctgcaggttcttcacgtgcgtgctcagtgcctgcttctcgcgctgttcctccgttgcggcacgcttcaactcctccgcttggacaaagaattgcgacttgaggcgtccggtagcggtcgactgcgactccaagtcctccacttggcgcccgaactcgccgcactcggcctgcaggcgctgcttggagaattgcaactcctgcggaggaacattaaaatattcttctttagctaattatttcggtaattcaataatgattcattttaattacttaattaattcgttttaattccccaattaattcgtctcaatttcctaattaatttgtttgattttaaatgtctccattttgctttctccgtttgcttttgccctgcctgaatttgtcgcgactgttcctccgtcttcagccgcaactccaacaattggccctcaaatgccttctcccgtcgttccaaatccatgcgctgcttcgcctcgtcgtctagctgactctgctgcatctccagctgtcgttgcattgcgatgcgctccttctccgctttgttcttcatccgttgcacttggtcaatttgttcgtgcaattccgtgcagcccgaggctcccttttctacaaaaaattgaaaattaacgaatttaagaaatttttagaaggggtcacaaaatcaaaaatgacctcatccatataaatgcggactcaatgaactccattaactccttggtctaattgattaaataaagttggccattttttcattcccattttgaaattcgaaaattgctattggttttgaaattgtccttgaccagaaactgtagcaggacgttgggtttttcaaattttcaaacctcgccgaaaaataaatatttccgatttctttttgtgatgaaaaggaatattatgggagtcctttgatggtaattgccgcaaaggaattttaatattttgtttttttgtaccctaccctctgatgattttacatttttttcgttccctttgatcactgcgattccttcgcttttttcccaatttattacttttcagtgcggtcgcttgtgattcgaatgtcaacttcagctggtcaatttcccgtctcagcttcgccacttcagcgtctttctttttgttcgcttcgatttgcgattgcgtcgcttgcgcctgctgttccaaccgctcctgcagttcgtccgcttcgtattgaatttcgcctcggccgcgctcggagcgcgcccgcgcctgccgttccgcttccaattccgcctccatctctttacaacgtgcgtccatctcctaaaaaaggcacacaaaatataaataataaattaattaaaaatattttaattaattattttgtcccaaatttgtttcgacctgcgcctgtcgctgcaatttcgcgccttgcgactgcgcctcctcaaaacggacggacagtgcgaaaaggtcggcctccttgcgcttcagactcgtctccatgtcctgccgctgcttgcccatctcgtccaaattctcgcgtgcaatgcgcacttcgccctcgaacttgcggcgcgctttctcctgctcggcacgtgcacgacgctcgcggtccatttcattttcaacccgactttaaacaaaagaaaataatatctgtactttttgacaatttgttttattgaaattaaggcacggcgtgccgttgaaagaatttgaaactttggccacctccaaagtttgttgcagtttctgtcggtgcgctttctccgccgcgtttcgctccgcctccatttgcaagtcgttctgcagtttggctgcaagttcctgctgctgtttgcgctccttggccagtttggactcggtcagttcctgcttgtgcagttcatcggccagtgtccgtaacttaaaaaattgtcaattcgtttgctaattttgccaattcattagttaatggtcgattagattgctaattatcgccaattgattaattaattttcaattcgtttgtctaattattgctaattaattaattaattgctcttttccgttacctggttgtccttggcctgcttctccgcctccaatttgcgcatgccaacgtccatgtcggtgatgtttttccgcaacgactcgcactccgcttcggtgcgtttccgctccttttgcaattcaatcgcacgcgactcttcgttggcaaggcgcgaattcacttccaccgactcattctcaagcgcttgctgaaaccgaagagaaattaatttatccaaaattttcaaattttctataaaaatgattttatgaattaattagagggctacagtagccaaagtcaatgttgtgcgtacggtatacaacgttgtcatatgtcgtacggtatgcaatgttttaccattgctttcattcgcgagctaatccatcagttctaagcaagttttgtacctttttgaagcggattatttccaactgtgacttcatctcttcataccaatcaaatgctcttttcaagtgcatcatttgaatgtcggaagccattttttattttagaatgatcggaaacgacataaaatttgaatgatcactaaaattagctgatcagcagaatgagtgatcaatgggcgaatgatttgcggggggggggggggaagcgatgcttttgattgttcgattggccatgtgaatggccacacaaaagcagcaattagtcataggaaggaaggaaaaacacgaaaaggggaaatattggatcgaatttcatttaaatgagtgatcggttgagagggggggggggacttaatgatcaaatgggacggccattcattcgctaccatcactcaaaatcaaccgcaaacaaatcgcaaaaaaaaagtgaatttcaaacaaatttaaaaaatccctgttctatgaatagattttaagagcaaatacaaatgaattgattttttatataatttattgaagtcaaaaagaatgtttttcaaacgttttgctcctggtttggggtttgtatatgatttttataatgcttattttaccaaaagtttttttttaaatttccgattttcaatatattttttagtgtccaggtcaacacgaaggagtgatctgatcaagttgttttataatacttttgaccagcttcaaaattaagtcagcataataattattattacagattttttaagagcattttgaaatggtttttcatgcttgttcaaagatttttttggatcaatgtaaaaatttatttgctttttttgtgcctattcaagcgttttatgcccttttaaatcttattttgctatttctctgccgttttaagtgtttatgatttttgtgcctaatatgctacccaaattattaatttagtcttaagattaataattgtatagtaaatatattttatttatcaaattctgttacttttagccctttcattttatgcttttctattttcgtattatttctccataaattaccatttttataattttaaattcagttttttttaccttttttgagcttagtgtctccatcctgtgctgcacttcagtcccaacttggcctgccttatccatttccttttgcatttcctcccgttctatggccatttgtttggcttcacgttccaacttttcagtcagttcctgttcacgctgcaggctctcctgcaccatctggtatgtctcctgcaccttctccaactcctgctgcgcttttcccttcacgcacaaaggcctggcgcggcttaattaaaaaaacaatttaaatttgcttttgattcttttaaagtactaaattcaatgctaaagtatattgaaagtgttactacagtatggaagaacctgtacaatttaaaccaaggccaagtacgaag

SEQ ID NO: 13038 - DNA, 1373 bp, Heterodera glycines
  unsure (1)..(1373): unsure at all n locations
atgcaatggagcgcattaaattnttgtcgatttttcttcaatacccactttaaacgataagcatttcctcgcacaccgctctatttgctctgttttaaacaacaaaattttcccaagcattcatacctactttcttaattacactgggatcacatctaaacgactatgctaaaaacggggaactaaactgtattaatatttttaacaaattgccgcccttttcgcctaccctgttaagagaaatcttaatttcactaataatttctcaattttcttctataacagattatctcttctatggtgagtttttcaatttctatgtactttattaagtaaacaataataatcaaacatttttctatgattgcaaagcatttaaaaaatcataggcttttttattttcattatgttttggaaaaggtcaattaaataaacaatttttttttgtaattttattaattgtataaatcttatgcaattttctataagcaatcgatagtgtaacaaatagagaagataaagtctgatcaagcacacacctttcattatttccggttaaatatgtgttcatattttaacaaaaagcagtcttgaatgtcgtcgaaatttgtggtaattccatgcttatagcccgaccaattgcgctggaattttgccatgaggcttattttttgtgctggtttcgaatttacaggcgcccatgcaattggagcgcattaaattttttgtcgatttttcttcaatacccactttaaacgataagcatttcctcgcacaccgctctatttgctctgttttaaacaacaaaattttcccaagcattcatacctactttcttaattacactgggatcacatctaaacgactatgctaaaaacggggaactaaactgtattaatatttttaacaaattgccgcccttttcgcctaccctgttaagagaaatcttaatttcactaataatttctcaattttcttctataacagattatctcttctatggtgagtttttcaatttctatgtactttattaagtaaacaataataatcaaacatttttctatgattgcaaagcatttaaaaaatcataggcttttttattttcattatgttttggaaaaggtcaattaaataaacaatttttttttgtaattttattaattgtataaatcttatgcaattttctataagcaatcgatagtgtaacaaatagagaagataaagtctgatcaagcacacacctttcattatttccgggtaaatatgtgttcaaatttaacaaaaaacagtcttgaatgtcgtccaattttgtggaattccatgcttatagcccgaccaattgcgctggaatttgccatgaggcttattttttg

SEQ ID NO: 13039 - DNA, 1493 bp, Heterodera glycines
  unsure (1)..(1493): unsure at all n locations
atgatgcaaaagcatttaaaaaatcataggcttttttattttcattatgttttggaaaaggtcaattaaataaacnaatttttttttgtaattttattaattgtataaatcttatgcaattttctataagcaatcgatagtgtaacaaatagagaagataaagtctgatcaagcacacacctttcattatttccggttaaatatgtgttcatattttaacaaaaagcagtcttgaatgtcgtcgaaatttgtggtaattccatgcttatagcccgaccaattgcgctggaattttgccatgaggcttattttttgtgctggtttcgaatttacaggcgcccatgcaattggagcgcattaaattttttgtcgatttttcttcaatacccactttaaacgataagcatttcctcgcacaccgctctatttgctctgttttaaacaacaaaattttcccaagcattcatacctactttcttaattacactgggatcacatctaaacgactatgctaaaaacggggaactaaactgtattaatatttttaacaaattgccgcccttttcgcctaccctgttaagagaaatcttaatttcactaataatttctcaattttcttctataacagattatctcttctatggtgagtttttcaatttctatgtactttattaagtaaacaataataatcaaacatttttctatgattgcaaagcatttaaaaaatcataggcttttttattttcattatgttttggaaaaggtcaattaaataaacaatttttttttgtaattttattaattgtataaatcttatgcaattttctataagcaatcgatagtgtaacaaatagagaagataaagtctgatcaagcacacacctttcattatttccggttaaatatgtgttcatattttaacaaaaagcagtcttgaatgtcgtcgaaatttgtggtaattccatgcttatagcccgcccgaccaattgcgctggaattttgccatgaggcttattttttgtgctggtttcgaatttacaggcgcccatgcaattggagcgcattaaattttttgtcgatttttcttcaatacccactttaaacgataagcatttcctcgcacaccgctctatttgctctgttttaaacaacaaaattttcccaagcattcatacctactttcttaattacactgggatcacatctaaacgactatgctaaaaacggggaactaaactgtattaatatttttaacaaattgccgcccttttcgcctaccctgttaagagaaatcttaatttcactaataatttctcaattttcttctataacagattatctcttctatggtgagtttttcaatttctatgtactttattaagtaaacaataataatcaaacatttttctatgattgcaaagcattaaaaaaatcataggcttttttattttcattatgttttggaaaagggtcattaaataaacatttttttt

SEQ ID NO: 13040 - DNA, 3045 bp, Heterodera glycines
  unsure (1)..(3045): unsure at all n locations
atttattagtatatacttacctaacagtttaaagtaccatttattttttagccttgcgaaaatggaaaatgctgaaattaaatctcaacgaaaaaataaaaaactcgaacatgaaggctgcctgtatgtcttccatttgttgaacgccgatggtgacgtaaaattttggcgctgtgaacatcagcacggcgaattcaaatgtcgagggcgcattcacacaacgctcaatgacgtcgttctgaagacaattggtatacacacgtgcaaccgcagcgcggcaaatgtcatcgcacaaaaaatcaccaccggcattaaacgacgtgctgctgaaacgatggaaacgccagcagcaatcagggcacacactcttcagcaaattccaacgccagtaatggcgaacattccaacaaagaacgcgacaaaaaaagtgaaaaatctatttatttttttacagttttgagtttaagctggtgaagcgagtccgccatgaaattgaattgccgccgccagtgccggtaacgcttcaagaattggaacttccagagcagtacagaatatacaaacgcaccgaagaaacgcaggagcttttccttcttgccgattctggaacgtataccgatcagaaccgagaaggacaacaacggtgtgtttaatgggaattttcagccatttctttaattttagaattctcatttttggccggctttctttcggaaattgggcttccgaaatgaagtacatttacgctgatggaaccttcgcagtgcaccggcgctcttttcgcaactttacgtcattttggcgcggtacttttttgtcaattttgtttttcaatcattttctccaaatttcagtcgtgataaatgggtgtttccggtccttcactgcctactgacgtgcaagtcgcagtccacgtatganaggatgtttgacatggtccgccaccgctggccgactttttggccgacaaacgcttccatggacttcgaacaggcgatggtcaacgccttccgtgctaaacatccacagtgctcaatcaacttttgcttattccatttggtgcgcaacatgaaagcgcgtcttaccgacgagcaaactcacgtgagaattttttaaaattaatttttaaattctcaaatttagcgtttcaaaacagacgcagcctttgcacgagcagccaaaatggtcacttcgctggcgttcgtgccgctggcggaccttacacccgcgttggcagcactagaagactatctacctaatgagcttgagggcgttctcgattggtcggttgagttaaattttttttcaatttcattagtaaattttaaaggtttgtaatcaactacgttggacgtcttcgaaacaacggcacacgcactcgtccattattccgtcccgaagaatggagtgtgtacgagcgcacaatgaacggcaccaccgcacaaacaacttcgccgaagcgtaccatcgcacgttgcaacatgcgatcggaatcggacaagcacacccgacaatatggaaattcatcaacattttgcgtgagcaccaaaaaataatcgacgtggacttcgaacatttccttgccgggaatgctccgccgatgaaagcaaagcgttaccgtgaagcggacagacgaattttgaggattttggagcgctataatcaggaaaaagcgccgccgcaaatcaacgatgatcaccaatacggccaaaatcaaaataacccgaatttgttcattgaaatgcttgggggaatttcgagcaattatcaaatggattgttaattttttgttaattttatttgttattacattttggataaaacggagatttttaaaaattgagccaaagcgatattttgatgaataattttaaaaatcagaacatgaaaataaataaatagatttgcagatgaatttttgagaaaatttttaatttcttaggggtatattttttgaaaaattcgtcgaaaaaaatttttaaatattttttttttgtctgagacggagttggccccttatgcactaagacggagttggccagacggagttggccccaagacggagttggcgagacggagctggccagacggagttggccccaagacggagttggcgagacggagttggcccgttccgtaatgggtatacctacttaatttaattaagctaatttcgattaaccaattcggtactagttaaaaagagtacctttttggtatcaaaaacaatagggggaccctttgttttgtaaaaaattttttgtgataaaaaaccgttaaaatttgttctccagagtttagtgggccgctgatcacgaatttgacatctattttgaccaatttctaatcccgaacccgaacaaaaaagactatacattaaaacattttgcacaaaacatcaaaaaatcccaaatttcacattttagtgcaccaaactttggcactttttccttttctttatccgacacaaaatggcaagcaaatgttaagagagagatacacaaaatgcaaattattatatgatttaaaatgagcgggatttgattgatccattcattttcaattttcaaagtttaattaactcatgggccgggatgttccttttttgtcggtgtcgtcggcggtggcaccgcttcctcctcaattgtcgatgtcaaacgtcggttctcttcaatgctgctgctgtcagccgcgccgggaactattgttaagctgtttgggctaaattttgcatttttaaatccaaattacatataaactattttaaattaaaatttaaaaaaatattttaacgtattttctctaattatccccaatctccactaatcacccaatcaccaattatcccccagtctacgaggcctttgaaaaataacccctctatcttaatcccttagtttccatttagccgggctcaggtcgaaatatttttaaaaatgaaaaaatagcctcactcaacaacctaacttattctgatgctttaaaaaactaattttaggaatattattataaaatttaaattttccttgcttattttggcatttc

SEQ ID NO: 13041 - DNA, 1305 bp, Heterodera glycines
  unsure (1)..(1305): unsure at all n locations
atcgatcagacaaacaccggcggataagagcgggaaaattatcggtcagaaaaagtaggtgcaattttgacggacacagtgatcggacaaattgatcagaataatggctcagcagtcgaaagctgatttatcagcagaaataaagggaaagaagcgaacacattgatgaaagtgtttagagaaatagatataaatttaattagcaaaaaatgatcagacaaaccgagtcagggataaaatggccgacccaaagcagattaagaaggcaaacattgatgaagcgattagacaaactaattagttatcacaaaggagggtagccagcaggtgtcgtgtccctcgagttttggcaccaaattttttcggcaccgagtaaaatgaatttgatcaacaaaattatgggaataccaataaagggaaactgagtgttatcagtgatcacagatcagaattgaattttttttgaaaaccctaaataataaaacaattatttgtttttgactttacttcttccgtcatcagtttgctctccaccaaatgccgctcggtcgggaatcgtttcagcgttcgcaccgaaatgccggtccacgcgatcgctgattggaggctggtccaacgggccaatgttcggcgcgtctccaaattctcacggcccggcaaacaggtggacacacactgtgatcaacagagggggggggggggtgttcacacatattagtactgcgcaggaatggaaatttgtcgatatttctcgagattcaatcccaatcaatttggcgtccctccatgattcgtctcaagggttcagtttcaagatttgagaccgagatttgtctgtgccaggtttacacttgagagagagccggaattggcctagaatcatgtcaatgtgtctctctcgacagtgatttagccgccacaaatctcaagaccgagaattggcccgagatttcgggaattccaaaaaaaaaaaaattaattaatggcccgtccgactgaccatcatgaatttgtcaggccacgagatccagttgaactgctcccaccagcgtgcaacaaccacagccacgaagaaaccgagcagaaatgagagcggaatgtattgggtgccgcttaattagggctgattaattggaaaataattaattgattaattaattatttaattaatttttaattgggtggaactcacatttcacaccatttgatccaacccgtgaagtattccttctgcgaatcgtccatcagaccccactaaagaaaaggcaattagaattttttttttcaanattttatttgtaatat

SEQ ID NO: 13042 - DNA, 2387 bp, Heterodera glycines
ctcattttgttaattaaagtgtcacacttacgcctaataggcaggcaatttcaggcattccatgtgtgccccatatgtcgagaatgttcaagatcactcccgaatagcgtgtccaccaatcctttctgccaggattccaatttccatttggcaaatcaagcttggcaaataattgttgtgttacagcggaaggattctcaaacaatttggcactgcggtacaattcgccaatttttgtcattttgtttgccaaatttggctgaaaataaatattaaataactttttaaattattttttacccataaatccccttgattgattgtcattgaatttgtttcaatgacaaaataattggagaaaataatttcatatatcgtaatcccagccgaccaaatgtccatttttggtgtcacctaaaaatcatttaaatgaaatcgaattttaggatgcattttgtgcgtttatcgacgcgacatgtaaaaacctataattgcataaaaacatatattaattatatataaattaaactaaatttaattttaattatacgaaaattttattacttttgaaatttattaattatatttatatatatatatttttttatgttaaaatcaatgcatacattaattccattgccgcccgttgcactgactcctgctgaaataattctttcaaaaattttgttcaatatgcctgctgatggatcttggaagtttctttgctttaataaaagaaaaatacatataataaattttaaattttgataaataaaatgcaaaaaaatattttttgatgttcgatttaagattatgtaacgagttgaaaagcgccaatttgtctacagtttctcttgctttaaatggaatacggtagtttttttaaaattaaaaatggataaccattaacagttcaggcgcagtataaagaaatgtgacgatcaaagaatttggatcaatttgtccagttcggtgatattcgtcatcataaaagatacaaccttaatttattaattaattactaaaataaaatttatatttgaattccttaaaaagagttcataaatatgaattatttaattcaatgatgttacactattttaatcaaaagctgaattaattaattaatccttaaatttggcaatcaaaggccgccttcccctactatttaaggatatcgtgccaaatttggcaatcaaaggccgccttcccctactatttaaggatatcgtgccaaatttggcaatcaaaggccgccttcccctactatttaaggatatcgtgccaaatttggcaatcaaaggccgccttcccctactatttaaggatatcatgccaaatttggcaatcaaaggccgccttcccctactatttaaggatatcgtgccaaatttggcaatcaaaggccgccttcccctactatttaaggatatcatgccaaatttggcaatcaaaggccgccttcccctactatttaaggatatcgtgccaaatttggcaatcaaaagccccctctccaaccttttaatgatttttttcatttttatggcaaaatttaaattttagcaaaaaaaattccgaaaattaataaattttagtcaaaaaatttaagaaaacatcttttgtatgaaacttccattttaaagggcagtaaatttgcattccataagcttcttaatagggttgtcaggttggtgggaagggtgagggagattaacttaatttcccgaaatgttttttttttttgtaattcctcaaggaaaatttcttactcaaatgatacgcaatttttcaatttgaaaaatattttgttctctgccgttaatctgatcaatagtttctctctctgtctggcgctatctcataattatcatcaattgaggtgtgaaatcgatcagctcattaagcattagcacaaatttacaaagtttaaatttaaaaaaagattggataaaaaaatttttgaattatttttatagtgagtttaatgaaaattagaatttcattgaatattaaaaatatatgcgaaaaacatggaattttttggaaataattttctatttttatattttggccaaataaagcctttaaaaaaatagaaattaaaaactttcaaaaatgtttgataaacttcgagccatgtttcaaagcgttttcgccgaattatgaagggaaatgagtgatgaatgaattgagaatgaaattgatttttaccccttgaaaaaaagagatgagaacgaattttgctggaacttgaaagaaaaaaactgaattaagatttaccgaaatttctcgtaatttctttttttgcccgatcgtttaaatatgtcgaaaatttttatatgtgccctccatcccggctggaccataaatgtgtgacttctaga

SEQ ID NO: 13043 - DNA, 2359 bp, Heterodera glycines
aggttggtttgttaggccggccaaccgccgatttcaaataaataaaataaataaataaaatttgatgggatccaattttttcaaaattaaacataggctttaaaatgggcataaaatgaggatcaaaatcctatttttatcaatttatttatctacaatcattttgatgttttaaaaaaaggattgtataagatggttgccggacgaaacgacgtcggtacttaacgtcgccgcaaaaaaaaataattaaatacttgaagaaaaattttaaaaaatggttttaaaattttttgataacctaaattctacagaaaaaaaaaatttgctgaatatccacaaaaataaacaaaaacttgaaaatttattttatttcctggaatatttctaaaaaaattttagaattaggccaagttactaaaatttttaataatatttttttctaaaataaaaaattttaaaaattgacaaaaaatgaattaagcctgacactgatctgtacgaccgtgtagcctatttggacatggtaaagcaacaccaacaggaacagcgcagaaagctggccatgttgcgcgaagttgagaggtacttttaaggggcgtttttagcgaaatttttagcctgtagtcaatttaatatttattttttgtaataataaaagaatattcaaatataaattataatttattataaaattattaaccaaaaaatcaattattcaaatataaattataatttattatgtaaaaattattgaccaaaaaaagaatcaatttaaaaaattttgtaaaaagctcaatataatattatataaatttaaagttaaaattattaatataaaagttaaaaggcaaataatcaatgaaaaaaaaaaaaatttattttttgggaaaaggagaattttattactttttcaacggggtcgaataaatagaaataaaatctaactctgcctaactaacaatgagtgaaaatctgactcagaaatcccatattaattaaataatccaatcaattttctctagctagcattttttttcaatcaaaagcgaaaaccaagggttacaggatcaaaaatgatcaattttcatcaaatccaaaaatattggccaatatctttgccattgttcttgcattatattgaaaaaaaattatacaaataattttaaatttgtagaaaatttctttttcttctcacctataaaatcataattaaaaaaaaaattattaaaattattctaatttacagttgattaattatgcaaattatacaaatagagaacaactaattattttaataatgttaaattaaatattttgttaaaaaatttctattaataaatacattttccacgctttataattttaatcattaaagccgaaagttcattatggcaaaattcacagttggaggcatttccactatttgttgacttttgaatgtttggcactcaaaaagtggcatttccgccgccttttcccaaacatttttaacgcgtagcggcaaaatgtgtgcttttaataaataaataatatgcccaatcgttctgtgtcattttataatgatgagcaaaaagccagcagcagcaaattaagaaattcacatgcggccaaagtaaagaaatttttaaaatttaaaattaataataattaaaaattcgaaaattcgaaaatttccgttttgagaaaaatttttctaaaattaaaaaggaatatagcaaaaattagaattgttttccaaattagcaaccacgggttttcatttattaattattaaaaaattattttgcatttttttgaaaaatttttcatcaaaaaaccaaaaacgcacgcaaagtatcggattcttcgaaaaattatttgtatttcgtttatttcgaaatttaaatatattcttaaataaaaatcaaccctcgcgtctgcgctaatgtgaaatcccagccgaaccagcaggtggtcccaaaccgatcgcaaccttacaaaaatggtgccaaaaagaagagcacttcttttgaggcaatgtccacgatgccaatcgccaattcggcactttatgccaagatggaccaatgcgattgtgccatgtttgcagactgtccactgggcaaaacgcgtgccaccccggcacagcgatgccggcacagcgcaacgccaaggcacacaaagaagcggcacacagttggcgccgcacaatcgacgccatggacacgaacagaaatgccgcaagccgcttcgtcggaggacattgatgatgccaacgaagatgattatcatgatgaaaaatcagtgccctcactgtcctgccagtgccgaaaacggcagtgcccagaatgtgccaaacatgcgggtggccgaaaactac

SEQ ID NO: 13044 - DNA, 3900 bp, Heterodera glycines
  unsure (1)..(3900): unsure at all n locations
gtatgtatataaacatataattaaaattaaattatttttatataaatttaaaagaaatttaaataaaaaaataaattgataaaatttagagctcgacgaaatggttaaaaataaaaattatttaacgcaagcatatgaagggaccaggtcgtttcggcgccgacgtttcggcgccaagccagaaatttaaaaaatatgaaaaaacacacgaaaaggaaatctatttaaaattttagaaatccggtacttgtgcagtttacaggggaaatttcacatagattttcagataccaataaatgtgttttagaaattaatgaaaataagttttaaggggttttcgaggtcgctgatcacgaatccgggctcagaccagcgctaccgttcgctaaatgatttattgtcatctgaaaatgtatgtgaaattgctcctgtaagctgcacaagtaccaaaaatcctataaaagaaaaaagtgtctaacaaaaagtcgaaatttcaaaattttcttttatgttcgtatctgtacagaataaccattttttgaggttacaatgatttttaactaaattaagcttttttggtcaatttaggaacaaaaataagaattgaaaaattttgagttttcggctttttggtagaattcgggtccgggattcgaaactggccaaaatgaatgtcagattgatcagcgaccctgaaaaaccccccaaaacattttccacgacttttcagaactagattttctactcgtgtattttttcgtatttttttatttttggcttggcgccgaaacgaccctggcgcaaaacgtcggcgccgaaacgacggcgccgaaacgatacggacccatgatgagtacggcgaaggacagcagcaaaccctgcttatcctgctggccgttaacgaacgaaggctaagggggggggggggggaacgataaattttacgaagggaaccctgccatgttcgtaaaaatgtgaaatatgcaaaaaggccataaaaatgtcctaagtaggcttagaatcacgttttattttaaaaattatagtgtttaacaaacaaaacagtaactcatccaggaattaatttccctggaattttaatgcaataattaattaatttttaaatttcttatataaaatcatttgcctttggtttttcttagttaactcatcgttttaataaacctcaccccccccccccccaacacacaaagtacaagaaagacggatgcaaaaagcttgaagttgaacaaagaatgcattttttcgaatgcttttgttaatgagaatttgatgctttttgtggggaggaaatcggcagcaattttgagcggaatgaatgaattgatttggtgctccaatttgtgccccttttatatgcttttttggcttttgctctcctcacaccaaatagttacagtcaggtccaaaagtaatgcatcaaaaatgtatgcatgaataactcaattttttattgagataaaattctgaaaaaattcctgctaagctaacttttgatgctgatcaaaaaagttttttacactaacttgatcagatcactcattcatagtgatctgaaaagccacaaatggcttgaaatcgggaaaattttcttaaaaaacacctagggggttaggaaaatgtttcaacgcagaaatgcgttttttgagcttcgattgagcaaaagaaaaaaaaagttaatcactaaaaatcatgaaccctaaatattacaataaaaaaaacaccattctgctgacaatgatttatttatggcacaaagaaaaataatttatttatttattcaaaaataaaaataaccaaaagaaggacatgtgccacttacacttttggcggaaatgaggtgaaatggaaagcagtgataaaagaattgaaattttgaatggagaagcagaaattagaaaagtcagacctccaacaaagggaaaagtggttgttttttttagggttgtaggagaaaaaaaaaattttttttttttttgaggaaaaattttggtgagaaatgtgaagtactggaataaatgtatttttttttgaggaaatgtttggaggtctgacagaactatttattgaaaagacgagggtattgtttttcgagtgattgaatttggtgaacaattttgtcgtttggtggtaatgattttaatgcttcataacatacgaggattgtttggtcaaaaacttccagcggtttggaaatgtcgtcgctggcctccttctggtttggtgcattttctttgacgggagtcggaacatttgtctggcgaggttgcattgctggtgccacgggagcagggttttgttgacgttttcggacgcgcgcttcatattcttccttgagttgttctttggtcagcgctgggcggacgaacagacgggccaaattttgttgcgaacggagtcgagcacgctcgcgcttccatcctccgagtgccatgtgttggtgtgtggttgttggcatgaccaccttgagcgggcgtggtgttgttcgctgcgggtcgtaacgtccgagtcgaaagacggcggttggttgggcctcaacttcaagatggtccaggatttttgtggcggcttccctgtcttcctgaacacgttccgatgggcgaatggcattgctttccgggaggccaatgaagaccagggtgcgttgtcgttcttgctccgcgagtgcgacagcgtttgggtccaggtcctgtgcaggtgccattgaacgttttgcgcgaggcggagtgatgtttgatgcgttggttcgcttcatgtcggataattagcaagaataattgttttttgcgatcaaatcttaaggacttaattggacaactacgtgtctaatcgcgaagcaatagcttagaaaaagcttctagaattgggtaaacgaaaaatttgtaattttaaaaaattttttttaccgtctgttcattttttgctgcaattagcacacttttgccgttttgacaggcgttaaatcttcaattcctatctttcaaaatacataatatttttttttgtttcatttttcaaattttttagtttgggttggtccccgtttttcccacattttccgttcgtcttctgctgctgtttgttttatgcatacaaaatcagcaacaacaataacgaaacaggcagttcggcctcctttttgtgaaagtgcaacagaatttcttcgaaattttcccagcgaaacagaagaaattcaaagcccaaaaatgggggacggtaatcggacacttcgccaccaccactaccatcattttgaatgttcaatgattggcattgtgttgaggatgatggcatttcaaacggccggaaaatggtggaagtgatgcgcgtcgtatgcgtgtcccacggagatgagagattcccattttccgtgagaatctcgacgggggacacagacagaggaggaaaatggaaaaaacaaatttattttctttgaatttgagagggaaaggaagaagatgaggagaagagagaagaagagattctctcgtcatctaatctgaaagtccttcccccagttgtcgactctcaacaagtcaaaatttaaatgttttagttctagtctcttaaatatgtaaaatttaaaattttttttctcgatcaaatttacaaacattaattaccactctcgatcccaaatattctctcaactctcgaacattttttgtgcccttttcacttcctcttgttcttcatgttccctttgtcgtcgtcacatttcggccctctctctgccagcagagagagggccgaaacggaagtgccattcatattaattccgcacaatatatatgggcggggtgccacacccatccataacaataaaaagaatttttgggtgggtgtgtgatgtgccatattggaaanntgtgtggtggt

SEQ ID NO: 13045 - DNA, 1000 bp, Heterodera glycines
aagaaatgcactagtgtcgggcattttgacattaaaaagccattaaggcaccgttgtagcaatgatgcacgtggtccttggaaattcctcaggaattaatccctgaatttcttctattttcttatcactcacaaatcactggggaaaattaagatgattctgatgattagcgttcttgttcgattttggcgctagtgcgatatttattctcatggttcttggaaagtaatcaggaagtatttcgatttttgtaaataaaccatcagctgatataaagaaaagcattgttgtctgtccttttccaattatattgccatttcggcatcggtctaacaaagctgcgaatggcattgggaaattcctcaagaattaattttcgttgtctaaagaaatgcactagtgtcgggcattttgacattaaaaagccattaaggcaccgttgtagcaatgatgcacgtggtccttggaaattcctctggaattaatccctgaatttcttctattttcttatcactcacaaatcactgggggaaaattaagatgattctgatgattagcgttcttgttcgattttggcgctagtgcgatatttattctcatggttcttggaaagtaatcaggaagtatttcgatttttgtaaataaaccatcagctgatataaagaaaagcattgttgtctgtccttttccaattatattgccatttcggcatcggtctaacaaagctgcgcatggctttgggaaattcctcaagaattaattttcgttgtctaaagaaatgcactagtgtcgggcattttgacattaaaatgccattaaggcaccgttgtagcaatgatgcacgtggtccttggaaattcctcaggaattaatccctgaatttcttctattttcttatcactcacaaatcactggggggaaaaataagatgattctgatgattagcgttcttgttcgatttttgcgctagtgcgatatttattctcatgggtcttggaaa

SEQ ID NO: 13046 - DNA, 1214 bp, Heterodera glycines
  unsure (1)..(1214): unsure at all n locations
attttggcgctagtgcgatatttattctcatggttcttggaaagtaatcaggaagtatttcgatttttgtaaataaaccatcagctgatataaagaaaagcattgttgtctgtccttttccaattatattgccatttcggcatcggtctaacaaagctgcgcatggctttgggaaattcctcaggaattaattttcgttgtctaaagaaatgcgctagtgtcgggcattttgacattaaaatgccattaaggcaccgttgtagcaatgatgcacgtggtccttggaaattcctcaggaattaatccctgaatttcttctattttcttatcactcacaaatcactgggggaaaattaagatgattctgatgattagcgttcttgttcgattttggcgctagtgcgatatttattctcatggttcttggaaagtactcaggaagtatttcgatttttgtaaataaaccatcagctgatataaagaaaagcattgttgtctgtccttttccaattatattgccatttcggcatcggtctaacaaagctgcgcatggctttgggaaattcctcaggaattaattttcgttgtctaaagaaatgcgctagtgtcgggcattttgacattaaaatgccattaaggcaccgttgtagcaatgatgcacgtggtccttggaaattcctcaggaattaatccctgaatttcttctattttcttatcactcacaaatcactgggggaaaattaagatgattctgatgattagcgttcttgttcgattttggcgctagtgcgatatttattctcatggttcttggaaagtactcaggaagtatttcgatttttgtaaataaaccatcagctgatataaagaaaagcattgttgtctgtccttttccaattatattgccatttcggcatcggtctaacaaagctgcgcatggctttgggaaattcctcaggaattaattttcgttgtctaaagaaatgcgctagtgtcgggcattttgacattaaaaagccattaaggcaccgttgtagcaatgatgcacgtggtccttggaaattcctcaggaattaatccctgaatttcttctattttcttatcactcacaaatcactgggggaaaattaagatgatactgatgattagcgttcttgttcgattttggcgctagtgcgatatttattctcatgngttcttggaaagtactcagg

SEQ ID NO: 13047 - DNA, 881 bp, Heterodera glycines
tcatccatcattcatttattcgttccttatcagcttatcacttatttggccacatattttaaaaatataagaaattatggcatttgacacttaaaaatcaaagtaaaaaatgtcggtcttactgtatcaccactcattcgagtacatacaataccgttttttggtcggacaagttcattacgatactccgttttcgaaaatttgtcaaacaaattaccctaattgatgctacatgatttgtcataattactgtgccttttcagacttggcgagtccattccattttcacggtgtgtgtttttttctcatccgttttgccaatgccaaattatttccaaattaaaatgtgctccccccccccccgctccgcagaatatccgtcgtgacaaaaaggccatccgtgactccaagctgtatctgatcgtagccgcactgctcgccgtcgacggtgccgtgctgctcggctgggctttggtgtcgccgtttcgcatggccatcagcgaacaagggcaatttgtgagtacaaaatgggggggggggaggagcaataggacaatgcgcattcattggccaagctggagaagaaccttctgattgtgcctgagttcgaacggtgccaatccgaccattcattgcccttccaagtggcgttcttcctgttcaaaggcatgctaatggtgaacatttatttggtccagtccattctttccgcatttttacaaccaatctgtctaccgtaccacccaccgtaacctatatcacatatagtgaatgtgtctgctctcgtttacatagtcagctcgctccgcttacattaccgtaggcccacctccttttacagtatgatcattctctcattccgttcattcactttctgctga

SEQ ID NO: 13048 - DNA, 3491 bp, Heterodera glycines
tgaaattaatctcgaaatttgctaatttaaggaacatctgaacgaagcatttgccattgtctcctttttcgtcctttcctccaccactctgacgctttgtcttgtttttgtgccaaaagtgtgtttggcaccccgaaaaatgcataaccaatcaaaagcagcactgatccgaaagggagtcgccagttggccctctaagcaactttagaagctttcttgggaatgttttgatcaatcagggcccaaatccactacgatcagtcctgttgttgtccctaattgagcaattagtgattgattgaccgattgctttccattgttctcctcataccatctttctcttctccccccccccccaaaggttgtcgaactgtggcaaaccccgcgcggcacagaacatcaccgttttcgtaagggaatgatgaaaagtatggtgggcagtggtgccggcggaagtggcagaacggccacctctggcggtggcacatttcggcacgcgcaattgccaatcggcgacgatgccaaacattcgacaagtacggcaccggccgggatgagtgccggtgaggggagggcacagatgatagagtgtcctttatttgattgaggtgtctatacggcgtcgaaagaagcgctgtgccgtcaattgtccctttcgtcggccgaagaattgggccgacgaagtgccgcgttggaagcggacaatttgcgacttcaccaaacgctcgtgtcggtgagttgacacatttgaacaaacagtgatcagttttgatcggaagtgatcactcgcgtttctgatggcattgaataccgagtctcaaaagtgacttaaccaccaaatcaattaaataaaatgccctcgggggctttcccctctccgtcaaaatccgtccccaattttggcctcaatggcaccaaataagctcggctcaccaaattattattcgaattccttgccaatcaaattcagaagtccaccgaactttgggatttgttggagcgcgtccgtcttttgacagtgaaactcagaggcaagtgaagcaaaaaataaataaaaaggcaattgaatcgctaatggacttggccttagccatcattctcattaacaaattgcaaagattttaatgcctaatttagcaaattggcacggctaagggaatcaccgccggtgtttaattggtccaattcggcgttttattttggaattatctccgccgattccttcgcttttcctttaattttaattgcccccccccccgcatttcgatttgatttcattttacagaaatggaagtcgagcgacggaattcgagcaaaaggctgctgctgggcaacaaccaaagcaaaacgcccgaggcattgtgtgttgtgaaagtgagccaaacaaatggccaattttgagctttccacgcgttacaacgcccccttaggcgatattatgccaattaatggatcgtaaatttagcagcgaatacagtaaacatggcatttttggatttattttgtttttttcccaatttcagttggatgccggcgacgacgggggcgaaagtttggccagacgatgttcggcacgcattctgtcgacggtggccaatcagttgagacttcggcggacacggaccagcagcaatggcctttagcagacagaacaccgaatttgccaaatgtacaaacgctttttaaaaatttaattttctctctacgccattcctttctctgttcatttttcgtccattaaaaaagagaccattgaaattcatttgaacttaaaacggaacaataaaatctcaattttaaatagttttatatcatttaaaaatcaaaattcattgtgaaaattttgtataaattacgtcatttgttttttcctttaaaaagcattggtccaatcacaattcaatttctcacaagtcccccccccttcctccgttcgtctctttttctgtccattcaattggccatttcgatcagtgcgttcaccgtcgagtctttggcccctcgattggcctccaaaactgatcggatcacttctcggtcaatggtcggaaacatttcctgcatttcgtccaaatccttctccgagaaagcaacttgagctgaaaacaaacaaataaattaaataatttcacaaacaaaataaatattcagttggatggaaatggggcgatttattgctattaaaacggagcaggtcgtccgtccccccgaattttttttttattcaaacctagaaatttttcataaaaaaaaactcataggaaatttcttagtaagaaatttcaagaaaaaaattttttgagaaaattttcagcgattttttggaaaatttttgaaaaaacttagtagttcatcataaaatttcgaaaaaatcgctgaaaaatttttttcttgaaactttctttacttagaaatttcctaagattttttttatgaaaaatttctaggttttaaaaaaaatttttttaatttttcgggggggggggggacgacgtggggaaaatgaagtgcaccactattaaaaagccaagttttcttactctgcgcggctgtcgccgtttgttgtccgtcgctttgctgcggaggcgcgggcacctgacaatgaatgaacgaatgagacgaacagttaatcagtcggttgttaaatgttaaagtttaatcaaaatcttccaaatcaaaacgggtcaattctatgccgacttttttattcgaaaattggtcaaattaaaatccgaaggaagcaattttctccattccccccccccctccaaaattcatagagactgagacgaatccgggactcccattcccggacttttgagggaaaacaccgggaaagagataaagtggacttttagtccttgaaatcccggcccatcgtcaaatcccgagccaattcaattcagaactcattctctgtttgttatgttagacctgttccgtttgttgttggtgttgctgtgggacaggcgaaaaggaaatgaccaaattgacaacgccttcctttccctccccctgaaaatggaattttagcaaaagggaagaaatgcaaaaactcattcattgtatttagcaattaaaataagaaattgataagggattgttattgtatagaaatttaaaaaatatatttattatttttagaaataaatcaaaaaaaattgtaaaatttttaaacgatttttactaaaattttgtaaaaatttttgggagaaactgcgggagggggaggctgttcccgtattcccccgtctggctggtcatcagggacggtcccaggggggggggggggtacgcggggcaaaatatgtttttgaaaatcaaaacataatttatgcaccttttatttttctctttcaactgtctgtttttgctggggaatagcaaaaaaaaaaaggtcgttcaagcgaaaaattttcaaaaatacacccttaagaattgacttttttgatttggtaccccccaaaccaaaatccggggaccgtccctgc

SEQ ID NO: 13049 - DNA, 1803 bp, Heterodera glycines
  unsure (1)..(1803): unsure at all n locations
ttttaaggtttgaacgcattccaagggattcctccctttgttgtggacaggcaacaaggtggtgaacgcgagggggaggaggacgagcagttggaatgcgcaatttgcctcgaccccattgattacggcaccgaagttaggccattgccgatctgtaaggtgtgccatcctactgtactacagtaacataatttgcacagaacgcaatttcaatcaattattttagcacaaatttcacaacgagtgcattgaattttggtaaaaacaatactaataaaaaaagttataatttggcccactttttaataatatggcataattaaggatccaaggctgacacaatgcatgcccattttgtcgacaagaaaacgtcaccaacacaatttgcacgtacaaattttgtttttatattggttaattaattaaaaattggattaatgagaaaaaaagaatcagttttttaacttttagaaaaccggcagaccaatgggacggtgtcaaatgaggcgacagtaatagaaatagcaaatggaaggacagaatttgaaggagggcggggggaggacgaacaacagcagagggaggacaaatgacagaaattgacaaagtgtaagagtggaatgttaaataaccgaaaataataaaagcgaataaaaaacggaatgtgccttctttcgacagtgagtgaattcgacttaatttcgacattatccacaaaagtgttaagaaatacacataaatttgatttttttttattgaaatatgtacatcttaaatgtttatcttcttatatgtagagtagtatgcggatctgttctgatttatcaaaaatgttctgattttagccattgttcttgttttaggaacacataaaataattgaaattttatggcataatgtaactaagattttcaaaaatttccacttcgatgtctaacggcaccgtcggaccctaaaaatactttgctttcttaaaatggctcagaataaaatttggagaattttggacaaaatctgttaacaaattatacacaaattttcaaaaattttcctggcggcgcctatcagcaccaccggcggcccaaaaaatcttttcaaaaaatgcgccacaaaattaaaaattaaaaaaaaaatcaaaaatctaatttttttttagcctgattgcatttaaatatacgatttgcttatttcctccccaaaattgttaaaaaggacatgagaggcgaaaaatacggaatttgatactgtattaattgattaaattgttacacaagcaatttaagcgattttgcaaaatgttctggtttttgaccccaaagctgattttttgggctagatgttctgattttcggcccgcaccctgatgtaggtagacagaagtaagtgaggtcaaaagcagggttgaagcgggctggtcattagtgataaggataaggcaattaaattcttttttgaaaacaggatttaagaaccatttttgtttccaccttttaaaaaccgttaatgtatgtaatttcgaattaatattttttatcaaagagccaaaacctacataaatattcacatattctttttatcaggaaattaattaagcaattaattgtgttgtttgttttacttagtctctttggcacaacagtgatttaataattttggaaacatttaaatttgctanaatgttatgcataatttacctaaaagataattaataatctaaatttggcgattcataaaagttgatttttgatttttcacgataaataacgaaaatttnaatnnattantttnatgcgattttgcact

SEQ ID NO: 13050 - DNA, 1875 bp, Heterodera glycines
tacgatttgcttatttcctccccaaaattgttaaaaaggacatgagaggcgaaaaatacggaatttgatactgtattaattgattaaattgttacacaagcaatttaagcgattttgcaaaatgttctggtttttgaccccaaagctgattttttgggctagatgttctgattttcgacccgcaccctgatgtagacagaagtaagtgagggcaaaagcagggttgaagcgggctggtcattagtgataaggataaggcaattaaattcttttttgaaaacaggatttaagaaccatttttgtttccaccttttaaaaaccgttaatgtatgtaatttcgaattaatattttttatcaaagagccaaaacctaaataaatattcacatattctttttctcaggaaattaattaagcaattaattgtgttgtttgttttacttcgtctctttggcacaacagtgatttaataattttggaaacatttaaatttgctaaaatgttatgcataatttacctaaaagataattaataatctaaatttggcgattcataaaacgttgatttttgatttttcacgataaataacgaaaatttaaattatttaattttaatgcgattttgcacttacgatttgcttatttcctcccaaaaattgttaaatcgataagggaaacgaaaaattaatatattgaattcatttttgatcgaatattttaaaaaataactgatttgaagcaattttgcaaaatttcttatttttggccctcatcatattttttggcattgatgttcttattttgaaaattttagatagaaaccctgccttaagggggccggcggtacctataggcgccccagggtaaaataggattttaaatggattttgctaagaaaatttgttaagtttaaaaattttccctcttttatccttcgttctgacccaccccgtctcttttacaccagccctcctagatgcgaaggggtcctctatcttggggccatttgtgggcgaagggggcggggggggggtcgaatcccgccccccactttttcatgtatgatctggacaaaaaaatttaattcttttcctttgaaaattttgaaaaaatttgttattgattttaattattttgtagaagaaagaaaaaacctattttaaagttttccaattttttcccaattttcgttactttttgcccattatttcgttaattattttgcatttttcctcactaaaaatcccagccctaatggttattagtcaatcgagggacaaaaagtgacatatccaataatttttgaatcgaatcttttgctaattcctttcatgtcactttttggccctgggcaatccaaatagtgtaattgttttatgtgatgaatttttgttgcattggtttaaaaatgaatgatttaaatgacttggcgtgtcgtccgaccataatttctttgtcctcctcctcctttttctgttaattgacccattaattaatggtgttgggtcattactcaaaaactatcaacttaaaaatttttggcgaaaaaattttcatatctttgctcaagagtagcccaaatttttaaacattgatatcattcgaaagtcctctgttaactttcaaaatttcaaaaatttggtggactttcaaaaatttttgttgcttataaggaaagttataggcatttttttattttgatggttctttgtagggttcggaccccgcccccgcccccgtccccgggggcgggacatttttggggctcacccccgtccccgcccccgtgactctgacccccgcatcccccgcccccgcgatcttcgcccccgcgggagcacgggggtgaaaatacacccatgaagaatgacatattc

SEQ ID NO: 13051 - DNA, 4325 bp, Heterodera glycines
ctcattcagagagtatgtactaaaagttccgaagttacgtttgtgctgcttagaggaaattaaacccaaagtaccatatcatacactcgtgcccatataaaaattcttgaaattttcatgaccttgaaaaaatatatattatttctcagctcattcagagagtatgtactaaaagttccgaagttaagcttgtgctgcttagaggaaattatacccaaagtaccatatcatactgtcgtgcacatatgaaaattcttgaatttttcatgaccttgaaaaaatatatattatttctcagctcattcagagagtatgcactaaaagttccgaagttaagctagtgctgcttagaggaaattatacccaaagtactatatcatacactcgtgcccatataaaaattcttgaaattttcatgaccttgaaaaaatatatattatttctcagctcattcagagagtatgtactaaaagttccgaagttaagcttgtgctgcttagaggaaattatacccaaagtaccatatcatactgtcgtgcacatatgaaaattcttgaatttttcatgaccttgaaaaaatatatattatttctcagctcattcagagagtatgcactaaaagttccgaagttaagctagtgctgcttagaggaaattatacccaaagtaccatatcatacactcgtgcccatataaaaattattgaaattttcatgaccttgaaaaaatatatattatttctcagctcattcagagagtatgtactaaaagttccgaagttaagcttgtgctgcttagaggaaattatacccaaagtaccatatcatactgtcgtgcacatataaaaattcttgaatttttcatgaccttgaaaaaatatatattatttctcagctcattcagagagtatgtaataaaaggtccgaagtcaagctagtgctgcttagaggaaattatacccaaagtacatatcatactgtccggaacatatacaatttatggcaatatcagctgcccataataaatctacactctgactaaaacgaccctctgactaaaccggacagactaaaccggccagactaaaccggccagactaaaccgacccccaccgcaattcttaggggtgtaataatcggatttcaaggcaaatccgattacgattatccgattccgattatggcccaaaatccgattaattgcgattccgattacgattacgattccgattcggcacatccctggtatataagttgattttcgtacgagttgccattgaccctttttttattatttaattaaatttattggtaattgtttagcggtgggggtgaatcaaaatctcctcccaaaaatgcgagattcgaaaattttaattttgagtttttgctcaaatccgggttcgggattcgacgtggctcaaaattaatatcagattcgggttctccgctctttgatttttattcaaaaatttatttaactaattattcttcgaattcaaattttaggccattgtctccgcccgccgaccaaaacaacgaaaaaggcgccaatttgtgaacctatggccattgagaaaagaagaaaggaccgaccatttgattacctctgctggacttgatttgatgctattttctctttgaatgtgcttactttttcttttgtttaatggattttcattcaaaatcaaaattagattttccgcggctaaatgttgatatttaataaaatcaacaaacattatgccatcaaaacaaataccaacgtaaatttttaaaatttatttaagtggcttataattttatgtagagcgataacgcaaaaatgagttctgctatctctctccccattttatttttgcgccaaaagtcatttgaaaaaaattgctttaaaatttcaaaaattatcgaaattttaaaaatgatgttgagcctttctctaccctcgagcccattggcaacaatttaaggcgaacagatttgaaaattgttttgataaaaaatgcgattctcgtgtttttctcatcaagtattatcgtaaaaaataggaaaatcctaaaaatccaggctttatccaacgcattaattcttctgctatatattgtgtgacatcattcgaatttggccaaattgtgcttatttctgccaaaaaatgaacaggcggtaaggcattttttaaaagccacaaattcctcacttatttagcctaattgtttcccatttcagttggatttgcaacgacgtttggatggacattttccccacttttgaccatgcccaactcggcctcaaattggcacttctttcgccacgtttcaatgcgttggtggacaaacatttcgatggcaaaagcgaattgacaatttggagaacgatcgaaattagcaagtgcattggaacaaaaccgaagctatctgtgcggatggatgacaaatttgtggaatttccgttgccggaccgtccgttgcccagcaaaatccgttttaagcaccttcatattgagtaattgaaaatcagagctatggcaataaaagcatttatttcattttcagttacatcgatcactccgtcatcgcttttcttcgttccaatcaccaaattttcgacaaaagaggcaccaatttagacttgtggattccatcaccacacaccacggatggccagcggatttgggatgtttttgttcgtgaaatttggccaattttttcggaaaatattcgccacttgggctttaccggtgctgatcatttggacaatttgatggttgcactctccgagaaaagatggacaacccaagcgattgcgttgcgatgattacaacgaacaaacggacttagattggattaacaatttcaaggaggtgttgcattgggtgagcaattaaaaaaaagtgtttagataattcaaattgcgcttaattaaggccattgtctccgccaccggaagaagaagcaggacaaagcagcgaaaaagggacgtcttctgctgacaattagtgatggacaaaagaacaaaacaatggtgattagtggaagaaatgtattaattaagaatgaccgaccgatcataattcaaatcagtgatcaaatgaaattttatgaagaaaaacctctcaattttgtaaataaatcggacgtataaaaatggcaaaaaagttgactctattgcggttcacacgaccataagcttttttttgcaactttgatgcaccatagctttttcttattaaaaaattcttacacggaaatgaactaaaagtcatcactgcttcagtaaaatggtaatttgaaccatttttagactaacaagtgattccaaaaaattgaattttcgactttttgttcgaattcgggtccggggttcggaatagggcgaaatggatactggattcctgaacagcgacctcgaaaaccacaggaaacctgttttcatgtcttttgaaaacaaaaaatatttttttcaaaaaaggggggggcaccagctttactattaccgaaaaacattttccttcgctaattttagagacaggcactatacatttttgattgtctttttcgattaactgatcaaaaatagaaaaatttttgtatttcgaatttttaatataaatttcagaaattctttaacaaaagcaacaatttttttattgacgcgtgacatttttgggacaccttcaaaatttcaaagtttcgttaaataaattctgttgaaaaataatttctccgtctccattttttcgagttttgaaccggttcaaaaaccgtttttttggcatttccgcaactcgagacatatttttccacggtagggggggggggtcagttgcgtctggccatttgcgtctcaaacattttttatagagtaaaatggattaattaagttttctgtatgctatattttcattttcacagatacattgacaagaaatattcaaaaatttatagaaaaaataaaaagttttaacaaaattaacaaagtttcatttacccatttggtaattgcttgaaattcccctgagcatttcaataatcaaatttcggttattttggttttggccatattggtgatcatcgtcgatttgcggctgcgttttttcctcattgtagcgctccagaatcctcaaaattcgtctgtccacttcacggtaacgctttgctttcagcggcggagcatttccggcgaggaaatgttcgaagtccacgtcgattattttctgatgctcgcgcaaattgttgatgaatttccagatcggtggggtgtccttgtccgatcgaaagttgcagcgtgcaatggtatgcttcggcgaagttatttgtgcggtcggtg

SEQ ID NO: 13052 - DNA, 2556 bp, Heterodera glycines
attctgtcaattgattgatcactttgggtcaactctcaagtgatctgatcaaattctttcaatggtttatgtgatcccaaattttccatcaatgactaatttggacaatttacatgaactgaaattttggatcaacactgatcaactgcagctgatcaatcaatgcctcctccttccttaccttgtcagtgtgccgagacgcaatgtgccagccggggcggacgcgttggcatgcgaagtgagcaactgttgctgccagctgggcgcattttgctgcatgatgccctcaggcgaatttcggagttgaacagtgctcgcggttacggtaccattgctgaaacagagacacagaaaaaaaggtggaccacaaaatagcacacaagacagacaaacagacagacagagacaaaatcggacagacatacagacagatagacgagactgaaatggccgagaatcaagactaaaaaactttaaaaaaacgagcactttttgcttgttgtccaagaccaaggttctcgaacagaaataaatgtaaaagcggtgggaatacggtagggagtttaaacagggaatacggtagggtaatatgctagaagaataataatggatgaatttcgtgtatatatatattttttaatagagctgctaagatcaaatctaaaagagaaatcggcacgagattctcgaaagggctccattaatttggcatgagaatctcggtcagaattcggtagagatttcttgatttgatcaggcagctctttttttaaatccaatcacattgaatgtgtgtgtatgtgtgaattgatggcactcataggtgagattcatacaaagaaaatgtgtgaaaatttgttggaaaaaaaatcctacggcgccgtcgaattttgtgccatgccaccctctgccgccgaagtgttggccaaatgttgtcgcgcgcgcgggttgaaaatgttcgtgtcataaatgttgtccggcattgcgtcatgaccacgcggcgagaattggtcatcattgtccacctccgaatagtcgttgggcctggccaaatcaggttaattagctagctaattagggacgatccaaattaaataaaatttattacacaaatttttgccgaaaattctccgatttcgactttttgtaaacaatcaatctcgaaaattaaatacaatgatcggaccaagagatcacatgagattaaaaactttatgccatataattgtgaaataaaatgcatttttaaataaatttaattgaaattaatgaaaaatttatttaaccctttttattttttaatgttttaatttcaaattaaatttagcagcagcaaaactcacaagcgtgtgaagatgtaccacgattttgagaccaaaatcagcaaaatgaacagtgaaaggccaagcacaaacaaagtgaatgagatcagaacggagccaaaactgaataaacccgaatttttaatcggtttgaaaattcacaatttttgcgtttaatcgggaaaaattttcgacatttgcgacccgaattcacgcgtttttcttaggccccatcctgctccgtccgacttgatacaaattcccgagtgccggcggtccaaatcacgacccaggaaattccgtttttctttggcacaatctcttacccggtacaaaattcccgagtgccgattcaaattgacactcgactcaggaaatccacagtttttttcggctttaatcttgacccagatattcattatcccaatcccatgtcaagacccaaaagccaaatgttcctacaatccatgccgacagaagccatgctgcatgccaagaacgtcatgatgaagtgccgagcattgaagtgccgagtgcacggcgccctcaaggcgtgccgtggtgataatttgtgccgcaatttgcgcagtgatcgactcaatctgtggggaaacatagactttcatttaaagaataatttgaaatacgcactctcaaaaaatgtagataaattttctaattttttgtaacaattttttttcctcggtggctcgaaattggtcatatatagccagtgggcaccctcaatccctcaaaaacaaattaaattttaaataattaatttaaaatgtttttcgatgttacctccgctgaaccgttgaacagacgtgcaagcagtgcctccaatttgtgttcagcttcattctgttccatgctaagttgacgaatcattgccagcggcagtgccccgggcactaatttatcactgaaaattcattaaatggcaggggaaatatggtattcacgaaaatacccaggatacggtattttaattaattaattccgccatgccttccatgacaagggaaacacagtattcccgacagtaagccgactacagtattttttaataattaattaccccaatgccctttgatgttgccccaggggcttgtgttcggctcctgcattgtgcagtccgagtaaaattggatgacatcaattagctcgtcgttgagatgcgtgcgcagaaaggggcgaccatccgagcagaaatcggcataagcctttgaaa

SEQ ID NO: 13053 - DNA, 2455 bp, Heterodera glycines
gtcaaaaaataacaattttaaaatgatgctatagtcgaaaatcatttattttttggagttttttttttgacaaattttgaaaatccaagtgaaatagttgagagttcattggagaaatttgaaatttgtaactaaaaattcaaaaaaagtttagtaattcccattaaaattttagcaatttttttaaatgaactaaattttacagttttaaatgcataaatccgatagacgattacaaaatacccgctaaaaattatttccaactattttttttaattttaaattaattttttgttggccttaccacagtgagcggaaatgccgcagaaaagagaagccatgtgacgagaaaaatgaccaagccaaggccagagaaaatgatggcacctttacgggactggcgacagaacgcaatgacaccggcgaacagcacggaaagcataatcaaaggcaacaacaggcagagcaaccatctgagagagggtaattaattaattaatattaattaattatctgaggtttattatctgagacgtataactactaattattagcaattaattaataacaaccctagttttaattaaaccgaaaatcactttaaaatagtcattaattatttaattaactatcctaaattcaaaacaatcttagacagttaattaattaattagcaattaattgattaatagtaaatattaattaattactctaagataaattcatctcagatgaataattaaattaattaaaaattaaattattatcattaataaaaaccatcggcaatcagaagaaaaattattaattactaaaatgattaattcttttttctcattattccgccactctgatcacctctccagctccactctttcgcccttccgttttgccgcctccaaaaattgcgtgtccgccaaaatggccaatgtgcgccccaggcgttgtttgagctcgtccactttatccgacagttcagtcagcagcgaatcagcttctcggatcatctgaacataaaataaaatctcaaaattcaaaaatttataaaaaaaatcatttttgttaattttcgattttctttttaccgtagtttgattgatcacatctttgctcttttgttcaatcagcaatgtaagctgatcgatgtgacgcgacaaatgccattgtgactcattcaatttatgtgtctgaaatttttgaaaagaattaagaatgaattgacttaattattaggcattttcaatattgttcggcaacttaaaacaggtaattaatttattgcaaaaaaaaaactcttttttaccgctataattttttttttaccgtttcgagctttaatctcaaatcaaaacaccaccaagtcaagagtctcgagggaatccgaaaactttttttttttgctcttcggactataactttttagtccaattttttttcgaaaatttcagcgccagtgaaaaaaaaagcagaaatttaacagtttttcggtgaaaaatttgacaaattttttgtcatcattttggagtcaaatttccaaaaaaacacacaaaatggagggtaaaagtttcgagatacagaactttctgtcctgggataacctcgtttccccaaaatttaaacaacaccgtttccattgcgacacggaatgcgtttgcgacatgcgcaagtgcgccggtcgattcgcgcacgcttttgttgacgtgttcattaccgtacaggcaggcgcccatcagtgcaaagcacagtacgctgaccaggctaaaatataaacactgtttagctaagggctgttatcaactgtattgtttgataaagatgtactgtgaatatatacggtaaaatttttttgctgttatttaatgagggggggtatcattaagcaattatcattaattaccacgttcctccaaatttatttaatattaaaaaaataacataaagctttcggccaccatttctcgactgaattcaaaaaacagtaactcacaacagtgcacaggagaggcgtccaatgcgagtgcgcgatgtacgatttggcgtgccggaacggtgcgcgaggcagcattgtgctacccactgaaaattagtgtggtctgaaatctcgtgaaaattctcgggtttttggagtcacgattttcgagaaacaagaagctaattggaaggtctcgatgagggtaatttcggtgttgagagtacgaacgatttacttatcttggtgagactcgaatgggactcaaacccacgatacaattaaactgtggaagctcttaatccactaagccacggcatcctctcccccccccaccattaatggcattaatccaacaaaaaatatatccacccaaagaagtgtggcgagcaaaatagcagagcgagcagcagtgaaagtgcgcacagaatgacaaggggactgaaaaaaaattgaaaaatttaaaataaaaattaattaacatca

SEQ ID NO: 13054 - DNA, 1630 bp, Heterodera glycines
cgggaaccactggcgggaggggtcggagatttggccttgggggcactttttgacggcgcatccaggaaaactataggcattttgatccgaggtccagttcagcgccagcggcgctgaaacggctttttcaaaaatttttttgctgttttttggattcaaaaattttttaaaggcctaaatgaaaaatcggcctcgataggattttaagttggaatgtttgccacattttttgcttcttcaccgaacccctagggcctaccagtttttccgaaaaactgactaaaaattgcatacttttttgggccatttcagcgccggtggaataactccccggcttttgatgggaggaggtcggtgtaagcggcttttttgtagagctcgacgagctctatccaaccatgtttttagatttcagaaattttcagaaattttcgagctaggccccctcgaaaattttccgtttttgaattttattattttttacagatttttccggggaaaacggagaccactttcaagcaaccgtttttcatgctctatcgattggtgtcattttcagaaaaaatttttaaaatttttttggaaatagaaaattttggttgctaggcctcaatttcagttctggctcaataactcgtcaggagttgattttatcaaaaaatcgtctaagagcttttttgtagagaattttaagcccaatctaatgtgctttatctcatgttttaaccatgagtttaaaaaaagttatgaaattaattgtgattttgaaattaaaaaccataggggggaccccatggttttgcatttcatgaaaaatttttttgctcctaaattagccaaaatgcatttttatggcctaatttaaggtgctgaactcgaatatatactttatttttggtttcagactttttggaaggtggttataaatttttgaaaaatcgtcaaaatttgagccccggaaaatccagtaaaattttgaaaattcatctctcttcgtttttggtcaaatttagtggaataaagtttgaaaaatagcaaaaaattaggagaattttatgagatttatttggaatttctatcttccaaaataaaaaagttattccagaatttctggaaaaattcaatttttcagaaaaaaattcctaactcccttctaaaaaagtattttataaaaataatatactcaaaaaatccgcaattttttgctctattttataaattttattttagctttttatcacttttttgaaaaaagttatagaaataaaagtgattttggaatttgggaccacaggggtgtgaccatgatttttgagaggaaaaattttttcaccaaaaatcttccaaaaacatgtctttaggggttatttgggccgctgatcacgaatacgtgatcagattttacttttgacatcgttaagacctcagaatccctgtgtgattggggattctgaggggtggggcggcatgttcggacccaggccgtgtttattattttttaatttattaaaaaacgggcgcgaagcgcccgtcctgaggccgcgaagcggccgaatgtccccaaaaaaattaaaaatggcacgaagcgcccgttctgaggccacgaagcggccaaatgttcacaacaaaa

SEQ ID NO: 13055 - DNA, 4557 bp, Heterodera glycines
  unsure (1)..(4557): unsure at all n locations
atttggtggtggtgatcatagctctctgttcccgcttgagtgtcttagtgttgttgttgttgttaaagaaccatgatttagtgatgatgatgatgatgatgatgcatgatgaacgtgtgttttttttttaattcaaatattgtcgtttttttttaatgtcagattaaaaaaaataaatgttaactattcaaaattgtacagtgacatttcaactacagcgggcgcccttcacaaacacagagtttttgaaaattgctcaaaacggattcaactcggagtacgatccccaacgattccatgcaatcattatacgactgcgtctgcctcaacaacgcactcttgcgtgtcttctatttcgatcagcccgtgcggtgttaacgggtgtcccttgtccaaacagagcggtacgcgaggcgcaaaaaatcagaagaagggtgcagcatgctttgggctctcagttagaactccatgagatacgtgtgacaaacatagttggttcattcacattaccccatcgtttgcctctgttgaattttataccaacactggacccacacagatttcgtaacatccaatatgatcccacaatttttcccgctatgcgttgtaagattgttgtagacaatcatcacgctttggtcacatgtttagcctatcattctggaaaaatcatttttacaggatccaaaaagcaggaacatctgtctcatgccttgcgattgttcttagatattgtaaattattaatttctttctgtatgacaaacgcttgcaagtttcttcttatatgtgttacatttttttattgattccaatttgagcatccgggaaggttaacaattaataagttgtcatcaaaatcattcagctgtcgttggtgatgttcagcttgttcttgaaccgtttgtgcttcacgaaatccgaatggtacagtttccatgctggggcgaatgcgccccttcacataatgaggttggtagtctttgtgagcgtcgtaggtgtacagatccgaacatggagttcggccaatttgtggaaattcgattcttatcgacgcgttgcttcccgggacaacatgaacaccttccatgtccagcacatcatctctgtggaatagaattttaggattattatgtgagagaaaaatgtgttaacatttgtccatcaatgttgtaatgtgccaaaacaatgcgcttcatggactcgaagttgagcagttgctgcgcagaatatgagagacgaaaacttcggactttcaattcagcacgctcatcctctccatttatgcgatcacaatggcgaaaaccataattctttggaccaccggacacaaattcgtatattcgcctcgagcaatgttccctcttcatctgtcccagcgcttcaccttcaggcacctgctgtctcccgttgtttgtcacgtaataaattgaatcggtatcttgaataataggtcaataaaggtgaaaaaaaaaattttttttttggctcaccgcaataaaggagcttatgaccaagacgcagcacttgttccatatagtcataaaggtgtagacgagcatatgaagtgacaaaaattgcaattggtaagcagttggttgacggtgcttttgcaaattcagcctttttcctcactaccactctgtccatatggtgagagacgtgatgaaagtcaataatgtcgatgttgcgattctcgagcagtgcatgaaactcagctggagttcgggtataacgaacttccgttccaccgactcgttgcgcaagttttccctagagggagtttgcaagaattttctgtgtgttttttttaagtttaaaaaattgtaattctgtattttttttaccgctaccatccgaagtccagggttgtttgaaattttgttgtggtccaactgaatgccttcaacctgcctaaattcatctacataggctctgcgctgttcatcggtatcacaaccggatggccaaccgcttgcttgaactttaagacccacaaaggtgttcatatagtcacgaaacagttggttatcccattcttcataatgccataccttatttttttgaagtttatgtgcaataaacgatacgttatttttacctaaaataaatcaataactttatagccaagctccagtgctttgttcaattcaacatgggtgtatctaaacaccgggacaaaaaaagtaaattgacatggattaatttcacaaaattacgcggaaacccatgcccttgatgcatcaatgtgtttgcatgcccgttgttgtcggttgtcagcacagcgtgcacaaagcggaaaagttaggcgcccgtcggtagttcgatagggaagcaaaggaacttttagcggatgtacagctggatctgggggcagaacacgaacaaacaacagccctttgaatgtgttcgcgtcgacagaacaccagggaagcggtgatgtcggtgcacatagaagtgtctctcgcgtgagaacgcgtgggttaccaaccggaaacgagaatgccttcatcacatatggatataagctcacctttaacaatgaaaaaatattttttgtttctcctaactttttttttttacaatgtcaatgagaattatctcttcgtctggactgcatgtgtaatgaagaataaacggttcagtgtgtccaccccgtagtgcatcctctcttggatcaagcggtcttggaacgaatgagtcattgtacacccggcgaaattctggatcagcacgcagacgctgcttcatttcgcatccccagacaacttccagctcaaagccatgctgattctgcagttcaaatagccgcctcttggttcgttcatacaggtcttcggctgtccttccacctgccaatttttgttgtctgtcgttagcgtaacacttggggcaacctttaagcattttttttttgttcggttgaaaagggcgaccttttttttaccatgataaaagcaacccatgtattcaatggcaaggttgcgttgagggggttcacgtgtgactaatccatcaaggcggtagccagtgtcttcgacgttagcctcaccaattgaccattgggcagaccgaacatgtacccccggatgcgtcatttcataataacgaatgtatcgtgccgattcagcagatgctcgccgcccccttaggtagccaccttctggcgcattaacaagcttgttcattggaagaaagcagcggcggagggtggccaacgcaagaccagctgccgtggatgagattttaaacgggtccagtcctctcgtattttcagcaatgatttggcgaaattgaagcacactttcgcgcagaattgccacatcattcatacagtacaggatgagttgttcacgcaattggaagcgtgcagaacggttctcgacctcccaccaactcataaaggaatctctctttgacgctttcatgtgatcaggctgataaaattctttgcccggtaaaccatgcaatctttggtgtaaattttcacgccgaatgaacagataaggaaagaaaggttttgctgttgcaacttcagcgttcaatccaaatgtgcgtggtagtgcatccaattcacagaaaaagtagttcagcgagtctttaaagatcacgtgtcgttgatggttccctttcaaagtcatcgaaaaaatttttagtcccgttgtgcaaatacgctttggtggcaaattgcgccggtgaagtgcctccagtattaaatgaatgtcgtattttccgccattgtgtgataaacaaattgttttcacaccatgtggaccacttccggtgagaaagttgataaaatcgtccaccgggtcattgttggtagcgtcgtcaaaactatggaaaaacagtcttcgtgggttgtagtggacattggctggtagagcattgtcatcctcaggtgcattcagaaacggaggagaacaccagcgacgcccccttggtcccgcaggaggaccacacacacacccatttgcgtattgtccaacaccagaatgaaccgaaattccttcatttatacacgcttcgcagataatttcggcaataatgagcatcggaacatgtttctgtacaacctttgtacgcagttgaagtggcaaatcttgggacgtttcagcgtcgaaaaagcaaagtctgaccgaccgatttgttccaacttcttcttcttcctcattatcagcatcatgaccgtgatcgtcgtctccctcctcgttaccatcattatcatcatcatcgtcttcgtcatcgttattattattttgttgttgttgctgttgtcctcttcttctccttctcctcctcataggttcatctttgagaggctgaataaaacaagggtctccactttgatggggtccagagcatcgtgcacagcgcacccattccgtttggccaatttgggctggacatttatgtggataattcgcataggttatggctccacattgtcggcatgctcttctccattcacatattggaagaaaagtgcgtcctccctgattatagatgcttgccctggtaaggattgctcagatgnataggcgaagcagtcgtcatt

SEQ ID NO: 13056 - DNA, 3173 bp, Heterodera glycines
cttcaactcaaattgccgccccctccgccgtccgtcgcctctccgtcgcctccgccgccgctttcgctgctacggcatttgcttcaacagcagcaaatgattggtggcacaaccaacagaagtgccaatgggttgccggaggaggccaaactcagcgaagccatcgccgccgcactctccgcgcaccaaacgcatgtgctaatgcagtgaaaggaggagaaaaagcagcgaaattaagccaaccaattaactaattatgttgtatgtttcatcaaaggctccgctgccctttctttgcccccattttgccaaatgtttgtgggtcagaatgccaaaaacgaaaatgcgcgagcgaagagctcgttcactggagtgggagaggctctctgaccttttttgtccttttgaatggaaaagccttctcatacatatatatctatcatatttatttttttattatttaatttattattttaatttatttctgatgcgtaccgtattcattcccacagtgttaccgtaccctttctatcgcgtctttgtcatttccaccgtaattaatttctgcgtgtttcgttgtctgtctagtcagagttcacaaaaaaccaaccacccaattgacaataatgcaaccaaccaattaacttttaattgagcgaatattgttttgttttttcaaaatttgttctccaaacccttgctccctctttctcagcgctctctccgagttccgtgctctctcacgcaccctttttctatttctctgtctttcattttcccactatttcccccctccccatttatcaattgatctgtttttttttcattgttctttcagctttttttgttctcaatgttttttttgtccttttcgtttttcaatgcgcagatgaaaaagagagaatcagagtgatcagtgatcgatgaatgaaatgaccaccaaattgttttttatcgttaatttataaaaaaataagtgcttaattatgcaaataaatgtgaatttggcactgtttcatcacagctctcaaaggcataagaagacagagtttccacccgttctttggcatttcactaattttttgttttgttttggctgatcaattattctgcatctatcatccctctatttctgatcagttcttcttccgtttttgcttgtaatcatcagctgatggtgatcagtcgttctcattcagtggatcttttgctgctcttcatgactctgctctgatctccttcgtttgcttctgatcaattttccttctttttctgatcagttctttttctgcttctgatcacttttttttcttccgttcatcggtttctgatcagatgtttttgatcagcctttcttctaaccggtcatttcctctgatcagttgccttctgtcgtctctgatcagattttctgctgtgtgccgtccccccgtccgtcctcgtccgctggtgccttcggctgaactgtctgaacatcatcgaccctttcatctgatgccctccccctcctccgccgcctcttttccgcgcctcccctttccctttcccccgctgcgttcgtcgcaaatgtcactgagtgacccgtggcggccttctgtactcctccgacttcttgtgcccgtcgaatcgtttcgctgctcctcgccaatccgttggccattcgatgggcggcgcctttcttctgacaaaggcattaattacccgtgagggatttcattataaacaattagttgtaattacttgatgagaggccgaaattcgccgaccgacccaatgggcgagcagaatggcgaccaatgccaacgagagcaaagccaagctgcacagaatggcccacagcggaatctgctcggtcctggggttgaccgagaacgggtcgaactgtggcgggagtcgagccgaagcggcggtcggaaagggcgaaaccgtcgcggacggacggaccggtgaagtctgcccgatcagttgaatagcacgaaccaactgatctgagaaggaattccgacagggttaagcggtgccaaaaccaacccgaaagcacttcaaaggcactcttttcggcactgtccacccgtaccaactgcgaatggtgtgccaaatgggccaaatttcgtctaaaaccaaaaagagaaatgacgatgaatagctggccaagtgcttcccaaatcacctgaacagtcgggcgacaaaaggcattggcacagtgccaccggaccatcccaaaatgaaaaggacaagctaaaaggaaaagcgaggagtgagtgatcagcagaaaaagcccaaatgaccaagtcagggtcgcaccgctcccgcgcatttgcactgttcagcagccgtttcaaagtgccgcgcacgaacagagcagtagcagaggaaaagccatgggaaagagctgaaaggagcaactgatgagagaaaatgacagttttttggactgatcatttagaattaaattggcactgtattttttttttgaattgatcattaacattattttttgactgatcaattcattttttattatgttttttgtctggtttttttaaattaaattggcattttagcattgttttatttgtttttctcggcacttcttgttatccatctctcaagttttttgcattgtttaccttctctgttgcgcctctgttttgccattgtttctccattggcctttcttttttgccgttttttgtcgcccgttaatttggcacatttttttatactttaaaataaagggaatttaaatctaatgcttctccctccgttcgttaattaggtctaatcgccacctgttaatgctggctcggggagtgatcagaacaactattcgaatttggtgcaactttttgtctttccacgccgaatggacaaaacattttcgaagagaaggcgacgaaccatcgcaaaaacaaccagtcaaattaagcggatggactgactgattgggcgaaaaggaagccgaaatgaggcggcgatctgacggaaatatttccaaaaatgtttataattttgccataattagagtaatcaccgatcaattcggcttcagtgcgcgacagaatgccagctgggtcacaaatgtacgggatttggtggtagtgaaattggcagaagggggagagagaggcggaggaagacggactcggcaaatggcacggatccggcaaggg

SEQ ID NO: 13057 - DNA, 1024 bp, Heterodera glycines
  unsure (1)..(1024): unsure at all n locations
gtgaaattataaattatgcataatttgggcacttctttgtgttgaggccacgccgaatttaaagaacgaatcgcgaaaagatgaatgaaattggaaggcataagaaatgaaaggcactcatttgcttatgcaatgggaacactcacaatcagaggaaattgaaaataatgagcaaatttaaccgaatgaatacattaattaccattgttaaattcaacataaaatttgatagtaactgaaaaagcatctcggaaattcggattttcttaagagcatcgatcggaattgatttccaaaaaacccatccaaaagggccatgacaattcgacgatttcaaacacaccaatgtaagcagctccatctctgcttgacatcttaaaaataacaaagttcagcagcaaatcggcagatcggacatttcccattcgacgaaattcgatttaaaaaaaacaaacgaacggagaaaaagcaaaagagacagacaaaaagtgatcagcagcagtaaaagggataccaaaaaacggagcatttccaaagccattgtcaattcaatgggccaaattttgtcgccctccgccgatcgctgacaaaaaaaataatttaaattcacaaaaaattcactaatttttcttttttttctgttcatcagactttgttcattttgttttgattttgagcatgtccacccttttccttctgtttatgctccgattgataagaaacaaatcgatgcaatttaagggaattaaaaggcaataaaagtgagtaattgcggggcgaaaacgaaaaatggagcgacgcaaaaaaggggcgaaacattctcaccaaaaatatgacccaaaaaagtggaagggataataaataattcatttagagatttgcacccttttgattaatccgtattattaggaagttatgtacatactagggagagcgaagggaataaattttttcaatattttgctaaatattttggcatgaattatgtgcgtagtgtttgctcaanttatatgtatttgtatat

SEQ ID NO: 13058 - DNA, 3997 bp, Heterodera glycines
ctctgcccatcttttttaattattattttaaaaaatgaatttgaacttttgaagccctcaaaactaataataaaaaggttcccatgcttgtgattatgaatatttgatgtttccaaatttggcattttatgccaattttagcacaatttttgttggcggaaattttcgctctgcaacgataattctttgttattcaattattgcgtgtgaagcatgaagaaaattgggattggacatataattacccactctgttggccatatgactaaaggccctccactaaaaatggacgcaaaaattctcaagattttttttttgctggggtgagcatgactattataaaacacgtaatttttagttcacttttttgtgccgttatcttattaaaagcctaattaaggaaataaaaatttaggggtataaaaactttggcgttacctttcaaagtcgtatattttgaattttcttaaaaaatttggacccttctggttttatcattttttttttttggaaataatatatagtcatgagaacttatttctggctttatttgtttctgatcatgaatgtgacatctattttagcctgtttaaccaatttccgacttcctaatttaatttgaaaaaataaataaatcgaaaattagaatttacaatttttgttcatgttacgctttagtgattagaaacagatcaaaatagatgtcagattcgtgatcagggactcaaaaaatcaatcctctgggaacaagcaattatatggcttttcaagagcgcccgaattattaattttttaaataattgtgtttttataataaaattttttttaattttacattaaaaattggaaatctatgcaaacaattctctttggtaatttaatttggtatttccaatttaattaaatttgtttgttttttagattaaaatgaattattcagattcgccaagcagacgagcaagtgctgttgcaaattgtttaccctctccgtcaataatggagttggcaaaatcggcgggtcttttgtccctaaatccgagcggtaaacaaaaaaaatttttggaggggattaaatttcagaaaaaatgccaacataatttaaaaaatactttattaattgaaattatcaaaataattataaaaattaaaattctttaatttatataacattttttttattaaactcaaatgaaaaattaggaattattttctaaagaaaaaaatatatatttttgttaaaataatttataaaattaattttttacaatatttaaaaaatgcaaattaatttgaaaattttttattaattgaaattatcttaataatttataaaatgaaattctttgatttaaataacaatttaatttcgataaactaaaatgataaaattaagctgatcaaaattcattcttaattttaagcaaaaatattttttaaattgaaataattaaaaaaaaaattataattaaaataataaaaatatcattaacaaatttaaattttttgcagatttggtgtttgagtcgtccgtgctcggcattgcctactacgactttgtgctgtcggttagcgaggttgaatatgcgcctgcaccatctgctggtgctgaacatgaacaacaaaaaaacgaaaaatcgccaaataaaaaagcgttggcgaaacgtcgtgtgcacgagacgggaagtgcgccgttgaacggaacgccaacgatgggcggcgctggcgcaaatgcggcgccaattcaaagaaagcgttgccaaacaatggaaaaggaaaagggcggccgctcattggtggccatgttgcagaagcagcgaacagaaatgcaactggtgaacaacaaaagcaacaacacaagtgggggaaaatgaataaataaataaattgaatatttgaaattaaaaaaaaaatatatatatctttaaaaaattatttaaaattaaaattgattatttatttaaaaaatgaattaaaattatattttcttatttaagctatgagggttttttgaaccctacataaaatctttctaaatttcgaaaatttttagaaaaaaactaatttttgaattatttctttttaattaaaacctaaattaaatttattttactctattttccaaattaatctactaggatttttgtaatccaccatataaaagcaacaatttatattctagccaaatactaatttattatatacataaaacttttttcttttctaaaagttcttgaaaaaatacaaaattatttatttattgtatacaaaataaactatgtttttagtttctcaatttttaataattaaaaaaaaatattttttttatataaaaaaaaaatattttcatatattcctttaaacacaaaatttttaatcctaagctttatattctagcaaaaaatgtatttattatatgcaaaaccttttttatttctaaaattaaaatctttttaattttcttttttaaaattaatttttatacaaaataaattccagaatcttcatcgcttctgccaagctttgagaagggttcgatgggcgaaattcaagaaaaatgtgaaattgaagaagcagaaaaaaatagtagcaacaccacaagaacaccatcaaaatcaccatcaatagaacgcaaaaacaacaaaaataattgtaataatacattgtacagaatatttttggccaaatttgatgcccatacaaatgtgcaatggttcgaaagtgtgttggtgccacgggtaaaattttaaatgttaatttagataattgaagcattaaataatttataataatggggcctaattttttatttatataaattacaaagcattatatttttttttattaaataaaacaatatcaaatttattttataaataaggtaatataaaaaaaataaaaataaatattgtttattaataaaaattaaaaatcaatctaattctgggggtccagatcagggtttttttgatctaatacgtcatccattttaggtgggttttttgggatctggtattttctgggtttttgccagaaaatacaagtccaggggcccagacttttttcaaaaatgtcataatagaagcaaaaatgaaaatttacagttgtgacttcctaaatttgctgaaaagttggttttcaaagcaagaaaaaagaataaacataaaaattgaataaacataaaaaattataaaaatagaattaatctattgcagagatatttttaatacaaaattaataaaaaaatatatttaattgaaaattttaaattattagatttaattattaaaacaaaaataaaagtaattatttaattgtttaaatgtttcttaattgaaataatattatagttatatttgccaatttaaggagttgcttgagcacaatggcatcccagtcagcgagttgtccctgctgaccatgggcattttggtgtggcgctgcacgctgaacaatgcgcgcctgctgtgcctcgtgaacggcatgcaaaaagagcaaatgcacgaagacggcaactcaactgcagcctcgtttgaggcgctgaagcgcgcagcaagcaaatacaagtgcatgcaccacgtgctcacggtaggccaacgacggccgtccgttgcaagcacacacagctcatgctcaagctcaagtcgtaggtgcgtgttgcacatgcatttttattgattagagagattaaaagtttattgattttttggtaaattaattattgatttttaggtcatcttctgcttctgtaacgcgaagccaaacacaacaagagaccgggatgaagctgcgaattttagtatgtgtcttctatagcccggaaccgggcgatttcggtactgagtcggaattttcgctcaaactcaaaaatctcaacgaaaatttcaaaatttctcaaaaatatctcccttatacgaacaaaatccgttaattttaaacaattttttaacaaaaatcccgattctggaaatgccgaaaaactccatttgcgctcagttga

SEQ ID NO: 13059 - DNA, 1638 bp, Heterodera glycines
tttggattttttgaaaaactttttcaaagtgttacataaaggagttttggagttcgttcgaaaatcgcagctcacaaatcaatactgaaatcccagttccgggcctctagtgtcttctctaaaattaattattaattttataataattaattacctaattaattactttttgaagatgtgccaatcgcggtgtgaattgcctgaagtgcccccgcaggcaattagagagaccaaatttctgttgtgccccagttctaacccattactatgcctatgctttccattaacataataattcattttcctctttaaaattggatcataattattaaaaatttaattttctttatctacatatattatatgcttttcatttcataatttatatatttttcatggcattatatcttttgaaatatttttaaaaattctttctctttctatgggtaattcaaatctgatagagagacctgatttacggaagaacggattgacgtatgtttgtttgtttgtttgcttgctcgaaaattgtcattaaatgataaaataatttaaaaaattcactaatttttcaacaaagattttggtcaagtttatggcaaattgagtaccaatattttaaaaatattttcccgagcttaattaattggaaagggtgccggtcaaattgtatggaatttgggaaaatccctataatttcaaatggaacacaaaattaaacaaactcagatttgttagaggacagagaagaaaacaattactttgcctatttaggactttttgccgatttgcctatttcgccatttttggcgcctttttcaggatttttggaaaaattcttaataaaaattcaacaaaaatgaaaaaaataagtttttttaaaattaatttttatgtgttttgctaccaaaaaattttttatttgcctattttagtgcctattcggggatttttgtgcctatttaatgcctatttttgcaatattttttttgcctttttaggtgcctatttcgcgattttttgtgcctaaaaatggaagccctattagaaaatgagaatacaatcaaatataaaatagtaaacagaacgccacaattaacaattatttaatttcacaacaaattcacaataatatcaaacacaacaaaaattcagtgaaataaaaattctaatatcaaataataatttttttgttgtccaattttcccgggaaacgcaagtcagtatagaaaattgtacggattcgtaaattcgggtttttaaggattattgtaaaatttgttcccatatcagtaaattcaggtatatttaaataaaattaaaaaaatatattttttcatattattaaaatctgagtgaacaaattgattttactactcggcattacggacaatttttggtcattggcaaagatttattaaagaaaaaaaattttcattttggattgaatccggcaaaattcgaacaaattttgatgaaatatttggcaaagaatgggaaaaaaatgatcaaggtgaaactataaaacagagaagaaaatgaaattgaatcaattgatcaaatgcaaaatgatcaaaaagttatcaaaagggatcaaaatgtgaaaaaagaaccttcaaaatatgatccaaaaatgat

SEQ ID NO: 13060 - DNA, 3235 bp, Heterodera glycines
cattcatgacagatggcccgaaagccggaattatccaacatactcttaatctgtggaccaattcaggatcctcgatcagttcggccaacctcctctgccatcccgggatcatcagcgaagatccgatcaacatcttccggcgaaagcgttgtcagaactgcgttgtccaagtttggctcaattgttgacacaattgtattggctaccacggcgccagtaatgaccgatccttccggtgatgagatgtcttcatagaccgggtttggtagagcagagatgtccaacaatgctggtggacttgacaatgctgccgacgcagacgaagactttttggagaaacgttttgacttttggtttttgggcattagctaagattgaacccaattaaatcagacggtcatttgcttatactcaattattggataaggaaaaacattggaaggtacaacggggaaataaaaagagaaaaggagaaaaaaactgaaattgaaaagctgtgctaagcataaatgaagtgtgagaaggatttgatcgagaaatgaatgatttgcctagcgaaaaaaaggtttaaatattaaaagagattttccttcgcggatgagaatgaatgtgaagatcgagatcagccttttatggacacattagctcctcccataaggcaaaggagccgatgaagaacacgtgaatggtcactggctaatggaacaacaaaggtaatgcgaaatttcacggtttgggatgaaataggtagagagaaatgaaaaaaaactattacgattaatgaagaaaaactgtaatataaaatcaatgcatactgtagtccattactattactttttttgaatttcaatgcttactgtacataaaggaatatgggaaatagtaattaacatttgatgaaatgttattttatgaaaatgtctttttcttggaaattacgcaaaccaaaagtgtcttatttcaactgtacataaaacgagttggagattaaataaaaaatatttggcaagtagtttgatagctcaggctctgctctttttaatgaatctatatttgtccggattggtttcgaattcagggactagttaggttttttgtgaggtactcattagggtaaaagtgaatgaaatgacaagggatcgttgtaataccaaatacatcattaaaatggattgaataaatagcaaagaagaagggctgttatgtgttggcgatttcaaatgctgtggccatttttgtcatttgcttaaggtaaatgttggactatatgcaaatttgtatttgagtgagaacgacgcaaaatttgaatgaaatgccacagagaatttgatgagaatggtgcttgagagagagagaggaaaaaaatgggaatattaacggtggaataatgttgaaaatggttttaatatttcgaattatttggtcatttaccgtatcctaggtaaaatggtagtacgatagttaaaagatttttgaagtttatttatcgataattgacttaattataagtgcctaatcagacattcgccagcttcttgatatgtcataagaaagtgaatttcgtttttttttgtattcgtcctatcggaacgcgcggaacaaatcgattttcaattcatcgctaattcatcttttagcgcttcttgttttttttttattaaaagaatatttgattttaaccctaaaatgtcacaaaatcgttttttgttttttttttaatcctttttcgtctatcattctctctctatctctttttgtttggttttttgtttttgttttccatccttgacaattcccgcaaacgggcaactcgcgttccttttgttatgttcactttttacggccatttatagcttataatgccccgaaaaaatctgcgttcacggcaaatgagcgctcgccggcgggctcaagaatgctctaaatttgagcagcaaaagaagcagctttttgatcattttcatcggtctggcccaattccggcccatgacaatgatgtcgaattagccatttatgattttattccgctttcattggccgcatttccggtgaccatcagagccaaatttccgccgcaagcacaattcgacgtgttcccctgtaaacttaatgatggggcgtattaccgtccacctcagggtcacagagacccagcccataggtccgcgccataaaatcagcttttatgagtgccttcagctttattttttaagcttttactttaatccctccggcattcgtgcacataccaagccgtgggcaaagcttgttgcgtgtgttgtcacgaggtcattcactgcttatcccggcaattctgtggcgatgagacttctgtgtgcgcatcaatggtcggcaacaagaaatgttcggacagctttttcaagcttaaaaccattttcctcgagacttacccattcatgactgatttgctcgatatttgtgagtaaatgtgtgtttttttttttttgcttactcagattcatttgttggtgataggcctattcagaatgattgtgcaaagatgattttgatttatctaaaatattggctgataggactcattatatacagaaaaatcattcagtgaaccgttttggttttgttatagccaatcgatttcttagagaatatcttttgtcaccactaatatctgcaactgtttggttggtcacattttgtctgtttgtaacggtcgattcactgctttcttggttcgaattatcagcttctgacggttcattgctctgcacttcttcctcatcatcaactgctaatttttccggcactatttgctcgtcattaggagtttttggcgatgtgcatggggggcccattagctcaaagcacttttttatttgattgacgtgtactttttttggtggctggttcggtgaaatgcagcttattatggtagcatggacaccattcagctcaactaccctgaaaattcccttccaaggaaggtgaaattttttggaagtgccaacttttccggcatagtttctaagtaaaaccctatcgccaacgctgattttgggctgtcgcattgttttgtcatattgtgttttcatcttattctgtgcttcttcaattgcctccgccgcacatttccatgcttttcttaaagttgtaactaatttgtgagtaaattcgccatcatctttgaaatcaacttgactgtgaacgcgaacgtccaaaatttgatcaacacagaaaatggggtcccgaccaaaca

SEQ ID NO: 13061 - DNA, 5572 bp, Heterodera glycines
ttgatcgcgatcttttctctgctgatctgtgtcttttgctactgatcgccccccccccaaaaaaattctctgatcacttttattctttgctttacatatgttttgtatgtgttttcaatcattcatgtatttcgggtagaattgtgcttctcgcgtacacaatgtatcccaaaaaagcaaaaacaacaaccgctagtaagtgctcaaaaggcacgcctttgttcttcgccgcctgtaattatttaaaatgatatcatctcataaatcagctctctcatttttgctctgtcatgccatgacatatatttttctggctgtttgccaaagctttcaaaaaaatggattttaaaaaattgaaaattttttttcacttttcaagaaagggatggccggttaactctaaaaatctatattaaattattgaattagtccattttccattccgatttttctgaaatatttaaattaagaaaatattttcccgatttttaaaattttataggacacaaattctcttttaaaacacaaaaatttttaaggctttggcactttttcatcactttttttcgtttctcacacattcagccaataattaaattatctttagcaatttgttgataaatgctttttttccattctcaattccaaaatctctctcattaatttttaaactttatttaaacccgtgtcgtaaattttttttttgtttgtttgtgcccatttccaattcaaaaaaatgccaatggtttatcaccataaattttgatgatttttttttcattattattatttaattaatgagttattattatttatgatcggtgtggtgtcactttttatttacacaaaattgcctccattcttttagcctaggccaccaccgccgttgctccaacaaaatgatctattcttttgctgatttatagtgatctattacactggtctttcatttcaacattttttggtttaaaagcatcgattagatctttttcaactgatcaccctgatagatttatgtaaatttcacaaactcttgatggcttaaatagccgttttgaatttacccctgatcattgatttgctaaaattgtctcccaaattggtttcttccactgattagatttagcttaacattttgagtgatcagcttgcctttatacgtggactttcactcacttttctcattctcatgatcacctagtaaacataaacaaaaagtttcacgccaactcattccgcactgatttgatttaatgtattatttaattgctattaaaccaattaaatgtgatggtgctcaactttaaattttttttttttaaatttagacgataaataggggatacattatcatttaccgtatcaaatgcacttgcgttacgttttaattctaattatctgttttatttatttatttgttatgttcccatttcatatgttgagcacttccaccatttaaatattacaaattatattattcgccccatctcgtcaatttaccgttatgctcattacagtatacatttttgttcattaccgtatcccatttttcgaatctgttgctttttgttaaatttgcctgaaatctatcactggtcttcgcatatttgcgttttatacatataattttttttaaattttggttgatgaaatcccttagcgtacaaatgcatcaatttttgtattactgtagcagcgattttcactgtctacagtatgcctgccttgaccatatgaccatttttacaaaataattcgtggtaaaacatattgccaaactaatactatttctgcgtcatttatcatattcaattattaccatttgctcttttttaaattaagtttttaattgtaaatggaaacagatttttcattgtgacttttatagccgacaaacaatattcaaaattaaatttgcataaatataaactctgtgaaataagaaatttatattggatgtcactttaaaaattttacataaaggcaacttttattaaaaaaaaagaaattgctattagcgaatatttgacatatggtcaggttaattagttatcattttccgcaactcatgcaatattttatttaaattaatttttgtcattttcgagtttttatacaaactcgttgaaaaaagaggctcttttagaagagtttgcacatggaattgtggcaatcaatccatcattatgagagatattcagccaaatacagttgactaaattgctgtcgaaaactacacctttaatttgttaaaaaggcattttattgcttttggtttgtagatgaaatgcgtgagaaaattacaaaaaaacagtttaaatttatttttctctttaaatcttataaaaatttaaacgtttattttcagtttttaaaatatattacatctcatatttaaaaaagtgcaaggttgggcgaagttcgaaaagtgcaagtgatcaaattaaaagcaaaataattattttaaaaattaaaagcaaaataattatattaattcaatttaagaattattcttaaattttggctacaaagcggatctcgtttttgtgtatttttttctctttccttttgagaaatttggttttactctcctcgcaaaaccattttacgaaattatgtttgaaatatttgttttcagtttttgtaactaaaattagcgcaaaatgtaaaattatttgttgtgtttgatttttaaataaatatccattaaataggtaatatagttataatgtagcttcggttcaccacgaatatgattaatataaaaatatattttaattatgttgcgaaatttaaataatatatattataattaaataataattattttgcttttaattttttaagataatcatttgcttttaatttgataacttgcacttttcgtacttcatcatagcagggataggggtgatgagctgctgaaatgattgttaataatgaaggtcgaagaagcgccacggatttgcattggaatggaaatgtgactgattttgacacgtcatatttttgctgtgaatggggcagttttctgacatttaacaaatttattatacatttattttccatattattgaatagggaacgcctcatcaaatccgtgggctgctggcatcttgaaacattcttaaattatataccaatggacaattaagcggccttttccaacaaaatgtttgtaataaaattttacaggaatagtccctaaaaatcctgtcttggaaaagcaaatttagtcattttggggaatggctcttgaatacataatgaattttttattttttgaaagattttttagcttatttgttttgtatcaaactgcttaatcatccgcggtccacctacaaatgaccttttcaattgccaaaacaatttcctttttcataatgctcttaatgtgcaccatttgccaaatattaactgacctaacgtataaatatttttatttttatttgaataattaaatttaaattaagtattcatttgactgatggcggtggtggattcaaagaagcgcaacttcatacattggcacaatgccatgccaacaatggaccaaaacaaactgcaaataagccttacggaattgaatttcgtctgcctcgggaaggcgaaatttgtgatgatgggtgggaaaaaatagaaaaaaataaaataaattattggaataaatttaccgaaaaagctaaccaatagctgaatataacaccaattatatttgaaattaaattctaaattgatggtaacattctcatctgctacccagcaatgcttcaacgaggcgatcatttggacaccaacagaaattcaaaagttacaagaaaattcatcgttggtgctagtacggtaaaatgctctaaccacaatttctggctaattattaattacataattaaccctcagggcaattctattgcagaagaatgtgttcaaaaaatggcaaaaaatggctacaaaaatggcacaatgatttggcgtggcctcaaacttcgcacaatgcaaatgaaaaaggaccaaaacaatggaagaatcattatttttgagtcatcaattgcttcacagaaacagttgaatatttttaattgttttaaccgaattttttaaaattttaattttacacttttataaaattaaatttatattaaaattattttaagatataatttgagtgcaggacaacacaaattttctgtactttttgctttgaatcaaactgctgtgccattcacgcgcttttcatcggtgaaaaatggtgaaaatattattttatatattttaaatgggcattctcggctttcccaaaatgccatttctcagatttcgatggcagtgccatgcaaaatgatttcctccgttcaaatggtccgtcttttttgtcggattatgccgacctttggcttcttggacttgacatgctgccgatggcacaccaaacagaacagcaaagagaacagctgaagatgaagctgttcattagccgcagttccaaatgctccatggaagcatgggtaaaagaaaggcaacccgacaaaaaaggaccaaattttagggatttaaagattttcctattttattttatgggctttatggaaatgatatatttggcaactatttttcaattttagctatttcggtcaaatttaattcctttaaagtttgtccaagcgtcgcattcccttgtgccatccgatccgaaaatgcaattcaacggttcgttgtgcaaaccaaatccgacggaagacgtatatgaacggtaaattaaaagtgaccatatgataaaaccaaatcgaccatacgattaaaaaaaagtgtgaacttggccgtttcgtaaaatccgccaccattggccatccattgtcaatgaaaaaaaattataaattaaatacgccaaaattttgaagatgaatttttgagaaatttatatttcttaggggtgcatttatgaaaattttgttcgattcttaggggtgtattttttgaaaaaatttttttgttcgattcttaggggtgtatttttgaaaaaaattttttgttcgattcttaggggtgtattttttgaaaaattttttttgttcgattcttaggggtgtatttttgaaaaaatttttttgttcgattcttaggggtgcatttttcgtttttattgtatttttgtaaaataaaaaaactagaaagtaggctctaataactagaaaactagacttaacaacaaccaaaaaaatatggttttcatgcgtttcagaccatagggggaacagagaaaaaaagagtaaaataaaactagccggtataacaaaaatttgggttcttttctgttttgtgaccccccctgaaatttacaaataaaaagtcatttctagggttgtttgtggcgctgatcacgaatatgacctttattttacaaaattccgaaccccgtacccgaaatcgaacaaaaattcgaaattcaaaatttcaatgtaaacatatttttaggggttttctaagtcgctgaatacggatatggcatctattttatccaattaaataacgggaactcgataaaatggagttttttttcaacaagccataa

SEQ ID NO: 13062 - DNA, 1706 bp, Heterodera glycines
  unsure (1)..(1706): unsure at all n locations
cggcagcagaactcactcaccctacttaagtggtgcccgtaaaaatcgtttctttttttgccttttggcattgtgtcccgtttgccgcgcccgggcaattatgacacattaattaactccattaaaattgctgcataaaaaagtatgtgttttgtcacgaatttgtcccttttggcaacaccttggaaacaaaaacgcaccccgacaaaacgtgtacgtgcacaaatcggcatttaaaattgtcatttttttttggcgtaatgatttctttcgtgacttttttttgttcctccgccgtccttcccgctctctcctgcaattcattaagccattatctaatatggcatttcaaatctatattgtccatttttcttttcaatttcttgaattgggaagcgggttctccattcattcacctcattcaaaagggcgcgagcgaccaaaacaaaacaacacgtcaaacaaaacgccacagatttttgaatgggcacagcggaaggaattttgggggagagaggggggggggacaaaagggtgaaagaatttggggggtcaaagaatgaatgaatgagtgggaggggnggggggcagacaatgggccccgaaatgatcaatacattgggcggttctgctgatgttttgtgccctttgtgtggcctaaaagttgccaagaaaatggtcaataattgagagttacataaatggcaaaatgtggattttccggaaaatttaaaaaaaaccatttttaatgcattttttggtttgccctgaggggactcaattggtggcattgtttccaaattaaggtgccaattattacgcaaatttattgtgttgaggacaaaaagcgttacatcatttgaaaaatagggctgctgttcctcgtccccgacaattttttcgtttttgttattttcggggaatccctggaattttcaagaaaacaatcctaattagaaagcattacgaccttttgtataccgtattttttatctctttttcttgtcctttctttatcaccgtaatttccaattatactaccgtaaatttggcaaaatgtcatttcaaaatttccaaatttttcagcatttcaatttgatggcaatgatgacactgttggaacaacttcccggcggtggtgtcgtcaccgccaccgaatctccccaccaaattggccatttacatcaccatcatcagcaaccacaacagcaattaaaggcccagtcggcctcctcaaatgggccatcaaataacagtgccgccgggtcgggccatggccaatcgccgggcggcggcattttgctgtcggcaacttcaacacccgacggcacattgatgccagccggcaccactgatcatcagacagccggtggccatcaaaatgtcgcgcatatgggagcaggtaattaattaatgagtgctaattaagggggaatggttgccttttttgaatcaatcaatgctagtgatcgggactgagattaatgcgagtgttgctctggtgacgggaggttgaaattctcgaaaattgggggaattgatgaacaccgaatttggatacagattttcaggaccgtaatcaaggggggggggggggaggcattcataaataattaaagctcaatcaacgggagaaaattgccatttttggaatttcggtacacaaaatttcacgacccaaaatgccgtgggagctctctctctct

SEQ ID NO: 13063 - DNA, 1042 bp, Heterodera glycines
catcatgcgccaaacagtgccgaaatgtgctcgccgggcagctcatccaattcagcaacatcatcatcactgtacaacaacaataaccagcaacatcaacaacaacaggtagcagcttgagccagcctagcctatctattgaaaattgagaaatttctagaaaaaaaatccaccgaatttttgcttttctgtctttgtgtacctgtgggaagaaaccccaaattagttaattaggttcgaatttaccctccctattcatcaaaatacagaaataataaattattctcacgcttttgtgcgtaaaaagagttataattttttctggtgctttatgtctataaaattccaaaaaagggttgcataaaatcgtgagagaggcgaaaaatttaactgaatgtggccctaaactaaaattaatttgtctctaattaatttgcccctaaaaaaactgatttatctctaataaattggacataaactaactaatttgtcactctaatttatttggccttaaactaactaaatttttctctaattagtttggccctaaactaaaactaatttgtctctaattaatttggtcctaaaacaactgatttatctctaataaattggacctaaactaatttaattaaaacaaagcttccagtaattaacaaatgaattcccttccaacatttcagaatttcgctttgtccatcactaacaatcagcagcaccataacaacaatatggagcagcatcagcatcaccagcaacacaaccacggcaacagcaggccatcagcaggaggaggaggaggaggccatcaccacaatcacacgcgggagaaaaagaacaaccaagaggagcgggtcaaacggccgatgaagtaggtggtggtagtactgtactaggggtccggacaatccgtcagtggtcaatccgtcagtggacaatccgtcagtgaaggacaatccgtcagtaatggacaatccgtcagtggataatccgtcagtggacaattcgtcagcaaaattttttgagcaatgattaataatct

SEQ ID NO: 13064 - DNA, 2979 bp, Heterodera glycines
  unsure (1)..(2979): unsure at all n locations
tctggatttaaaaataaatttggcttatgggattaattaccggacgtgattgtctacttaccgacggattgtccacttacggatcgaccaccgacggatcgtccaccgacggatcgtccgggagccccgtactcattacagaaaacgtggttcggaattacagtttacttccccaattattttaacacacaaaaatcggataaatttgcgcccatttttaaccaaaatacgtcagcatcaaaaaatcgcgtcagtgaaacagaatttttttgaatttacaagatacggtatcgtatcgtatagtgtgatggtttgaaattaataaacttgaaagcaataataatccaattcgcaaaaaaaaacatttttaattacaaaattgttaattaataattcaaattcattaaagtttttacatcaatggctacagactttattttagaaatacagtatcactcgacccattttacggtagccgcgggggaaaattgggggaaccataaaaaccccaattttttttttttaatttttctatttttttaactttttaccctacaaaattcgttttttcagtgccttcatggtgtgtcgagaggacagcgcaaaaaaatggctgtggaaaatccaaaaatgcacaactccgaaatttcaaaacggcttggcgaggagtggaagaagctggaggagttggagaagcggccgttcatcgacgaagcaaaacgattgcgcaacgagcacatgcaggtggtgattggtgattgaccaaaaatgagggagaaaaaactgatcactcactactgatcagagtgaaattcggacaaatttgacacttcatggatcaacaaacagttgttgttggaacgaaaacatctgctgctcttattatttattccttttaaaaaatatttttgtaaaattttgcaaaaacttggaaaaattaaaaaatttccattttatgtaaggttggaagcatcgatgtgtgctgacatcaaggcaatcggaaatcggaattccgacggcctaaaaattttttcggaacagcccaaaaatttcataaatcggaattccgacagcctaaaaaatttcggaaaccggcaattggaatggtaccatttaaatttattatcacttggcaaatcatttatttgtccatttgtccatttcctcaatttatttccagaatttcaaaacaggcaattttacaggaccatccggactacaaatacaggcccagacggaaggccaagcagcaactgcaccaacagcagcacaacaaccatcaccagcagcacagcaacaacagtcatcatgccaagaaaagtggtgccaacaatcagcaacaccaaaatcatcatcatcataatcagcatgcacaatgttcggccggcactgcgattggccagcagcagcaaaatgccgtcgttggccatggccatggtggccccggggcaatgccaaccgcggcagacgcattggctgcttttgatgcactcaaatgcttgccgcaaccggtgaggcgtgatttgtggggcataattgaaaaaaagttggacaggttctctcgagagccttgcgcttaggaaatttaatttttcccatgtttgggcacgtttttctcgactcagtttatcttgaaaattttaaatttaaattttttcgcaacaccacgattgtttaatcctaaatttttgtttcaacttcgttttatagtctcgaaactaattctcgacatccattctcggtaatgcaaatcataaattgaaaaaataaaactttttcaaaaagcgtcggcccctttgatctgtgccgaccccctaaaactttttcaaaaaacaatctgtccctttgatctatgccgaccctccaaccatttggaaatgttttttttttgcacaataaaataaactaatttaaacacatttttctctcactccctctctctccgccaattctttccgttacggtagtcctactgtagttcagtcgctcttttttttttgaaaatgtcggcgcagatgttcatcaacatcatctcatcaacaaaatcggtgtcgcattagtcgttcgtccgtccgttcgtcggtcaatttgttgtaaaattggggatgaatttgtgtgtccgtccgttccgccgccgatggcggtacaaatttatgcgaacccccgagggcgagggacgggggggggaggcagcaaaaatcggcgcttattttaagagagcagcggagcagtccagtggcagcgcggatgaggagacacttggccaaaaattgagacacaaaaaaacgggggagcagggggcgctacaaatttacatttttttgttttccgagacaaaatgatgttgcaaaaaactgttttttttttgttttttgcaaaataaaatgagtaaatctgtgtttccaatggtgccgattcccgaaacgcgctaattgtcgagagtatctttttcctgtagagttaagccccgatccaatgcggacaattacgaattgcacctgttagatgagagtgtcttaaaatgatgttctaagattttttttaaaagataaatttggtttcttttttttcgactttttataaaaaatttactccacccgacgagtgatttgctccatgacattttttaaatttctccagccatctccgatccaacttatcgggcaattttactccccaatccccgaatttttctcccagacctagttttgtgagtcgagaccagcagacgaactctcgaatgtacctgttaaatagaagtatgaggctctaaaagaggaaatgatgagagagagagagaggtgcgagagggttagaacctaatctgaaattttccgattttatcaacatttttttatgaaaaaatcaatttttatccgctcaaaaaattcgaatgggttcggcacgctgataatttatcatttaaaaaaaaatttggagattttttgagaaacanaaagttgaaaaactattcatgtg

SEQ ID NO: 13065 - DNA, 2852 bp, Heterodera glycines
agaggcgccgtcattggaacattgaagcgcattttgcccgtgtagttgtccagaaacaaaaaaatcataaaactcgtcttcggacttaaccaattgaaaacgccattaagttgtggcggaattgtgctgaaagagcattaaggccattttgaaggtggtgcacagacaggaaggccaatgatgtgatcatcttagacttctcagcgaaggcaggatcagtgttgtaaactttaatgagtttgaatgggaacggagtaataaaaaattctaaaattacacgagtgaggcccagggcccttatttgcttcttcatgttgcggaccaagtgaaaaaaacagtagcgcacattgcacgccggaaagactgactgtgcggaccgcaccgaccatggccaactcgaagtcaagcgaaattgttcggggcgcgaaatttggccatcgttccacaagaagctccaacatacgcgtataaattgcggcacacttcgacgttaaaaggcagtagcaaatgggaaagacccagccatctctcctaaaaaagcttaaacttaatgacaacacacttaaccttactttgccaacaacacataaatttggctgaaaagcggcggtgtcaatgcaaaagtgccgtccgcgtaagtctttcatctggtgggtccaatctgccgtagacgctcttccaaaaatgagaatccttaatagtgtaaatgaccatcatttaatggtttaaacgatatcttaggttggggtccattctgtccgtgaatttgaaaaacgccagtgtccgccaacaggaattgctcctcgtcaatctcagtgcgcttataaacacgataggtattcggaatctccaactgctccaaattgagaggttcgactcgcggtgcattttcatcacggcgcaaacgtttgatgacctgaataaaaagaaaacaaaattatttacaaaattgtttttgatagtaacccaccttttttgtggcatctttgctcggaaaagaggccagcacaggtgtgcatgtgttacaaattatttgaatgcaattttttccatactcactcatacgaaaacggcggtacgaaaatgtctccggtacgaaaacggcggtacgaaaacgtctccggtacgaaaacggcggtacgaaaacggcggtacgaaaacgtcctggcccggaaaaggagagggggggggggcggaccgggtcagtttagtctggccggtttagtctggccgttttagtctggccgttttagtctggccgttttagtctggccggtttagtcagagggtcggtttagtctggccgttttagtctggccgttttagtctggccgttttagtctggccggtttagtcagagggtcggtttagtctggccggtttagtcagagggtcgttttagtctggcaagtcgttttcgcccataattctaacaaatgttttttttctgtcaattatttacaagtaaaaacttaaaatactatgtttagctacaacaacgatgccgtctttgctgaaaaaagcaaaatgatcatttctatggcgtttcttcctgtccaccatctccctgctgctctcaatgctttgcaggcacaacttcctcaacaacttatgggcgtcttcaattggtgaatacgggcatttgattgtacacatccaactgtcttccgctttatcaacacaattcgatgtgagtaaaagtctattgatgcagaaatctcatgatgcatcgctggtctccctcctcaaaaggcgcccaaatatcgtgccgcgatgcgagaattcttcgactcttgcagagctacaatgccatcaacaataaccaggctcagcaaaatgatcacaattaccatgcccttatcaatgttaacccctataacatcatcaattttctccttggtatttctcggaattatgagatgcacccgtaatattttcaatgttttgttatttttttgttgttaacacattgataaatctgttatggtgttaattttaaagaattttcgagaaacaaatcagaattggatcaatgtaggacaaaaacagcttgccagactaaaacgaccctctgactaaaccggccagactaaaacgacccgactaaaacggccagactaaaccgaccctctgactaaaccggccagactaaaccgaccctctgactaaaacggccagactaaaccgaccctctgactaaaccggccagactaaaccgaccctctgactaaaccggccagactaaaccgaccctctgactaaaacggccagactaaaccgacccccaccggcccaactgtgctaataaattgctgcttatggcctgcaatctcatattttccagcctcatttcaaacttttgattgagttttcaaaaaaaaaatcaaaattcaacgctttttttctcttatatagggaaatttggctataaattttgttaaaaaggctttgaaaaaaacaaattgaattttttcttttcaattttcgcatttttgaaacaaaattttcatctcggggacccacgcgtttcggcgctggcgtttcggcgccggtgtttcggcgcttgcgtttcggcgctggcgtttcggcgccagctcgtttttccacttaagcttttttctttggcatccaaatccaacaatcttggtatcattcgaaagctcttatcatgctctattagccttacaataagcggatagattttcaagcctgtaaaaaattttattaagagagaaacttcagagaggggggcgacttttcgaaattttcatgtataacttttttggtaattatctaatcacgaagcaatcgcttagaaaaagcttctaaacatgataagctttccactgata

SEQ ID NO: 13066 - DNA, 1252 bp, Heterodera glycines
ttattcggtgattcgtcattatcataataggtgaccacacttttgcgtcggttttccgtttcttcataactttcgcggtgagcttggtcttcataggagctcctgagtcttctcgaagctgttctctcatgtactccccgcatttccttatcgaaaaattttggtttgattcgttcataacttcttgacaattcgttatcatttctttctggtgataaaagctcgttggcgcattctctatccgaaaagtattgattattctcatagttattaaatgaagtcgatgaatacgaattggagccttggccttcatataattcataattttctaaattaatgctatttaattgttttatgttaataatgtcaagaatgttagcaaaatttttgtgaatataaatttttgccttatttatccatgacttatttcccgacttgagaatcaagaatcacacggaataatttcagaatctcttcccgcccttttatcttaattttttcctaaccaactaaattcataaatttactatttatttaaaatatattttaatttaattataagttttttttgaaaccagtctaaacaggtaggctggtccttttatgctgttgtgtgcccaaataaccttagctcaactattccctttttaaaccttgtcttcgtaatggttcaagtgtacacatcaaaatgccatggctttctgtcaattctttgatgtctctcatggctataattcgtttcatgtccaaatttctgccgtccaacagtggaattccattgtctctcgcacaatgcaacaagtagccgtccaatggctgcgtgggccaatcgcacttcatttttttcaaagcgttcaaatccaattttgccctcgttgagttttccatatggacgagtattgggtaacggacgcccatacaatgcaaaatgctagccaaattgctgacaaaagtgttctgatcacatccgggcgattgaccaaacaaaaatataccactgaatggtgcaaagattgtaataaatataaatgaatttaatggagtcatctaaacaaaagatatttcagcaaataaaattgaaaatttgttttctataagcataaattataagttgtcattatttataggtttaaataccctcttaaaatatatttgttaaggtttcgcgtgcatttctgatggaagtaaaggcgcagaaaaaaaaaatttaaaatttaagaactaacgcttactgataataaaacataattgc

SEQ ID NO: 13067 - DNA, 2555 bp, Heterodera glycines
tgtttaattcacgtcgatggtaaaagtccccagtcgcggaaaaaccctcgcgatatgaagcccgtacattctgccagttagagaacaaatgtgggtatgtagtctgcgcaattaaaaaatttattagtatcttgacactctttatcttttttaggatttatttagaacctttaatagtgttttcgagcattattaaatgtcggacggttcagtcccttttgaattggatgcttcagtacgtactcgacaaaaattaatagataaataaaatttaaaaatattagcatggtaatttaaactttattaatgtgttttttattatagttgccaaataaatgatgatgaaattcatccataatcgatatgaggctttcaatttcccattatgcgtcaacccagcttcattcaaatgattaatttcctgagagaatcgataaaataaaataaatatttataattttttcggtttctgacggtattagccggaaattgtttacatgaatattaaattgagctggattaaaaaaaaatattttaattgtttgttaaaattttaaataattggattaatcgtccgggaatcttcgcttctatctgtccgtaagtcggtcattttcggaaattaatcaaatttttcgaattttcatccggcggcacatgtcagcaccgttggacctaaaacttattaattttctaaattaactgaaatattaagggtttgccgtgacttcaggaatagggaaaagggccggcggtgccgttaggcgccgccgacgaatttttgaaacttttgccccgatttcttagcagattttgattaatgaaacaattatgtaattctgaaattttcaattttatacagtgtaaattattcacggaaaccgtggagagagaggcagagagagagacagcgagagagagaaagagagagcgagagagagagaaatgtaggtaacaaaaagaagagaataaaaaggttcaatttgcaattcaagattggccgacatatgcggcgctgacatttgcggcgctgacatttgcagcgctgacatttgcggcgctgacatttgcggcgctgacatatgcggcgctgacatttgcggcgctgacatttgcagcgctgacatttgcggcgctgacatttgcggcgctgacatatgcggcgctgacatttgcggctttgacatttgcggcgctgacatatgcggcgctgacatttgcggcgctgacacttgcggcgctgacatttgcggcgctgacatttgcggcgctgacatttgcggcgctgacatatgcggcgctgacatttgcggcgctgacatttgcgtcgcagacatttacggcgcccagtcaaagcgacacttgcggcgctgacacttgcggcgcagacatttgtggcgctgacatttgcggcgctgacatttgcggcgctgacatttgcggcgctgacatttgcggcgctgacatatgcggcgctgacatttgcggcgctgacatttgcgtcgcagacatttacggcgcccagtcaaagcgacacttgcggcgctgacacttgcggcgcagacatttgtggcgctgacatttgcggcgctgacatttgcggcgctgacatttgcggcgctgacatttgcggcgctgacatatgcggcgctgacatttgcggcgctgacatttgcggcgctgacatttgcggcgctgacatatgcggcgctgacatttgcggcgctgacatttgcggcgctgacatatgcggcgctgacatttgcggcgctgacacttgcggcgctgacatttgcggcgctgacatttgcggcgcagacatttacggcgcccagtcaaagcgacacttgcggcgcagacacttgcggcgaggacatttgcggcgcccagtcaaaaggacttttgtggcgccgacacttgcggcgctcagttaaagcgacagttgtggcgcagaattaaatgatcccaaaaaatttcaacaatttatttaagttaatagaattgttattttaatagtttatttttttaacaatgactaatttaacaataattcttgcaacctaatcacaaagataaaggtagagttgtttgccgttgtaacagcttcagaaaacgtttcacttagcctcacccagcattttcaaagtataaatggaatactgtaataaaaatatttttataaggttcattatcgccattaaaaaagaggaagagcaccaaaccaacaaaaccgcctgaggccttatggaattgacccaactcgtgggattgccgaaaggcctcgcttaaaaaagattttcgaaatgatgaagcgatccgtcgattagtcctcgcttttgacaataaagaaaatataaactatgatgatataattaatcacattaatacattgcaatacagcctagggatgaaagggtttcaagaatgggactgaaagagtgattaaacaaatgtttttttaatcaaaaaattgttgaaataatttttgggtcatttaattgtgcgtcgcaaatgtcattttgactgggcgccgcaagtgtatcgccgcaagtgtc

SEQ ID NO: 13068 - DNA, 3421 bp, Heterodera glycines
  unsure (1)..(3421): unsure at all n locations
cagatcattcgtgaaaaaatcgatgcaaaaaaacattctcggtaaattcaattcaagaacttgctaagcctaggcagatattaactcaaataatctaaaattttgttttaatttaaagttggtgtcggattttccagtctctgatcttccgcttgtgtcggattttccggctcccagtggaagggggggggggagagaaagaaattagagaaaacagtaaggaaaaatataagagagaaatagaacgaaaaaaagaaagaagaaaagatagagatgagagaataaatgttgctttgaaaactatgaccatttttacaaataaaagaatgttggtctggcgtagaatttaaaaataagattcggaaaatataagatttgtctaaaatgggtaaattttttaaatttttagataaaaatattttcaattttttttgcgaaaagataggaaatttttttggaatagcataaataggactgtttttgacgatgcttttaaaattaaaaacattttagaaagtaaaaaaggaaaattaaaaatagaaatgaatcttaggaataagaaaaatataaatttataataaatttaaaaattaaaacagaaagatgatgatttgatgacacatacatccatgtgtatttttgcaaggatagaaataaatcaaaatgtgtgggttgggggaagggaagaggacgattattgatcggaggatggatgggacacaacgaattggccaatgtcattcacattaactgctaatttttgttgttggctgttgctgcggtgtttggatagttattttttaaaaaacaaattaaatggcaaaatatttgaattgataaaatttagaaaatttattaaaagctgtgattggacaatttaaaaaatgcattaaaaaggaattaaatttccttttattttccatgctatgtaaatgtatatatattttctgaattatttacataatttcttcatttaaaacatttttcatcgcaaattttattccttaatttatgaaaaattttcccaacaattccatcgaaagcgccggcccacaacatacaatttggatatatattcataatttttaccttttttgcacgcttttggcaaaagtttaaattgataaattattgttttgaattatttatatttaaagtcaaaatttttcgaagttgcaaaagtcccgcaatccaagcgggtcggtcgcccaaatttactttgggatttaaaacataaaaatcttttaaaaatttgtttaaaaaatattgtttgatgatgaatttaatgataattgttgttttaatgctgaatcaatcatctgcttttaaacttttaaattgacaaaattaatatataaaattgaaaattaaagaaaagttttccacagtatacttaaaagataaatatttcaaaaaaattatttttaatatttatgcacaatttggtaattgtaacagaaatgaaattttgttttcagctcgaataaaaattcgatttggtacgagactaaagcgaattttgaatctgatttttataaaaaattttaatttcaattcttttgatattaaaaataagtcaaataatatgccgcattattagaggaaataaataattttgtgaatgtgatattatatggatttatgaaaatgatactgaaaagctttttttttttataaaagatcaactttcttattatcaaatataaaatgatgaaaaaattaatttattagaacgaaaataatgaaaaattttaaacacaaagatcaaaaaatgggttcccggtgatttcgtcagtgagtgaatcgtcagtaaattatttcgtcagttgaaattaattcataaaaaagcgtacacctagccaaattttacaattcaaaaagtagagtcagaagaacaggcttgtaaatattcctaacgagtcatggtttgcaaaatcttatgcaattattcttaaattgttgccctgccgaacccattttgatttgttcttttcatgtgccccttatcccatcagcagctgggctgcgcgaaaatcagttacttgtttgtacacacctcgaagaacgttacttccatacgtgatcggctgacgtctacgattcgatttgcagacaaaaaactgacgaagaacatcaacatactcaaaattattagtaggaaacaggggtagagagcggacagaaagatcccgcggatcgcggtcgcgctccacccctggtaagaaaattaaaagtgaaattccgagatttatgcagaatgctggctagagaccagggatgacacggaattccgacttccgatttccgacatttttggggtcggaattccgatttctgaaatttttggcaaaaagtcggaaattttcggaaattttttttgatttttttttcaaaaattaacaatatttgtacaatttctgttgataaattggattgaaattttcaaaaatttcccggctgcgcctttcggcaccgccggagcctaaaaatccttaattttgctgcaaaatttgctcaaaatcggcaaatttgatgaaaatttagcctattaaaatattttaaaaaattttattatattttttatttttttcaaaatttccgatttccgacttctgacatttttggggtcggatttccgatttccgaaaatttttggggcctcggaatgccatccctgctgcacaccgttgcaactgctaatttggcatatttcctgttattaatttgtttagtcataattagggcccggatttttatgtttttacatattttttttgcggcttagttatggcgagagaagcccaaaaatagcattatctccgaacaatttttgatttagagcgacttataaaaacataaaaacacatattttggcgttttcgcacataaaaacatatcgcacatatttcggggtttggcacatattttgcacatattttggcatttttgaaaaaaatatctaagaaaaacacaaaaaattcaaaaatgcacccctaaaaatcaactttcttgccatttttataggctctttcaaaattttctttatttatttcgtgtaccgaaaatcgaattctccattaattcgttactggatatcgaagtttcttgctggcacttactcaactgatggaaaaattatctttaaaaacaatttatcaaaaaaggactaattttacccccaaacacctccaaatgttttttatttgcaattgtgcaggcaaaaatgaaaagaatgagttttttggaatttttatgcaaaaataccattgatttttcaaatttttagcacatatttttgcattttttaacacatattttgggcttttttggggtttttagcacatattttngggtttttttagcacatattttattacatatttcaggattgctagcacataaaaatccgagccctagtcat

SEQ ID NO: 13069 - DNA, 2504 bp, Heterodera glycines
  unsure (1)..(2504): unsure at all n locations
aaatcattcaaaaagataaatacaaagattaaaataaatgaatttaaaaagttattttcgcaggaataataaaatatttatttaatataaactatgaatgaaaaattttcataaaatattctggtgtaaagaacaaatgcgtttctgattaagtaccattagaaaggtaatataccaaaatgggcgacggcgagaaattagcggtgaattggaccctacaagtgtccctgacccccacaaaagcacaaataaaacatatgaaaagttattttgaaagaaagaacataattaactaattaaatactttaaaaagttctgaaatatcattggaaaataataataattggtgattccaatctccgaccattccatcgccacttgacgattttccacaatttgtaatctgcgacgtgaattagccttggttaattggatccataaagaaataaattaatcagacaataattttaagcaaacaaaatgtaaataaaaatgataatttattttattctaaaattttcaaatctcactcattgcaaaaattgaaatcttttgagaaaaattgtatttaaaaagttgtaattttaataaaaatgtgtgccacatatgttgtctaggggccgaaaatagtatcgaaaaccaaagtgggccttttagtttggaaaaatttatgattttctcaaaataaataaataattacaaacaaaagaacttattttatacaaaaaatataatcaaatcaaagtacgggtcccgctgcgggattgaaactcaaaattttttgcggtacaaaaagacccggcatgattaatcccacaaaattcggcattttggttatgtttcagcattttcaatattaaaaattgctataaaaatgaatgaataaaaaattaaaaaccaaatattgggaatattttcttcaaaattaccaagcgaacatttattttcctgaacaattttttcaataaaatattaggtaaaagacaaatgtgtttctgattaattaccaaagaaaggtaatttaccaaaaatatttgatttatttccaactcgccgcacattattttaacagctttcacgccaccatatttttcgaagcaaaaactagaaaccaactcatatttttgcatgtattaaatataaatatttatttaaaaacattaattagcaaaatcatgggtcaatcaatacattcactttcctattggattttcttaaacccattgacacttggaaactgagtaaacccggtgatgaaaagatagtcaatgctttggcgcggagcttagaaggcagttccgtgcagaaatttacggtatttctctttacacgtgctgtctcttcttcattggcttattcgcttcgtgttatgacgaaaggccacggcaaatgggccaaggcgagaaattcgcggcgagttgggagttgggccacggcgagaaactcgcgccgagttgggccatggcgagaaactcgcggcgaattggccccgccgaagtgccctgacccccaaaacaacccctgcgttcactctatgtgctctctcattccctcccaaagccaatggccaacaaaacaacacagagtcaattgatttctttcattgctttcccaattccgtctttcatctgtgttcttcacttatactaaatttttgcttcttttcacattattttatcttttaaatttatcggttaaagatttttttttgattttgaattttcaatattacacaaaaaattgtttacaactgttgcaggaccaccaacttatttttttggccattggtgaaactgaacggcaatcgtggtttcatttgtgtaagaatttggaaattggcaaagtgttcgtttggaaaagaaaatgtacaatcgaagaatgaggaaaatgtgagctttttatacttctgtgttcaatattttttcttgttcaatgaaaaaaatattttaaaaataaaaattttcatttaaataattttagcccgatttgcacgggacttggaattatatgaaaaaccgggaccggtttttgctttttacccgggacgaaacttttctttttttaacaattcagaaaagctaaagttaaggcaatatttttacatttaagctggatttgcaacgacgtttgggtggacattttccccttttttgatcgtcctcaactcggcctcaaattggcaatgctttctccccgtttcgatgctttagtggacaaatacttcgataacaaaaaggaattgacaatttggaaatcaattacaatttgcaaggacatgaacacggacgaacctgttcttgatataattagcaaagctatgccttggccgttaccactaccggaacgtccgctgccaaaaaacattcgcattaactaccttcagattaagtacttgttgatttaaagcattacgtcatctaaaatatgaaatttcggcaaaataattcattaatatttttaaattatcaacaatttatgacanaaattatatgatttaatgaagt

SEQ ID NO: 13070 - DNA, 2144 bp, Heterodera glycines
ttcttctacattttgggccgtcaaattgtaagagcaagcgaacacttcaagcgcctaaagaaagaaaagtgccaaactatcaaaaagaagggaacaatatgccaaaaaatcggtttaaatttgtatttttattttaaacggttaaaactaccaaattttgcagctccgtcaaaacccaattttaagcaaacatccttctaacgtattctcaagcacacaaattgtctttgtacgttttggtagtgacccaaacgtccataacttcaaccagttcattcattgtgtcagtaataattaccctgtccaagtgctcgttgttgtcctgctgttgatgatcattctgtccctccaccaaattgtcggccgccactgatggagatgaatcaaccgccgcagggaatttttccacctccaccacttttggcatcttctgttgttgctgttgttcattgtcttccccgttcggcatcaaatgttttgacgaccgttcaccacccgtgtccatcagcaaaatttgagttgaaaattaccaaaaacacacacataaacaccacagacataaggaaataaacaccataggtacaatagttttatttaggcaaattccgaacagtgaaaaagtgtccaactttttgggatcaaatttatatgcaaattgaaaaataggaaaaaaatattgcacaaaaacaaaatggataaaagagatttgataatttggacaattttgttggtttttggaaataaaattaaaatggttagtttatttattttgcgtgttcttcctcctcctcctcttcgtccgtttgctcctctcttccctcatcctcctcacttcctcctctcatttctccgttattttcgtacccattcgcttcctcttcttcctcacttccaacttcttcctcatccagaaattcgttgtcactgttggcggacgaggaggaggatgaatgatggttttgctgtcgttgtgcggcggcacgcaatttccgtctcaatcgccggtcacttttgcacagatcggacaacatctgctcaattttttcaaatacattcattacaaaagatttggtaattgtgatctctttgactttgacctcattttatatttttcttggcgattttattttatttgtgcttgtataatccgatacttttggacgattaatgtatgtatatgtccacaaagtaagtggatttatcccttttgtggactttttcttttctttataaataaataaataaataagaagaaaaacgaattttcgtttgcaataattaaatttttggtttttttctttggccattttctgtggggtttttctctcaattgcgatgagctaaactcattttcaccgttcgctcactttcaactcgcgcaatgattgctcaacctttgcactttgcgcttcccttaatgtgccatcctttttcttgcaacgtttcggcatttttcttcttcgttttgagcattggcaatgtttgggtcattaactggaaagataatccatttaattataatgattataatttttatgtattttataattgctctgctaattgaccattcttttccgctgcttttgtgtcgtcatcattaatgtcctttgaatgggccgaaatttgctccaattggctgagaatgtccgccatcgcctgctccgttttgcgcagtctgtgctgcaccgagcggagtttggcaccacgaacacctgcacagaaatacgctaattgtctaatttagagttaattgggcgataattagtggcattaaaagtttagccattgtttctccaattaaaattgcaaaataatcgcaccatattccaagccgtcctccgttccttcatcgtcgtcgtcgtcgccatacaaaaggtcaagcggtcggtcgcgacgtcgtttttgccgtttggtcttcgacttaaacatgatctgaatgtacttaaccatagcacacttatattcgtaaaaactatcattttcttgtctgttagatggttttaaaactaaaaaaccatgcacatggtaatcttggcataaaaagggtcaactttttacgcaaatatgccgaaaatgggttaaaatcccaacaatttgtgttccaacgcaaccaacccccctttccaccttgaacaatgtgtaga

SEQ ID NO: 13071 - DNA, 1994 bp, Heterodera glycines
ccctgttgttgctgctgctgttggttgtgcatgtccggtattcgcatggatgcgcctggatggtgtgggggagggcgatgggcacgttcttaattgtgaggaaagtaccaggcgtggccaagggggatgtataattttcaaaaaaaaaaaattcgtccttaaatttagaatttcagagggttggccaaccggcaaaatgccgctgacaacttatatctttcgtaaaaaagggaaaatttgtacccctctgctgctgctgttggttcgtccccatcatcgacggatgcatcggtcggtccgcggccgccggctgttgccgctgggtaccgccgccgaacaaattggaaagcatcggtgagaagacgctcgggtaaagcaaggcaaaacagagaaaaatggcagcaccgaccaggcacaacttccatttgggcaacaccttaacggaacggaaaattttgagaagaggtgaaattgaggcattgaaaaaattcaggtacctaattaaaaacaaattccgaaacaatatttaaacggtatttgtttcctttaagggacacttttcacatacatttttttctaatgccaatgactaacccgaactagaaaagccgaaaacccaaaaaagtacctcctgtaatttataataaaattccaattatttttcgaggataagacctgaaaaatgccgagaaattcacctcttcgcgtcgtcctgactcgtgccattcctcgtcctcctcctcactgtcctcggaagtgtcccgtcgtttccgtcccttccgttttcgttcctttttccgtctttcctcatcctccgttgtatttggcgtcctcctcttctgattggcaaactttcgattgtgtacgcccggaattgttgttgtttcattcataatttgcgtaacctaaaaatttcaacaaataaaaatttgttaattttcgtgtgctttttgccataaaccattgcttttgttattattattattattatcgggtacaatcctccatttccgtccgcatttcagttggctggtcacaaacaattttcgtcttttttaagtgccatggaattttgcggctatacgactttttttgcaccgaatcggcacattttggaggttctccattcccctcacaattattcagcagagaaagaaagacagtacagacacacagctgacgctgtcaccccaatttaagtggcggcggtgtccgtccgccggtcggtcgttcgccgttggcggaggccacggggccactcattccattgcatttcgtcggtcgaccgtcacacattaaaaatgctatagccatagagattatttggtgaatagagcttttcatttctctaaaatttatttatttgtctcactcggcggaagcgaaaagaaacaaaaattgggaaagaaaaacgcaaaagggagagagagaaaggttgagaaaagagagaaggaaagaaatgtgtttccatgggggaaaagagacggacagacgaagaaaagacggaccgaccagcggagaaagggcgacggacaagggaatggaatgcacacgaaaggaaccaatgttttccgcgtgattcctcctttttcactggcaaccgaccgacccatccgtagatgggacaaagacaaaccatgaaaaatgtaaattcctcttttttgtatgtatgtatatgctcatgaagtggcaccgcacccaaaccaaacaatgcattttattccatcagtgagatttaagcttaataaattttaaaagccaaacttttttgaatttgtttagcttaatgattaaatcagcaaaatttaaaaaccgaggaaattaaatttaatttaggtaattaactttgaaccggcacatttcacttcacttctctgattttgcgaaaaaacacataaatcagtaaatttaccgattcggaaaaactagtgatacttttaggtagggtagtattaattaattacacctaattagcgctttttcatctttcttta

SEQ ID NO: 13072 - DNA, 2157 bp, Heterodera glycines
taataatctgttaaaaggcgagcgaaaatctattaaattttcccggcggccaaaaaagtgggtataaaaagcaaaaaaaaaggcgtcgcccggtcggacttccgcccaagccgaaatcctgggacaatcctgcctaaaagcccgcactttggcaattacaaacagaagtactgggcccaaccgtccctctcgccttttatgtctgcttattggttggtgtttgcacctggtagcgcgtcttctgcgaagtgaatgcgaactcgcccctgttgttcatgtagcgtgggtatcgttccaccagccgttcgcgcactcttcgcggaatccaatcggcctcgtcgacagtgaaacgaatttccgcctttgtggggtctgaatttgcacatttttaaactcccattttacacaatgttcgcaagtattataatttctgataattgcccgtttaaaaaaactgatttttttataaagaaattctttgaaaaaggtacgaactgctcccagcttttcgagtgttggacaatggacaattttttaaattaaatttttgacaattttttaaattaaaattttatcaatattcttaagaaatttcttgtgaaaagatcaaacgatgctttaaaagggaaaagttttaggaattattagtttttattgctttttgacatttttagcgaatgaatgggcaattcgaacgctgttattaataaagcggaggaaatgtttgtttgttttgtccaaaaatgggaaaagcattttcatgggcgatggatttagttttaacacccctcgaccggacggcgaaaaaaaccattgaaatgaatgaatgaatggacttacgactgtttacgttcgaaccgcccggtccgctggacaaagtgtacttctgtttgatccgatctgaagcaggggaaggagggaatgagcaaagaaaagtggagaatttacttaaaaatgcattttgagtttggtggggcgaggggaaagcaaacaaatcgggagaagaggggacagggggaaatttgaatggtcatccgatggacgacaaaacggtggggaaaatgggaaaaggggtgagtgggttggaactggattggattgaaagatggaaaatagaaatgatttaagaaaaaatggtaactgaaaagtaaaccaaaaatatccgggaaaatgggaggtggttctaccgatgattttttctattcgattcaaaaatacaagacgggaaggcaattaaaaattcatatatttttcattcgtttaataaaatggtcaatttgaggaacatgaatgaaaaataagaaattcggacccggtggtttttttggggagggggcctctcctctgcctttaatgaccgaaataaagggaattatagaaaattttgattattaatccaaagattgccgaatactaattgtaagaccagggatttctcctctgctttcagtattttccaaattaacaataaaacaaaacctcgtggtatctctccctcaaaatagaggccttcgaaaaagttgtgatcgcgaccggaattgcgagaatttgaagggtcctttgactgaaatgaaaaagcaattaggtaattcaaatgtataattagtggtccgacagcggttaaaagattatttgaattttggttttaataaataacggcgaaatcactaatcgttaccccattttactagtaaaatgaaacgcatttggactatttagaactctgaaattggctagttttataaattcatattattgtagaaacaactaatacgagaaaaaagcttggcaaaatcaaaaaccaatttttatgagcaaaaacgttaactttgaaacattaaaatgagtttttcaatattcgtgaccaacccagcggtccgttttcaaagttaaactcaccaataaatgtgcggacgaacataagggtcgattaaaaaactgggaaaaaagacgagacaccaattgaatggaaaatgacggcgacggaagcattggcacaaataatgcctaaaagaacagaaaaaaagttaaaatataataaaagaggacgggatcttattttcattaataagagctcaaattaaagaaaggctgcagataattaattaggtaattgcctcgagatcgacgggaaaaaaacagaaaacgggacttgac

SEQ ID NO: 13073 - DNA, 1026 bp, Heterodera glycines
  unsure (1)..(1026): unsure at all n locations
ccctctccccttcgcacattcancaagtttttttgaaatgtgccgcaaaaaatgttaaaaatctgatttagtgatcccgaatgcactgaaatttatgaaaaatataataatagaatgaatatatttttgatcgaataaatgtaaaaatatttgaagcaattttgcaaaatcttcttatttttgaccctaaaatcttattttttggcctttattcttattttgaaaattttgaaatagaaaccctggatttagacaaaaacacccagaaaaattgactattctggcataatttataatccttaaatttggtcatttttagacaatatctgtgcaattataccaaaaaagaattgaatcgaggcgatacatcgaataaaggaatgtggagccaaacccataattcaaaaaaaataagtaaaaaactttttcatgggttgcttaagagctactcccaaaaatatggatataaatttcgcgaagtttcaacatgctgattttcgtattctgttcgtaattgtctttaatgacttgaaattttgctggaaatattttaatttaattttggcagccccaattaactaacaattatgtcaccctatcgtactgcccggccctgctccatttcaagtacagtcatggtcatatctttagcaccacttaaaatttcgtatcaaatttgtttaaaattgtttataaaatctcagtttgattatattatgtatatatgttatacatttcttgtagtattttttgtgggataccaatcattaaccctttcataattgttattattggttacaaaccattttaccaactgcactcccttttttggggtggtcatatctttagcaccactttttgaatctcgaatttgagaggcacagaaaaatctgaataattcatgctaacataacttttgacgctgatcaaaaaagtcttttgcaccaacatgatcagatcactccttcatcgagatctggacaacccaaaatacactgaaaatcgggaaatttttcgaaaaaaatt

SEQ ID NO: 13074 - DNA, 1259 bp, Heterodera glycines
  unsure (1)..(1259): unsure at all n locations
aaaattctgaaaaaattcatgctaacgtaacttttgatgctgatcaaaaaagtctctgntaccaactgnatcagatcactccttcatggtgatctaaaaacncaaaaatggctgaaaatcgggaaaattttcgaaaaaaatccctagggggttgggaaaaattttctggaaatttttagtatgcccattggaaagagcaccaaatttactaccgatttgcgctttgaatggtggatctatgacttttatccgctgagatatgggcactttcatttcgctgtcttcaaaaactactgtatttcttaagaaaatagtgcattttacagaaaaatgatcagcaccgaaattgaacttcccatgcctcagcgggtataagtcgtacaaacttgcggtcttttgcatattgtagagctttttatgctgtttccaatgagcctactcaaaatcttcccaacccccctacgaattttttccgaaaaatttcctgattttcagtgtattttgggttgtccagatcacgatgaaggagtgatctgatcatgttggtgcaaaagacttttttgatcagcgtcaaaagttatattagcatgaattatttcagatcatatatactaatttaatcaacctgagattttataatcaattttaaacaaatttgatacgaaattttaagtggtgctaaagatatgaccatgactgtaattnagtaaaaaaataattggatgaaatacgatcggggttcccgataatttccccgaggggtagggtctttttaatttaatttatttaccgatgatctaagttatctggttcttttcataaatcgtaaacaaaagaaaaatagaaaagttattgtctgttgtcaatcgaataaaagagaataaatcgtatttccttaattaatgggtgggtttgcttgtcataaagcagcagtgtcctttcatacattgatcagccgcccattcctttgatgattgataaaatgcgaacaaaggaagagatgaagccatcaaatggacgagcggcgggcaaaaaaccaaaaacatattgtaggttaaaggcgggcgattaagcgattaaatataagagactataaaattttattgactatattagtagtggggatgatattttaggctctaaaaccgccaaaataggtaggctttaggctctaaaaacccccaaaaataggctctaaaaagtctcaaatttagggtgtaaaatgacaaaatgattcaaaaaagtaaaaaaaaattagg

SEQ ID NO: 13075 - DNA, 3417 bp, Heterodera glycines
gaaaaataaaattattaattacataaaatggtaaaataatagaaaaactgtatttttttttaatttaaagcacaaaatccttaattaacaaattaagcatgaaaaaatgcaataacatagaggaatttatttttgttaatttttaattttattgctttccaatgaaattggatataattgagaatttcttccatttttagttgtgggatgaggccagcaagaaatataaaggtcctgttctgccgtacgacattacagaagccgatttcaaatgtgtcaatgcttttcactcgaaaatttttgtaagaaaattaaaaaaaaattaaaataaaataaatttttcacaaagggtccctcgtgtggcgacccgaaattcgaaatggtcaaacattgcgcaaaggtaatacatgcaatattccttaaataaatattattaagtatgtgcttttatgataaattaaggtgaaattctacggagacacaccgccggagaatgggggaattaatgaggacaataaaggcgagaaaaggggaagggattaaagcagttttgataaatctttctcaaatttcactttcaaaaggaaggaattcggtaaaatttgaaaaaaatcccagcaaaccctctcatttaaatgtgttacgaatttgagccctaattacgcaattatttttgccaaattgtgctgcagatttgcttctgatgttggtcgacgggtgtttggtgtgtcttaagggcgaaagcgacgaatcgctgcgagtcaccgtcaaattgcgactgatttacactttgtccgccggctcattcttcaccgcgtgcgacgtgacgaccatggaaaccgagtaaaacaatggataagagacaaattaatcaaatacagttataggtaaattctcgaccataacccaaacaactccaaatttcctgaatctcaaaaaaataaattaattctgcttacaattaacatgaaaacacaaatcccaacggttagttgcactttttctcagtttatttaaaattcgctttgttggtctttgattaaaattctattaatgagttggaagagaaattgggagaaagtgattacccactaattagccagagaaagaatgaaattagctcatcttgtgcttttgcagagaaatcacagtgactttggacaaaaaagacatcgccaacaaaagggccgtccccccaaaaagtgtcgtctccgcgtcggacgacctcagcaacagcgacaagcgagtgaagaagcccaaagcagccgaacgggtggcgaaggacgattatgacgagaaggacgacttgggggaggaggtgctgtgcccggacaaatgtgtgaggaaggaggacgtggaggagaagattgacgagggccaacgccacttcggcacattcacattgcccggggtgttgctgcagcgcaaatgccgtgcatttttcgcgctggaagagccgaccggcaaattcctgaaagttcagctgaaagtggagcacaagtgggccgacaccagcaggggaaactaaccagggcaggggaagactacggcacatttcacaacatatatcctaatagaccaccattgatggacgtaattggacaattacataaccgtaattaatcacaaaaaattttcaattacaaatccttaacccgtaattactggaatacaaatgctgaatttttcataatcagcaatatttgattttaaagaaataatttttattaatatcatgcctttttccaaaaatttttgaaaaagagaaatgaagaatggtatcaatcaggatacagtgggacacctaaaaaaatttcgggaaccaaaaaaacggtaagcggttttaatagcccataattataaagtgcttaaattttacaaattatatgctgctgtatattattgttcaccaaaatgcaaatcaaaaattcagttgcgagaatgaacgcgccaaaaccgagtcgccaatgatcattcctctggcggacacagtgaaactaaatcgcttcaaggtcctcacctatcgcaaatagtccgctgtaccgggataaagaaagccgagaacgaaatcagagccaaaaagcctgggtggaggaggggggggggggttttggggggttcagtccgttcggatatccctgccaattttgtttgcctttacattgtcgtaagatgcttaccatttcaaatgtgccatttattacaaaatctgatgccaaatgattttatttgaccagcacaatgttgccgaagtgcgtgggctgtacatcaacttgggggccaacagcgtgtcccaatatcagccgttgttggagaagggctggtatagagtgatcaaaaggcacaaagaaaatgcctatcccaacgcggtggtgttcgacagaaagaagtaggagaagccagtgaagaatgccaatgattgtgccaatgaacggaaaaaacgcaaaaccaatcggaatttatttgccaacaaaaagtgatcggtggaaatacgaattgtatttgaatataaattgaacttatatataaaaggagattttaatatagcaaaacaaaaacggaggcgctgtttaatttgagactttatgattattttgttgcatcttctgaacctttgttatccgactattaaaccgaaaaatgtgtcagacgctagtcaaattagttggtaataaatatagcacatctggttaacttaatagctatcaaagaaaattttgagggggggggattaaagtgagcgcttaaagcatgcctcaaaatatgcaattaattcatttattacgtgatcgcttaggtttaagtaatttgatggtctttgttcgcttttttaagaaggaaaaaatttttaatgcttcaaatgatatttttaaatttaatctgtgaactctgatgaaaataaagtgcataaatttctgtcggaaaaaggaccaattaatgttgaaaagtgccaaccaattattgttttatgctatgcattcatattttttggctgataaattggcactgaaattcgcactttcatacaaatcacatgataataatatttaaattaatttcccaagcaatttattactgtggaatttcggctacccgacttggggatttagccaacattcccttgcagttgcattgtctcgaggaggacgcagtaaacaaattttgacgagaaatttgacaaattaatcataataaccaaaggaattgttttagaattccgttgaacgtgccaattccttcctttgccaatttcttccgttaatgggcaccaaaatcactcggcttcatgtgtgttttgcaatttatttagtgaattaaactgatcaatgacaaattacagtatcctgcctgtttttcaggttactgtccaacgccacgtcgactcggcctttttggttcattgatttgatgtgattt

SEQ ID NO: 13076 - DNA, 2868 bp, Heterodera glycines
  unsure (1)..(2868): unsure at all n locations
ctcattgattttcgccctgctggcagcccaatggcatcaatttttcccgcaagcgttttcgcggacaaagcactgagagcatttcgccggaagggattgccgtggcgatcaaaggcaaacgccaacaaaagccgaatgtcctgcaaagggaagggcattcaagcggcggcacaaaatgaacaagcctgggcatagctcatgttctcgggttggcccagctcgtgcgcactcgatgccattttgtcgagcagagggccaagcaaagtgcccatcagcaccccttcgatgccgctttgtgcctggttgaagttatttttgtaggagggcatgcgcgaaacggccgccgactcggcggagatacgacgtccgccgccggaggaggacgtccgccggaaggcgccgccgctctccgccgatggtcccgcgccgatgccctcgcggtggaccgacaaacggccttgagaagcgagcgccgaatgttccagcgaaaagttacactgacagaacaccatcagagagtgcagcgcgtccacgagctgtacgcacggcgtttgcgcgactttggtacggagaagcgcacagaaaaagcgcggactgggagaaaatggcattttgaatcaattaattatgccattttgtctccgaaaactgactttgtccggtgcatttgggcaatcaaattgcgcacttttatgcgtagaaactcggcttgtggcgtgtgaacgccttcgttgcatccattggagcagccgagttggagggaaatgcgaaggacaatatgcaacacttttgggaacagttcggccgcgtcggagccgggcatattcagaaaagtgtcacaaccagtgagcacaacctcaagataatgcacaattagatgaacacagcttcaattaaatgaacaattaatttgaattagcccttcttgctgtaatggaaattaatcttttttagttaatttaatatgagttaattagctataacaattaattaatatctgctaattacttaatgaacaacaattagcgtccctaaacggtgcccccattcgccaacctcagaaacgcgcacaacgcaacaacgttccataagcgtgcccaacaccttcagcacaatcggaaacgaaaggtgcccgtttggttcaatgaagctggcggcgccaatagcctctgtaaagaaatgggagttcttccgttttgactctgttttctccggggcgatttgctcgtggcgacgccgttgttgcatcgcgggactgttgcaggtcgaggcaaagccttggagcagttcagtcaggcgagggaatgaggcggggatgctggaggcacgctgcatgcgacgcggtgagctaatgctcggacgcggcatcttaaaatgaaaaatttcatggttattagcaataaattaagtttttacgctgcccgaagtcgtccccggcaacatcgccacaccgtcgcttggcattgcgctgagactgatgcggcgccgtctttccgccgtccgttccgcgcccagcgtttgctgccgctccctctgttgctgtttgccgtcgcttttgctcctctgctgcagttgcatctcatccctctcaaatgccacccctttccccgtccgtcccgccaccgcttcgtctgtccgttcttcccgcgtgtcctttggctgcattttgtccgttcgttttgtgccaccgctgaacgttgctccgttgtgctcttgcagatcggcccaggtgagatagcctttctaaaagataaaagctaatgatcatttagctccttggggggtggggagagaattggcatttcaatgccaaacaaaacaacgaattgccccgcccgaaggcttctctctctgctcacagtgtcaatggtcgcagcttcagttttggacgtttttctggttggaattgttgccgaatcggaattgaagcgcgaacggaaggtgccctcgtgggtgcaccggtgctgtcgcatggcaatcagtcgacccaaaaggtattgcacagcccaaaaagtgcctgaaagtacggaacgccgctcattatgaaaaatgtttaacttttcatcatatttatatttcttatttccattttaccctcttccgcccaatttctgatcagaagacatcgcagcaccgccacatccaaataattggcttcgtgtgggtccaagcaaatgcccagcggagtatctggcgacgactgtcgctcgctttcgcccgagtcggcgcgagtgccgagcgcaattttcggcattttgggagggggaagcgtctgttggcacgcaaaggccgaagcgggcgggggacgggagacgattgtctgttggctgcccaaagaggacggagtgtcgtcgcccgaggcatgaacaatctgttgccaaatggaagattgccaacaacagactttggcactgactaaggtcttagggatggcaccacgcgccccttccgctcgaatggtcgccgttccctccgacattgaccccgccccgctgccgttgtcgcccttccccgccggggggagtgaatccgcgtcggtggaatcgttgcaaatgtcgttcaatcggaccaacggtgccccttcccccgcggctccgccgtttaaacttggctcaaatgcagcagaaaagccgtcgccttcctctgacgcggacgtctcgcgcccgaggaacattgcccaaaattagattaattaagcatttatagagagtaattgaaatttactaattaagaatttatagagagaaatttactggcctaattaggcaattgcctttttggcatggcttttaaaaagttttgacaaacagcaacaattacttcgattgcgcgtatccctgaacatccttcctccnccgtcccagggag

SEQ ID NO: 13077 - DNA, 1503 bp, Heterodera glycines
  unsure (1)..(1503): unsure at all n locations
agggagaaaatcaggtgaaaggggttcctcctcttcctcctcncttgtaccgattccgttgtccttctgctgcttttcgtgctgatccgtccccaaatccttcgcccgtcgtctgcgatttggtcagcaattgctgttgcttttgctgctccgatgctttgtaatcgctcactgaccgaacgattgtcgctgcggcagtgccgtcgtcgccgcattcgcccgtccgatgcttggcctcctctaactctttgagcactttggcatcagttcgaggaggttttggtggcgggatcagatgagtctgatagaccgtaaatgccatcggttgggatgacgaagtcactggtggaagttgcgactgacggcgaccggaaacgccggaaacggaggagagagaggcggacggtttgttgtccccaatgtaaatcccctgttcggcagcagtgctaaaccccaatagtctcaaaatgctattgccacttattcggcacctctgcgccctctttgcccatggcattgtgctgttcatttgtggcatttgacttcgccgctgtttgaccggcgcgcaaaaacaaatcaactcgggcagccgactttgccaaaggcattgccacaggcgaacgccgctttccagccgataatggcctttgatctcatcctcacgcacaatgtcgaaaagcggggccaaaaggtaaacgaacaattggacagaggaaacggaataggtcagttgacgcacatttggcattccgccgccgccactcgcggcactgtcattggtaaaactgatcggtgcaagggaagggggagaaaagggataatagactgatctgagagagaagagacgatgtgagagagagagagagagagagagagagagaaatagagagagagagagagaaggagagagagggaaagaaggggagagagagagagacagagagagagagagagagggagagggagagatagagagggaaaaaaagaaagagagggagacacagagagagagagagaaagagagagagagagactgtggtagagtgaataagaaagagacataggggattggttttgaaagtgaaaagttattagaattttactttgtgttaattttactcacttattttcattgcattccgccgccgcgtcaatgagcaaccagtggaggatgtagagcgatttgaccagcgacccactcattggcacgtcctcttcctccgcacaacgttcggtcaaaagggcggcacaacactgaaaagggggaataattttggcacgtgccaaaagggagcgatggaattagcgaaggacctgcacaatgtgagggaacgcggcacggaccaaactccaacgggagacggacccaatggcatccgaaaggctggggctgatcccgtgcagaatgttttggacaattacacgctcgaaagtctgacggagggaaaaaggatttgcagggatggcaccaatttggtcaccatgcacgaggcatcctgcaat

SEQ ID NO: 13078 - DNA, 3588 bp, Heterodera glycines
aacaaaagctccaaatccactcgatcaattaaaaattaaaaatgaggataaacccgcaaaatgccgttaaatatcattttaccatagaaaaatacaactttttgtttactaccgtatctcattttttcaaaaaaaaaatatatattctgtatcattgtcgtatattctccagcagcaaccctttcaaaattctcattttccacgccgtttttcaatatttttggctcatttgccaatgtcaccaaatgacatgtcccgcactaattatgctgtagtttctcgttgccgcattggcaaaacgtcggccgttcacaatcagatcggtgccttcaattcgggcatcaatattctgtccgtcaatttggtgccgtactccgtcaatgatcacccagctgttttggctttggccagtttgtgcccgattttctggtccatgactcggttgtcgcgcatttgctcgtgcttcttggctcatgcgtctggcggcatgtgtcctttttgtggtaattagatgttagcaaatttgttaaggaaattgagcaaaaaattgaaaaaaaaggaaaaaaataaataaaaataagcattttttggtgacttttttcacactttttgggatttttatgacttttctgcgctttttgtgactttttgaggcaaaatttgaaatgcatcaaagaaaatgccgaaaaatacaaagaaaattccgaaaaattaaatttcgatcggtgaaaaggcaatgaaacctggatgaaatttttcgtaattgttggaagaatcatttttttttgcctattttagttaactatttataaaattaagtgcctaaaaaccgatctctatttataaaattttattctataattgttaaaatgggctttttttaactttcgcctaatttttcaggacttttttacatttttttcgtgctttttggatttttttgtgactttttttccatttttcgtgaattttttgcgtttcttatgacttttttgtgactttttggcgattttttgtgacttttttagtcgactttttgaagattttcagtgacttaaattcccagccctaataattaatatttgcctatttttgtgaaattcgatgcccataaatacacattaatattcctcaccttgggcagatttgattgtaataaactttcttttctgccctatattttagtaaagaattttcgcaaaaaaaaaacagtcaaaacgaactcaaaatttttaaatttttattaaaaaatttcattattaattgaatttttctggctttttttttataaatttgaaaaaaataacttattgaaaccggagtaaatcttttttttcacttttttttcattttaatacattttctttgaattaattcataaataaatccccacatttgtgcctctgcttctgtttgtacacgttgcgcagttgtcaagtgttgttgcacaatattatttgcatttgtcaagtggtgttgcacaatattgtgcacatttggccaagaatgttgcacaatattgtgcacatttggccaagaatgttgcacaatattgtgcacatttggccaagaatgttgcacaacattatttgcatttgtcaagtggtgttgcacaacattgtgcacatttggccaagaatgttgcacaacattatttgcatttgtcaagtggtgttgcacaacattgtgtacatctggccatggctgctacaaaagggttgtacagaatagtgatgctcgagagtcttgatgtcatctggccacgactcgactcgtggaaaaggtctcctgcctggtttttgggatctcgttccgaggctcggggccaattcttgaaccgagaaaagttctcctagcttttttgggtcctgtcctccattgaactctgcgttaagtctcggcctcaactcgcgaaaaaaattcttgttttctgggggtctgggtatacggtgctgggacgttagtcaaaaaccatcaaaatggaaaatttttgacagaaaattattcataatttcgttcaaaatagatcaaattttataatcttgatatttttcgataccactgcaaaatttttaaaaaattcttttagtttaaaaaaaagttatgacctgagaagctcaaaaaactaagttttttttgaacatttttagagtcttgagctcgagcccacatctcgagcattttgggtctcggtctaatatcaagtgtctccaggaagactcggtctcgagtcccgactggagaaaagtcaggggttttttaatgcattgtatcgagtcttaggattgcgggtaatggaaatttcagtctcgagcatcaccagtacatttggccatgggccgctgtaatgaattggagtccgacacactgggcaagagttatagggcaacctttaaaatctttcaaatataaattttttgttttaaaatttaccaaggtgcgaggcattgctggtggaacacatgctaaattcggttatttcatttacaaaatgcaaattttgtaaaaatttattgaatttttcccggttaagtcaaattctaaatttgaaaaattcgatctcgagtctagactcgagaaagacttgggattttgctgtagttttcgaaatagtgaaaatttcagtctcgaacatcacttgttagtagtagagatcggaccggtcggttttttttaggtttttttcggtttcgggtttttcggttttttaaccgaaaccgaccgaccgaccctcttgtccggtctctagttagtagggctataaattatatgctttttgcatattttttctgcgcatatgctatgaagaaaggggctcaaaaatagcatttctacgttaaaattttttgatttggtgaaggtttttagtgcatataaaagcatattttgggagttttcgagaataaatgcatattttgtcatttttgcgtttttagagcatatttcggtcatttttggcaaattttcataaagaaaaatgcaataaaaacgaaacatacaccactaaggatcgacattttgggaattaaaaaatgtacgcttggaaatcgaaaaattttgaactttttgcagaattttgaaaaaaaaattttttgatacaaaagatacaaaaaaaaagtcgctgacccacaaaatgtccagcccacgaaatgtccaagtctcgaatttgagttttttattattcagatgggcctaaggttaggcaaggggtaatataaagggtatattcgtattcagcgaccccgaaaaccctaaaaatcctaaattagactcattttgtttttataaattttgaaaaattttggacatttcgtggcttggacactttgtgggggtgccaaaaaagtaattttgtttgagcataaaataaaaattcaaaattgcatatgtaaattttgaaattcaaaattttttacaattgtctaaaaaagctccttagtcattgttttagggtttttaaagtcaattctgaattgttacacaatttttggcattttttgatcgttaaaagccatgtttggcagtttttaatgcatattttagtgcatatttgggcatttttcgggtttttagggcatatttgaggga

SEQ ID NO: 13079 - DNA, 1177 bp, Heterodera glycines
  unsure (1)..(1177): unsure at all n locations
tttttcagtaccaggtccaggtccccgtacactctaaatttaacactacaaaatcagtgccaaaaaggaaaaagananccgcgaaaagaatgggaggaaggctttaaaggaatacataaatctgtgaatgttttttaaaatttattttgatgataatgagtttttgtattttattataagctatattataatatattttacaaatttaacaaaattatggcccatttttgccacatttaattggttaattgatttttattgtaaataaatttgtacaaaattcattttctctatccaattcttctttgctgaggcttcactcaggctaataaacatccgatttttttgctgtgtattttatcgaatttttaaaatcaatttcataaaaattcgtggatttcatctgctgatttgggcgctggtaaattaattattttttgaaattttttttctaaataatgatttttttatttgccattttctcggaatttcaaaaaaaaagtgttgtgcttgggtcaatctcatccagagaaatcagtagatttttgaagtcgcggtcttgagtcatttctagagactgacttttgaggcatatgcctttttttgagcacgagtttcgatatattgagcataaaaaactcagtttccacttggtttgaggcttctacgttgacttttattatgcctttttttttgcctttttcgggatttcgtgccttaaatgccttttttggcattttgccgctttggtgcctttttggcgtttttttccgaaaaattccataaaaatgcaataaaatcgggaaaatacaccaagactttaaaaaattaagaaaatacacccctaaaattgaaaaattttctcaaaaattgatcgccaaaatttcatttttttcttgataaaaattttaggtttaaaaattttccttattcaaaaaataaaaaatttagtaatcatttaaatgaccaaaattaagtttttcattaagttttacgtgttttgatcctaaaagtgcttaaaaaaaatttaaatgccttttttcatgcctttttcgtgattttcgtgccttttcatgacttttttttcaattttttggtgcctattatagtgcctttttcgcgatttttggtgccgttttagtcggtctctagtcattaaaccattaaatgtatttaa

SEQ ID NO: 13080 - DNA, 2371 bp, Heterodera glycines
attcagcgacctcgaaaacccataaaaatatagttttccttgtaatttatgaatttcaaatttatgttcgaattcggaattttgaaaaataaatgccatattcgtgatcagcgcctcaaattaccctagaaatgactttatttgaaaatttcaggggggggggtcacaaaacagaaaattacccaaaattttttacgggacgggatcccgcgcgggatcccgtcccacgccggtccctactatttattcattgtcgagcaaaaaaacaaaccaaaaaatttactagttaaatcgatgatgctcaacacgaaagcattgttaaaattgatttgagaggatttgctttgtggcttaaatctattaaataatgagtaagaaagaacaaaatacaatagaaaccaaggcgagaatcgacatggtgaaaaagaggggggggggggggggatgacagctcgaagatgaaccccgctccggacgaccacctgctctcgattcggacgacttggagcagcacgttcagcagcatccgtgttctagttcgcgccaacttgcagcagagttcggggtccatcagacaacagtgctcaattacctccatcagctcggcttcatcaacaaaaagggtgccgaagttccccatgcactgacccaacaacaaaagcatcagcgagtggtcacctgcactgaacttctcgcccgtttgagtgctggaatgcagctttcccagctgatcacgtgtgatgagaagtgggtttatctcaacaacaaaacggcacaaaaacaatggctgaagccaaacgaattgggcgagccgacccccaggcgtcttcaacatgcaccgaaggtattgctgtgcgtctggtggtgttcatcagggttggcgcgctatgaacttgttccggctgggcaaaccatcaacgccgacatctaccagcaacaactgcagcgggttcatgaccaaattcgtcgtcctccattttctgcaaaattccgcggcggcgtattccttctccatgacaatgcacgcccacatgttgcgttctcaacgcaacaaaaaattgagcaacttcgatgggcggttcttcctcatccaccatacagcccagacatcagcccgtgtgactactatctgtttcgatctatggagcacttcttgagagggaaagaatttgctgatcaaaacgaggtcgaaaatgcattggatgacttttttggatcgaaaaatgatcagttttataaaaaggggattgaaatttgcccgaacgatgggggaggatcattgatcaaaatgtacatcattgattgaacatttgttttttgtgaaataaaaaattgtttaatgttgaagtgcttaaagggtcagaactttttcatcaacccaatagttaatgcatcactgttttataaatagttgatcatcacaatataaatttctgtaaatgacataatttctcattttattgatcctcgaacgggggctcacacgcagactattgagaggctttggagggctgcaaaaacacggaataaggcccaaagtggaacgcattttaattgaaaataaatttttattttttgctcaatatacactgtgttaatttaaaataaagacaccctgttttttgggagtttgaccacttcccatgaaccgatcgagctgaatttttaactgtacgtagcaattctgaaaatattaagattctaaaaaggagaaggcgaaatgacgaaggaaaaaaattttatgaattttttcccgaaaaggggtgttaatttaaaatagagacacttgataaaaacgagtcaaatctcaacaactaccaaaaagaaactgataaaacaagctaaataagaaagaacaaatcttttttcacatttctgtttattttgcgtacagaaatatgtcttttggggagagttatgttgaattttctaagttttcaggagaaattaagggccaaaatgcttaaatcgcctctaacaaagggaggacataatcaacaaagcagacaacgtagtaggaggaagagagcaaaacagcaatacaccaaaaacatttatttttctttttctgttcattataagtcctccgccgctcacatgccattgccgctggccgttgttttcaacatgcataacaataataaaaaaaactatttcttacgaaataatcatcaattctcccccaaaaaacaacatttttaatggaaaagtcaccatatttttggcgataaaaatatcatcgaaaataaaaaaataatttacatattatatttcattggatagaggagaatttgaagggaccagggtcgttttgggcgcccgacgttttggcgccgacgatttggcgccgacgttttggcgccgacgtttg

SEQ ID NO: 13081 - DNA, 1765 bp, Heterodera glycines
taaaattcttaaattaggccaattacagactaacaaattaaccatttgtaattatccctaattgtgtctgtgaattcgtcctccatcccgccaaatgggtccgcgcccaatttgactgattgcgccaatgccaaagattacgtgaccgattttggctattttttcgtccgctgggcccatctgatcaccgggtcggtgatccttctgttgcttctcaacatttctgtgtttattgccaagaaacctaatttgccattgcatggaaattttaaagtgaaatatattaaaaataataattaatttcccctaaatttccgattgactttatttagttgcttttgctaaatatgctttttctgtatgctatttttgctttgtcctatctgatcacttccgttcgctatttggtaatttctgtttaactcatgccacaattccttcggtgcccttttcagttcattttcgccactttttccgacccgtgccaatgtttgaccccaatttggctcgcctttttgcttcggatgcccgcttacgtttatttggtcgcttttccattttggaattatggtaaaataatattcaaaaggataaatataattaattttaattctttttttaaggtcgaacgcgttcgagcgacgatttttgtggggaaatacgaaagggaaggcataaaatgcggaattgcatcaccatttttatggttagcaccaaaaaaggaaacttgaataaatattaattatattatccaaaattaattaaataaatattttaaaatacgattttcgatttccctcccctttttcagtggctcttagctgtccttttctgcacttatattatcatcacagcatttgcggacaccgtaaccttctccaaacctttggtctatttgaggtgttttttgtccgtttgcctaccgtattcgtccctttttgttacagtatgaccacttcgtccaatgcgcatgtgacaattcgtctgctctttccgctcgacttctcctacacccttttcttcaccattttcatcatttcctccgcttttgtgcgcttttataaggacgaaatgggcttactcgtgtacaacagagcatacgaaggcattcaattggtaattttgcgttgttttttgacgatgttaattttgacattatggatacaaccaaagaaagtgtcacttttttggaacatggccttagggcttcttgcctcgaaaactctgaattttagaagtccaaagattagtttcgtcttggaatccaagaacacttccgacttttacagtgccaatggaaattttgaagaaacacaacaaacaataaatgaagaagcatccttttgcttacaacataaaaaaattgaataagccaagagaaaaaaaaaggagggaatggggggggggggggataaacccaactttttgaccatccctcgtaattaattaaacatccaatcatttaattaacaataacaataaacaattttttgtttcttttatatgcaatttgtttgtccattctttcgcatttcatctgatcatttggattatgtgcttgctgatcgccaccatttgctcgtaattttgttccaccatttccctgttgatcagctttagtgctcttttattgtccattttggcaatgaatggtattgtgcggaaagtgaatcgaagtcggtctgtcgctgtgctgaaatcgtccgactttttgccgcctatggagagattcgccaaacaaagttcaacaaattcggacacctgc

SEQ ID NO: 13082 - DNA, 4713 bp, Heterodera glycines
cacctcacaagtaatgccatggcaaaaagcttattctatcaataatatgcttaaatcataaaatatataaaaaaatacaattgtgaataataaaagtgcaatgcattgaatgggtaaaatatattgatggattttttgcctccaaataatatttaaaaataatatatttaaaataattattaattaattaaaatcatttgttccgtactgaaatgacccgcctcttctgatcacccacatcgatacttttgacacttcatcacagcacctttagctttgttgcatttttttaaacaaaggcaataaaaaaatgcatggtttaaaattaaaattaaactatcgtttttgattttgaaaagctcctgctggttaaaggagataatttagcagaagataggtcaacaatttgccttgtgcggtcggggggggcgaatctgtgcaatttcattttgccggtaaaatatttttgaatttctaaatttgccttgggcaaaaaagagtgaaaacgaacgatggcaaatggaaagaaagaaaatggttaaaacaggggcaaataatggagagagaaagggccgaatactagtgatgaatattctcaaacaaattatttcattcaaataaaataatgttaaaataattcattgaaaaataattaaattactttattatttattcatgtggaatttgaaagggtaaacccctaaaattcaactcaatcattacggtcactgttctctcaattaattaatacgagataaatgaattaaacggaaattttagggttcttttgggtttcgctacccacatctgaaatctttttaaattttattcgttgttgatcatgaatcagaaaccataaataaaaattttattatttgtttcagagtaacaaaaccaaaaagtaccatttttcatagagcttccactgctgcttattcgccttgttcccattgtgaacttgtaaattttctccccaattaagcccactcaaaaagaaataaattgataattttagacaatttctaaaaatgagttgcaactcaaagccatcggccgaatgtttggccgatcggatgaagcgtgtgttgagcaccggcgaagacgcggacgttcagtttttggtcggaaaagacgacaacaaagaggcgagcttattcagctgcaattaattatttgatttaattgggggattaattgttttaaatcaaattttaatgttaattaggtgatttaatgtaagttttgaatttttgtaagcttttgtcagctcataaactgattttgaaaatggcttccgaagtgttcgccgaaatgtttcgctgtgacgacacggaggacgaaagtggtgatgaaaattcaaaataaattttaaatttttactattttaaatttaaatacaacaataattcattttagcggcttgggaagtgattaacagcagcaacccaattgtggtctccgatgttgaggtggtgccattcaaaataatgctcagttacatttacacggaccaatcgcacggaattaacggagacaatgcaattgcggtgcttcacgcgggtcaaactaattaattttttaataatcaattaatttttttttttgaaatttagcaaaaaagtatcgcgtgaatgggttggtcaaactttgcaccaatgttaccatttcggaactgtccgacgtattttttgcgttagctcaagcgaaactcctcgaagatgaggtgctggcctaaaattgagaaaatatttatcttttagtaacattccaatattttagttttgtcaactttccaaatatttcaatattattttagcaatttgccaaaatttaaacattttaatttagcaatttgccactcgctgtttgatttacattgatcacaatgcccacattttattcgaacagtccgaccaatttttgaaaattgaccaaaaattgttgtgcgaaatttttggccgtgatcagctgaaagtcattggagaaatgggcatttggaaaactgtaaaatataataatttattattttttaataataaatagagttgtgcgggaccggaaaattttgccgggaccgggacttgcctggacctgataagccgggaccgggatctcgattttggtcccggaccgggaaccgggaatttttaaaaattcaaaaagaattcaaattctaatttatttcaaataaaaataatacaaaattgatttaataaatcattttttaggctctcctttgggccgatgagaaatgccgtcagaatggcattgactgctcgggagacaatcgtcgtgccgtgcttggccctgctctgttccaaattcgttttccactcatccccaaagaggacttttcggaacaaattggtaagcattttaaatactttcatttaattaattgatttgttttttagtgccttccggcgttttgacaaatgacgaaatgtttgccgttttgctgtaccattcgagtcgcgaaattgcaacagaatgccaagctccgtccgagctcaaatttgccaccattcggcgcaattacatttgcaagcggacttttttggtgaaaattgaacagttttctgcgcttccacgtgcctccgataagaattacgagccaattgacagcgccgtggtggacatcaaagggatccgatggcaattggactattcgttttttttattccaagtgaacaaaaaatccggttactttcgcctttctctcacgtgcaaccaaaatgagaaaggtaatactcagctgagaaatcttaaagtgattaattgcgcaattactaacacaattaagctgccgattggaagtgccattgttggacaatcacacgaacaatggcacaacaaaaaacgggcaaaaaatgcgttgtctgggagagagatgacatttttcgtcgctgcaggccagacttaacatttaccagctttttgatggatcggaaggtagtcatgggatttgcttgttaactttcattaattttcaaatttattttcattacttttgttaaaaataattcaaatatttcataataatatttggcacgaagccaaagcgagaacatttattgggtttaatttttctaaaaaatgtttaaatttgtcttcaaattattctcctgttaataatccagaaaaaggatttttcaaattttctataaaatatttttaaaaattttttttcaaaatcaacaaattttcgtatataattattttaatatttcaaaattgttcattattttgtcttgagatttgaaatttttgccagtattttaattaatttttctttaacaaattttggcaatttgaaatttaatttttaatatgctaaaaagtcactttagattatttctcttgtaaaatgttaatttcaaaaaaaagtaaaaaaaaaacattgatgctaaaactttgttaataatttggcaccataaaatggtaaaaaatgatttagcaattgatggacccggccaacggtttgtacaatgcggaggaggacacggtgaccattgccatagactttatcacttacgaagcagacaaatgagctgaatgaaacagacgcaattcattggtcgtcgcgtggaaatgataaataattatttggctaattaattttggatgcaattttcattaatggtaatatttgagcaaaacaatgaataatctcaataagcaattatcaacggattaaatgaactttttcaaaatttgatagtgcaatattgatgttaagctaataacaattcaatttgctactttgtatcctgttgttttaaggttgagaattaatcttaaaaaatcttggggtcaaaccagggctgggcgtaactggattttcaattacggaaatccgtaattcgtaattacggcgattttttcaattacggccatccgtaatccgtcatgacgggggtcaaaaaacccagtaattttccggaatctgtaacccgtaattttcaaattttattttcaaaagtttaataattttttaagcaatttaaaagcatattaaaaagatttggcgtgaccgaaagtgcggatagacaccgcagaggaaaattttgaagatttaagtgcaatttgtaaaaaaatttgcgttaagataggttaaaacattaattttgtcaaaaaggtaatttaaaaaaaagttattttaacatttttctggaaaatttattagcaaaaatacaataaaaaagaaaaatacgcccctaaaattcaacccaaaaatttcaaaaaacacactcctaataattaaaaattttctcaaaaattcattcatttatttttctttacaaggagtttttaaaaaatatgtgtcccaatactgattccgcttaattttgttgcttttggataaaattttacggcataaatagggtcggtaatgcccggcggggatgggaccgcaaatgtacgacactcaaatgtccggaacacaaatgtacggggcgcaaaagtggggtaaccatctttgctatacatttttgtagggttcgagccccgcccccgtcacccccgcccccgccgggggcgggacaggttttttggcctcacccccgtccccgcccccgcgactctgacccccgccatcccccgcccccgtgaccttcgcccccgcgggggcgcgcgggggtgaaaatgtacccctaaaattgacttttcgagaagagtgatgtatagttaattggcgatgatacaaaaatt

SEQ ID NO: 13083 - DNA, 1826 bp, Heterodera glycines
tcatatcatatcccccccccccctcccctcattcgcttcgcttccattttccgtcccaaaaaaaccattccaaattgcgcacctgtgacaaaatgggagcacaaaagcttcctcctcctccctcttccttttcctatgcttctttctttgctgcctgatcagattttgcaaaaaatgtgcccatttttcataaatttctttcatccccaccatttttcattcgctttttaaaaagccattcaaaaagtttaaagtttggtccgcggatttcaaatttatccacctgctgccgctgctggtcctctcctcttttttgcctgtttatttgttgggcattcattcatttcctctgtacacacatccattttgtaaatataaccatttttggtttccatcgaaatttaaagcgttatccaatcgaaaaaagcggaaatttaacccctaaattttcaaataataagccctccccccctcttatttttaaactctctttctctcccgcctttctcctccagttctccccctatcattattatatccagctttattctcggtgcgtggtctgcctgttccctggggcgccctcataaacccctcccggcccaaactgctgcagttaaaatgtgccttgagggtcaaatttcattcgttttcaactttccaaacaattttacatgtggctacggctttttcaattggccattttgcacacggccaaagcattgcatgaatgaatggattttggattgtccattcaccagcagtacgctttccccccgaacaaaattaaaatttctggtgacaacttgtttcagaaaaaaaagatgtcctttcactagagatttctgttaaatttaaaaaattttaagtagaattttaaagagaatcattcatttcccatttttttcttaattttctgcttattagtaaaaaaaaattgggtcgctttacaaaaaagttatggccaaaaaagctcaaaaaattgacttttacttgggctttttggcgccgtatgtcataactttttttagtcttataagtcatcaaagaaaagaaaaaagttatggtttcctaaaagcggaaaccgaattgccccccaccgataaatccccccggctacttggtagtcggacattgctctcaagtccgtaacaaatgtagcgttcgagtgttgttgagtattggcaatgtctgtttataccgcatccctttttcaaatatgtattattatatgtgattattttattaaaaatacaagttaaacattaaaaaaatactattataaatataatatgtctcggacctgaatgccatcgttaattggtgccgacggagagcaatatctgtagggtatagcgccttcgccaggcaccggcacaagttgtggaggacaatctaagttaattttttcctaatatttactgaaaatgaaataatttcataatgaaaatgaatggtatggcactataaatggttttttttcaatttatgatattaaaaagaacgttataacgatttctttaaaaaaatctctattatctatatataaaaaaacggggggggggggggggggggggtttctcggaaatggggccccgcacttggcaatttcggcacctatcgacccatttctttttgctttcggaaactgatctcccgttacaattttctaaccggggcaaagacaacaaaaaaatttgggaactgagatatgcttacctgtttttgttaacttttcaaaaatcggcgcatagcgcctggcggcgcagctgtaagcgtttcggtgctgcttgcgaaaagttgagccatggaatggggagcatttt

SEQ ID NO: 13084 - DNA, 1913 bp, Heterodera glycines
  unsure (1)..(1913): unsure at all n locations
aaatttcagtaagatttgagtctaatttcttttcccaatttcgcattcatattcccccgccccccccccccccctcccgcctgtgtgctgctccctcatcgcacattagccaccccctcgccccctgtcccgtcgtcgctcaccctttcttcatgaaatggcctatgaatgaatgaatagatgaagtgtggtggtctaatgtgtacaattggaccaatccttttttctctctctctctcttttttgaaattattttttaaaaaattattaggatgaattttgcatgttttttctgaaatgtgcgcatttttaatataaaaggtaacggcacccggctgatattcaacccatgcctaaacggctgagctatgggcggaagcggccaaatttggagttttcccatgtgcttcacatttatcccactttctcccatatttttgctaaattctgcttgtaattctactttttctacccccccccccatttgttttgttgctgtctgttgttgttacataatgccaacaacagacattgaaaattttgtgctttctgctttatcttcttcctcatttaaatcatacttcccctgtcccccttccatcgaaataagaagctttgtgctggatgagcgatcagcagcagcagaagcagagcgatggctggcgatttaacatcgaaactgaagcggatggaggggagaggggggggggagggcaaatgcttctttatatgcggagagagggaggggaggggcggtagactgaaaagtacggaaccattggcggtgcaaaaaaatgggggtgcgacaatggggatgttgtgaagtgcgcgagtgtgttgttggttggttggttggtgcggtgcgccatggaattggggctgattttgtttgagattttgaccgaccaagtgaaggaaggcatgcatggatggatggatgatgtgcttttcctccctttgggattcgtttttttaattcaaatttcatttaaattccatccctttgtcggtcattttttgtatgttgccggaatcaatttcctaaatttcttctggattttgattaaaattacgaatcctgtttgagttttgagtgatgattgttgttttaatttaaactaatgtgcttgctttcgatagcctttgataaaaaaaaatttttcaaacgttaaatttcccaaaaaatcccctttgatccggtcccgcttaaccccattttcaataaaccggagtaggcagacatctttaaattcaggttaagaatatcccacaaaggaaagagattctgatcgcttctctctcttcccttctaaaaattatctttcgatactttttcgaatcacttctctctaaaatttccatccgatcacatttcttcctttactttttatgcaaataagcactgatcgctctgatcactcacactctttttctcttccctttcattttgccacaaattttctccatcagctgcacaattttcactctcctttctatctctctatctctcatttcagcaatacaataagcatacataaatctccttgtctatttattgtatgcacaatttttcgtgtcttattattattgttgctccatcccaccgacgctcctcttaaataaatccctttttctcctccttaagtgggcttaaacaacgtgagacgttcaccattttcggatcatctgcagcttttgctgctgctgcgcttgttccagtttcaattatttagaataatgtcatcacacccgtacatccttttatgggaaaaatgaggaaagttgcggaaatttaacaaattttcaattaaaaaaatctaaaaaacgattatttttcatgaatatcttttctttcntttggtcgagttgcttttgtttatccatttaatctcacttttatatgtacaaagctg

SEQ ID NO: 13085 - DNA, 1977 bp, Heterodera glycines
  unsure (1)..(1977): unsure at all n locations
attgttattccgaattttgagacgaaaanatttggggacccttttacacacgatttaaaataacaaaatttaaatccaaattatcaattaccaaccgaacgtgccaataccagtgatttcgtctgcttaatcccttccgctgttacggccttcaaaatcgtaagcagtcgtcgaattgctatatttgtttccgccactttttcatatgcttttgttatgaactcataatcattcgaaactcggaagtacaacaaattataagcctaaggaaaggattaaatttatgaatttaaataatgttttttttcaaactaactatttgcactttttgtccaaattcaaacatttttcgtggaaagggtgacgggaaaagagtgaatggcactatctcagtcacatcgcttctaaaagttttttaatactccctttttaattaattaatagtcattaatttagcagcaaccttcccatgtgttgctttggaagccaaactaatgaaatcttttgggcccagtcaattgcgtcttccaccaatgcttttgtgtccaaatattcattttgtttattttttacgtctgaattattttaaatacgaaaattcgttaatatttaattttcaaaaataaattaatgaccttcattagtctcttttggcgcgttacatttgacaccaataaaaacaaattcgaagagaattaccagcaaaacactgaggcgaatcagttttatggggaacattttattgaaaagcctaaaataaaataaaaaattttaatttcatttaagcatttataattcttttttaattgaaaatcaattatccgataaacaaatgataatatttttgagaaattacgcatataaaaaggatatccgatcggatgcaaaaaagtgaaaacagacggcagaagagcaaagcatgaaaatgtcatgcaaatcataagatttttgtaaattgatcatgaaaatgggacaatctgaaaatcaagaaaaaaaaattgaaaaaattattaaatcaatcagtttaaaaaatagcataattttaaatatataaatttgtacattttaaagtttaaagtagagttgagcgggaccgggaccgggccgggaattcccgttcctctgaggtccggtcccggttcccggtcccggattttgaaaatttatttcccggtttttgtttgtgccaattcgttttatgaaagcatttaatttttccttaagcgacatggtaataaaaaatccaattcaatttttattatgttttcatttctttcatagataaaaaggatattcttatcaattcactttttaaattttaatatgacttccttccaaaatttgatgtccattaacaccagctccgattttccggtaaagaaattcaaattctattttgggttatctcataaatatttgtccctcgttaaaagcatcataaatttattcaaaaaggtttaataaaatttttaaaaattaatgctcgcaaaaataaacacacgttaattgtgttaattgatgccgaaatttgggattttgccgaatggaaactttaatgggaatttattgcttttcaattatcaattagtttatttggtactattagtcaaggttataaaaattaggctaaaaattaaaaatttttgcgttttcccttttcagctttacttggcctaccgtttcgctggtccttcgtccgatttgattgttcccgcactttcggcttttatccccggatattttggggtcattctgaactcattagttgtttttacaacatttagagcaaagtaagaattgatattaaatttacataagctttactaatgttttcataaaaagaaacctgcgcaatggaagtgccaatgttttgatggcattgatttgtctgtccgaagttgggcaccaatgcgggcacattgtattcttagtaatcgtcgcgagtgggataaattttatcggactgtttaaactgag

SEQ ID NO: 13086 - DNA, 1132 bp, Heterodera glycines
gggttgcatttgtgagattttgtcggatgattctgtccgtaatcagtattttttcatcacaactttgctcaattttgcgtgcattgtttgttatgtggccattggagggataataaaatacaaaaaagggggcaagtgccgttaattaattgccaaattttaaatttttgttaaaatttgccaagcttaatttgagtttctcataattcgaaattgatcattcttcgaaaggcaattttccagcaccttctcaaattatgagtaccgagatttctaactcgaaattggttttaatgatcctaatgacccacctgccaactttccagtgaaatttaattacttttaatttgtttttattcgctaattacccatttatccatacttttcagtgaccaaagacacaaacaatcgtctgatgcgttcgctggtgatcattttgttggtcaatgtcggcggctatctgatcaatcggagcgtctatcagttggccttctccttccagcaacagctcggctcttatgtccgcgtttggcaattcactttcatttccggctctctgctgaacatttgctcagccgccaacgcaccgattctttttgtgaacaggtggaaaattagaagaaataatttagcatttttaaaatggcctcaaggttaataaaaatatatatttcgacgatatacagtcatggtcatatgtttaagacaccccaaaaattttttataaatttaaccgtaattttttttactaagatcaaatgtcatatgcgttataccaatcgatagcttattcaatgggttttcgattggtaccaaaaatatgtcaattaatcctctttggccgatatgcgagcagacaaagtgcaacgacccctaattttgggtggtcatatgtttaacacggatcactttatcaatgaatgcgtcaatattttgtgggccaaaaattctgaaaaaattcctgccgttctaacttttgatgctgaccaaaaaagtcttttacagcaacttgatcagatcactccttcatagtgatcgggacacactaaaatacactgaaaatcgggaaaattttagaaaaaaattcctagggggttaggaaattttttttggaaaattttagcaaggccat

SEQ ID NO: 13087 - DNA, 1438 bp, Heterodera glycines
  unsure (1)..(1438): unsure at all n locations
cgaaatcatttactatgatcagcagcaaaaaataatgctaatgaatggcattggtctgtgaatgcgcttaaatattcctcgtcccgggggacgcctttaacggcatttgaccctccgacgcattaccatcattatcaataaacaaactttgccgacgatcccatgagcttatcttttgctaaacttattctccttttgcctttcgtattgcctatgaggctataatttgacccttccgatatttaccaattcattagttaattaccccacgcaaaaaaacttaattgcatccctccggcgcttatcaattacaaacttttcgtgctgggaatttggatggcatgacttatgtacacacacttctgctgaggattgactaatttggataattaagtaataaatgcgaaaaggcaattattccatgagcagaaggaagtgataagaaaagatcatcagattgtcagcatataccccaccggtatgtgcctttcttataaacaaattaaattaaaattttactcaattgtcttttgaaactataatcatacctaattaataagcatttaaataaaagaaaatcaaaaatcaactcacaagccgcaaaatcattgtcgaacattcgcccaaggccgcataatatccctcgtccgtctgctggccatttttaatccatttgtccgcttaacgattaatttatgcgttttacgtttaatgaattttattgacaaaaattcaattaaaatattaaaaatatataaatgaatattaaattttctctttacctcttccaactctttcgagggcacgtatttctgcagcaaattgttctaattttcggagtcagcttccgcctcgatttactgcggggattttggggggaaattcgaaataaaacacgacaaaacaaaaacacggcgagacaagcgatcggtgaattcgaagaaatgtcaataaagttaaaacctttacttagccaccgaatcacaatgctcctcgtggccagcaccaacactttgctgctcaatcatcgttcgatttgttttgataaaacagaaagaagaaaatgtatgaaattatggcttatatctaagtctgggaaaatggatataaaatcccgaaaatgtggtaaaattgaaaaagtatgcacatgtttttccaaactgagggaatttttttaaatcactaattttacagtaaaatgtctgaatacggaataaaaagtttcattgaaaaaaatacaaataactaaaatttactaatttttagcgaaaaacaatcaaatttttcatttttttctgtttttaaatctatgaaaaattaattccatcattattttgaataaattttataaaatgagtttttctatctgaaggngtcatacgaataaaagtttttttgaaaatgtataaatgtagcctttaaagtaagtttgctatga

SEQ ID NO: 13088 - DNA, 1510 bp, Heterodera glycines
  unsure (1)..(1510): unsure at all n locations
aaataatttatgtaatattttctcgattttttatgaaaatttacttntctctcccngagggtcggggagaaaccctattgaaaacatttaaatagcaattttaaatcaatttatgaacaaaaataataaaagaaagaaaatgatttaataaatggaatgaaattgtaaatattggactcgggaatgaaaaaagtgaaacttttgcgacagaaaatcaaaatattttttttttgtaaaaatgttactgcgtcgtaattcaccacttgaagaactcacagtaaagacaaaataagaaaattggaaaattgattttgataaaatacagcaacaattaaatttgggtacggatatttcatcattagtgctgctaatttcatttaaattatttttttcctgggttaaataattatgtttgggaacaaaaatttggacttttatttacatatttatttcaaaaattattaatgtactttttttaaatgttgccctaacaataaagctatttgaccacaaatatatttttaacaaagaaagcagagatactaaaatattaagtttaaaaataaataaaaattattttttatgtttacaaaagccgatcatcaggggcttaaaaaaagaatcaagaccgagatcgaataacgtgaggaaatttgcaaaaatggtactgattgggagagatttgagagtcaatatttcgcctgaaggaatacgctgccgcctttcacttatttttcggcattttctttactgaaaattcaaatttgccttagaaggtgcaaaaaagttccaaaataagaaaaactcataaaaagcatgctaaaatgcttttcaagtcattttaatgccattttgaggtagcagaaaaaacgcatttgacttaaattcccagcactagtaaccatcaaaaaactttagtgaaaattaaaattaatctaatcaattttctgttttccaaatgtcagaaaaagaaaggttggccagcagaaactcgtggagtttcggaaccaaattttgttggtggataaattataaaaaggtcatcggcagatcttcaacaaaattaagtagttttaggaaaacaataaattttaagtaacttaaattctcaatattatgggtttctaataaaaaaatgaaaaatgaaaacattgcttttgaatgtttttttaatattgagaaatttattttctaaaattaaaggcttcatttaccacgttttgtatttgctttttatacaaattaaattgttaaaaagaattatgaaataattttatcttctttttttcttgctccattttgatactttacatgatcgataaattattataaaaagtgatttttcaaaaacgacaagaattaaaaaaacaaattttatttagtaaaatttaaaaaataaacaaattaatcataaatattttttactccattgacacctaacaagggtgccatgtcgttatataaaaaaccatcaaattcggctgatcgacaactcagccgtacaataaaa

SEQ ID NO: 13089 - DNA, 1901 bp, Heterodera glycines
taatcaaaattattttaagtctattgaaaaaattttcgttataatgtttagattttttattttctggtatgattcgatagatttaactgctttctattaacctgcaaagttccaaaaaagttatgaccaagatgtctgaaaacctagttccgtaagtacttttgtccataactttgttgaaacttgatgaatttttttgaaatttagattaactaatagagaactgttagggctatcggaaattatcaagatttaaaaatttggttgatttttatgaaaaattatgcgtagttttttgttgaaacttttcatttgatggtttttattcaacggcccttactgatggtttttatataacgactcagcaccctatgaaggattttcgatattttatatattcaccaaatctttttaattattattttatttgcattaaaacgaaaaataaaaaattgttttctgtctctcacttattaaaaatgattttactttggcaaatcaattacatttagtaacattggtctgagcttctagaagatgcacttttataagcatttgctcatttcggcaccccaaagaccgattatttggaaataattctatgaattaaattttaattcatttgaataatttttcagatttaatgaatttgagagaatttttttaattttttcaatattttttttagtttttttttacgaaaaatgcattaaattttagaaaaaatatttaataacaaaatattcggcttttttacttgtacccattttcacaatttatttctaaataaaaaattttctcccctcgcgcaaattttccaacggacaaatcaattaataggcatcttttggcatcccattttctgtcctccatggcaaatttttttttcacgatacatttttctggtggatttgattagcgagcactttcatttgtacgcaaacattcaaaagatccgaatcactcccccccccaccaatggcactttcttttacccattcattcattcgcaaatataagcctatttattggaccttctcaatttattgagcattaaaaaattggcattgactgaaataaaaaatattgcgcttaatatttttaaggatttattttttctcctgggtaatttcgggcactttatccattgacaaattctgtaattgaccttttttaaaacggttaatttagggaatttaaagcagtttggaattccttcatacttttcgtcaattttcttctttatgatgcataattattttctgttacctcttttgcccctttaccaagacaatgggctcagaataatgcacgaaaaactgagaaacccaattttggacactttgacgcaactgcaaaatgccattggaaaagaaaaagaagcgaggtaaaaatggaaaaaataaaatataatttaataataaaaaagcaaaaataaaattaattaaacatatatttaataataaaaaagcaaaacaaataattaagaaggtatcaaaaaatgaatacgatacagtcgaatggcagaatggaaaacgtggaatcaagcaaaaaatgtagtaatttggtcgtgatggccaacaaaacggggagcaaaatccgagaaaacaattggaaagaaaaaaactaaccaaatgaattggaattaaattttctagaagattttggcgttggagcgcaaaaaaatgtaaaaaaatatataaataaataatgaatagcgccggggagccaaaaatatttgaaaaaattaaaataattgattttaaggcgcaaaaaagtgcttacatcagagaatggcacgacaaatatttggcggacatggaaaaggtgttgggacagaagcgaactcagccgcgaaatctattgacagagcaaaagtataaaagtctaatggaaaaagt

SEQ ID NO: 13090 - DNA, 4810 bp, Heterodera glycines
ttcagagtgatggccatttgtcagatgaatgcgaccacttcggagacattgtggctggccaaaaaccggtaaaatggaaaagaattcgggaattttaatatcccatgaatcttacttaaattctgatgttggtttttacaacagctcctttcccataatctttgaaaaagcattgcaaaaaattaaatagcattagcaaaaaaaaaccaaaatgttttaataaattttttatggtgtcgaaacagatttgaattttgtcctaattttcctaactttttcttttttttctccctttcatagctttcgacttaacggagtcgaactttgcgctgagccagcaaaaatattgcgcaaattattcgaacagagtcagctcagtgcggtcacccctttgttggtggacgagtgcacatgtttgttgttcggaaaggaccccgagcggtgcatccaccaaatggcgaacacgagtgacgcatacgcatggatacagcctatcggtaaatccattttcacgacaaatccatttttggtcacataactcacaaataaaatatgttctatataaatattatatatctgagaggaattataaaataaatagaaattccttttttattttgggtctttttttgagtttataattcgggttggaagttaaacttcgtttttctgatttttaatctttttaaatttataaatttgttttttccgtagcttctgcttgtgagatgacttctgattcaatttctgtcctaacttttattttttagcttttgtcgtcgatagtcgcattttacccgtcgattttgtctccgaattgtcccccaaagactctcggattaaaatgcaaggccaaatggcccaaatgttcgatcggtctttgcggcaaatcccttccacgatggatgcgttggttggacaaatcactcggactttggacgcccatctcaaattgtcaaatggacagtgacatttctgttgacttattgttattttgtttttaaattttgatgagataaatgtattttaagtgtcttttccggggattggtacaaaacccggttataatattaatcataggtccaagactcaaacaaaaactatcaaattttgttgctcatttgtccatgtccccgggtccttttgtctgctttttgttggctttgatttgcttccttttcttaatttctgtctttctctctgttttttatgtttgttttggtccatcccttccaaattgtttctctgcacttttctgctcattacccattcattatttctttttcttcccgcggggtgtctttctccggaaaatgaatgaatggaccgattaatgaatgatgagcaacaattggacagtgtaggggggagtggacaatgaacgaatgaatcagtgaatcgtccgatcgggaggagttgcggggactgagggagggggggggtgagaatggccaagcgaggaatgtttgttgatcaaatgcgacggggggggaacgatctgccgccgattgcccatcccttggccactcccatccctttgttctctctcttccggttccctcctcccccctcccttaattatctcctcttttgctcgtctttcgtcacttcattttccaataaattgggcaagttcggccatttcgcctttttgtgctcatttccgtcgctctttcctcccactgtctgtccgtctctcactttgcctttctctctctctccattctttgccatgtgccgtcgtcctttgcttttaattctttcatttgttgtgctttcggagtattgccgtgccaaaaatgccgaagagaacacgcggcacttggacaatgacctaacgaaacggcaagcaggtcagtacgagaacggcacttgttctgtccctatcaatgcccccccctccctcccgcacttaccgtaccccaaacataccgtacctgccaactttgaatccattcttttcatttcttccaattccgtttcccatttttaggattcggtgttccttctgcgtaagctccccccgcccctctccgaattcattttccgttgcttttcagttacggtccgtgtgcccctgcccatggcccagtcggatggtactgaaaatggcaaaaaaaattttggtagtttgtctttaaagtgcgccacccattgctgctttgccgcccccgcctcttgctcccgtgccgcctcctcctccggcgcctgccggacgactgatccctcaggcaatttgtcctctgggcattaaataattcaatgcgtccccatttcattgaaggcattgcctggcgccccttgtgagcccggcgtggaatgcaccggggggagtgtgtgctccatgggcatctgtgagtgcctccatacttttcttcccttatatgccttcccaaggtctgtgtccgcctgaactcgttcaggaaggcaccgtttgcgtgtcgcgcaccatttacggggtcgtcccgccaccgggcggtccgccgccactcccagcggcacccgcctatgctccgccgcctcctgccccggttgtccaattcgcaccagcgccattcccgtcgtccggtgtccccgcctttccaatggcagccgcacctccgccactccccgcatgtccaccgccattccgcgcagcgtgcgtcgccaggcgaagtgcgaaggatgggatgaccggctctaatccatgaggtgggccggcccttccggggaacaaaattggaaataaaatttggggagagtacctccaatctttgatgaaagaccaaaattgacatggatgaggcgaacctaagccctcaatccgttgattgttccccgagaattgggctaattgattccagcggagccacgaagtgaaacaaaggaaacgaaaaagatcaaaatggcaacgaaatcggaaaaacggccctttccttctaaaaaccacacaattccaccactgccagcaccacaacagcaacagcagcaacaacccgaggaggaggacattctgtacgcgctgaccgacgacgacccgaacccaaccaattcaaattccattgaacagtcggtggaatggagcacgaagagacggcggtgaccaaccaccgaaaggaatttgttgttgtattgttgcgctgcttgttccctctcttacccatttcattttgtgatcattttttcaaaattacttatatttcatccaaataaataaaattattaattgttaatttttcataatgcattttgaagttttggggtgtccagatcacaatgaagaagagatcagaaattgatgtaaaagactttttattagagatcggcctgtacctggatccaggcctgtatttttcctggatccaggtacaggtacaggccatttttagaatttagtacaggtacaggtacagctaaacacgaaaaaacctgtattttcctgtacttttctacaggaaatacaggtacagaatacaggtacaggccaatcgggaaatacaggtacaggttcaggtacaggcttttttcaaaattccgatctctaattcgaacacaaaaaaataaattttaacattaattcgaatatatttaagagtcaaaatgccaaacaaaagtgtgacaaacagttcaaaaatcaggtttatcctccaaattttacgatgaagttaaatttttaaatgaaaatagtcatttttcatttgtagattatctagtgaaaatttgaataccatatttgacaaactcattaaaacaaaactaatacgaatcagagtacaaattgggtggtctttcaagtgtacactgccaagatagccatttttaaatatgttttcggtggataatggagaaaataataaagatttactttacaatcacctgctgctgtttaataacatatgcaaatattctcaaataaaaaatttaattaaaaacgcattgacattcaaaacgttaaatgcgtcagtggttttttcagcattttttttacgacgaaaattgggtgacatggcaaataattatgaataaaaaatggttaatgatgtgttattaaaatatatcgaagaatgcatttgtaaacatcacaagccctaattacccgatgaaatatgggataaattgttttcattatttaagaaaaagatttgtgtaatttattttgaaaaataagaaaaatttaaaatcacagtaataaattcgaatttttgtatatttttactgttggatttaaaaaatcttaaaagctgaaaatttacgcttcaaaataggctaattttttaggatattgtatatccaaaagaaaattccgcaaatttatataatttcagagtctcatatgagaattgtataaaatttttataaatatgtaaattccttttattacacattaaacactcatttttgtaaaataaaatataatttttcgtatttaattagtcaaaatccgtaattttttagaaatgtcacgcctttctattttcgttattttcaatttattttttctcatccttgcgacattttgatcataaggggtaccatcggtttggccagcacaaaactctcgcaaagatgaaatcattcattcaaagtttgactaataatcgctagtgaaaccaacaaaaatgctaaaaattcatttttaaaaatttcaaagaaatttgatttatcatataatattcaggaaatttgttggcgttttacatgaaaggttcctggaaatttaagttgtttaggtttcatatatatttactttattgctctaacagcaaaaaaagcatgctaaaacttttttgaattaacaaatataaattaagaaatttatttatttttttac

SEQ ID NO: 13091 - DNA, 942 bp, Heterodera glycines
gaaaattactaccgaacacttacaagtgaaacatttgttcacctcgactgttgtccttacatggatgcggtgggttttgatcaatttacagcaataatactttctcaattttttatcggcataaacgtcattagaatgaatttaaaaagacattttgtagttagccgatttttctttaaggtaattcaaaaaataaacgacgaaagaagcatcgttcagcgcttcttacattacagcactttgcccaagattgaacagctttgttcagaacttttggttaacgaacagctggagaaaatcagtctgatgtccagggaagttgtgcaacgggaaatgatgcacggtgagttggcaataagaggagagaattgacttggccaaacacagtttcaatttccattttcagaccttcagaacatgtacattctgttgaaacctttgagcaacgccttgccagttttgatgcaagaattcgaaatttatattcaaaagtcggggatgaactgcatggagatgacaatcaacgaacctgccgaatttgtgtccaacattcagttgctgcacgaaaagttcacgcagatgatcagcaccattttcaatggggacaatgaatttgttgccggattggaacgtgccatccaatcggtggtaaaccaccgagacgatccaaaacagccaccaaaaatttcggaaaaattaaaccgctacattgactcgttaatgcgtaccaacagcaaaaggggaaagagtgagcaggaacttgacgcacttttgtcaaaggctattctcatctttcgcttcattgacgacaaggacttgttccagaaattctactcaaaaatgctctcaaatcgtttggtattcgaaattaaattgccatgatttgttaaaccaatatattttgttcagatagcgaatttgtccttctccatggacttggaa

SEQ ID NO: 13092 - DNA, 3989 bp, Heterodera glycines
  unsure (1)..(3989): unsure at all n locations
ggtcacaaaagcaccaccgttcctcatcgatgttcgatcagaaatgttctcttacatcaaatgccaacggattgccaaattctcataagaaaataaagtaagatttatttgcagggatgcaaatttttttttcaaaataaggtcaaactaggttaaacctaagattttgaccccaaaaattaagatttttttaataacggatttttacatagtagaaacaattaaaaagcattattggctgttgtaaaataaactcaatttgcatttaaaatatcagcgaaataatcattaagcacaaaaaatttaaaaagtttaggagaagcctgaaaataagaaaaatcttacaattaggaataaagttaagagatttcaagaatgaaaattttgtagcattttttggaaaacgaaaaaacttactaattcatcataaaattaaatcgctgtaaatttaaaaatgtttcattgaattttcttacaaaaatttttcacaaaaatttttctaacaataagattttttcatgaaagtttaagtttaaaaattaaaaataaaattcggcgaatattaatgtaagcaacaaaatcacttcaatagggaaatggtctgatatcattcggactcccaaattctcttaatttaaaaaattgagtcaaaaacactcaaaactaataaatttttaacaaaaaagtaactaatataaccaaaaaggggacaggacaaaaatttcgccaccgaaatttcgccgcaaaaatattaaaaaatagatttaaaaattttttaagaaaaaaatcttagaaattcctatttagaaaaatttttcagtgattttttttacaaaaaatcgctaaaaaagtttatacaaaaaaaaattctcaaagattttttcttgaaatttgaataaatttaaaaaaagatttctttggtgaaattatgttccggcaaaattttggggtgcacccaccaaaagatgctaggtgaataatacttattgttaggaaaaaaatcaaaataattaaccaccggtcgggcggacccgaacccatgacaaaaggtcaaaaaatgtaagagaaccaaatccataaaaattaacatatttttgctttttctggtcatttttggcgcggagccaaaaaaaccgaaaattggcaatagcaaatcgactattaagcacaaaaaattctctctcctcctgggctatgaccctcccccgcacagtttcactatatcttttaacatgtgaaaattttgaaacaatatacctagtccaatcctacgtcattggagcctggttttgccgctgatcatggtaaaatttaaagcattgaaaatcattcagttgcgatgttcacccgatacagttcatgcgcaaaacgcattggtcgccggccaaacgccgctgcattgacgccaaattttttgagtccgtgaaaatttaagcactcgctgattgattgttttcgtttaggagcaacaatcgcggtgaatggaatttcaatggtaaccatgccaggcggttgttgtgcggacgtggcaatttcaaactggagaacatgttcaagagggtgagatcgttggtttttcaatcgaatcgctcccaaaatttgtttagtttttctccattgccccgcaatttcatcgagcacaatcggactgtgaggctctgttgcaagtttgcctctcctacggcatggattttgtgaaatttgttgaccgaaattgttcatctttccccgactgcttctacacctcctccaaaaagactcacaatcagacttgatttttgattatttaaaatttaaatactgacatttcatctcgttttgtattatggacatgatgctgcttaaccgttcagattgcaccgtttaaatacagacgggtttttgttttgttcttccacgcttatttgctgcttatatatttattattattaaaatagaaatacatatatttttgttttccattagttgatataaaatattcagatatctttcacacttacaaataataaccataagatcgaattaaagcggggggcgtgtggtgtaaggatgtgtcatattgagacctatattttcatggattttgagacaacgggactttttgacgacggccacaacaacccgttgaccaaccccaatcggtccaatgagacggccagagaacgtgcccagaggttggacaacctcatcaagtcaggtgagagaagagattgggctgaaccgcttgaattgacaatgaatcattatgccaacagatggaaatcgctttcctaaaatcacggaaatggcttatatgtcggtgccgcgggtgttgttccttgagggaacggagcaaatgtccgcgcgccatttgtcatcgatgtcgcaagacggcgaagaaagcattgagccggtgcaggtcgttacgaatgtacacgtgcgacagctgaatccgcagcttaatgacaaggagcggttcaagtacgaggaattgcaacggaaagtgccaagtgagtcgtaggttttagcccttccttcagctgtttgttgcccaggcgtgcttctcaaacaatccgatttgacatgcaaatgcactttcgctcaggaatggcccggagtcgtccacctgcttcagactgttccaaaaccagcctgtctggttgcgcacaatggtctcaactttgacttccgaattctgtgccacgagttgcgcaagagcgacctgttccgtacccatccgatcccagaacaggtgacgcttaaaattgattgggttttctggttacaattgttgttcaaccaggtttatttcctcgacacgctttcctgcttttacgaactcgagaaggagtacaaccgcgagatagaattaacgatggaaaatgttgattggactcttggtgggtcactcacacgatggcaccaattttggctttccaattccagttttgtcccaattccaaccgaacagcgaaactgtcgttgcaactgccgagatagaggaaactgtacaacaaaatggcactgcttctgagggaacacaaaattccaatggtcacaaaagcaccactgttcttcatcgattgttcgatcagaaatgttctcttacatcaaatgccaacggattgccaaattctcataagaaaataaagtaagatttatttgcagggatgcaaattttttttttcaaaataaggtcaaactaggttaaacctaagattttgaccccaaaaataagatttttttaataacggatttttacatagtagaaacaattaaaaagcattattggctgttgtaaaataaactcaatttgcatttaaaatatcagcgaaataatcattaagcacaaaaaatttaaaaagtttaggagaagcctgaaaataagaaaaatcttacaattaggaataaagttaagaaatttcaagaatgaaaattttgtagcattttttggaaaacgaaaaaacttactaattcatcataaaattaaatcgctgtaaatttaaaaatgtttcattgaattttcttacaaaaatttttcacaaaaatttttctaacaataagattttttcatgaaagtttaagtttaaaaattaaaaataaaattcggcgaatattaatgtaagcaacgaaatcacttcaatagggaaatggtctgatatcattcggactcccaaattctcttaatttaaaaaatggagtcaaaaacactcaaaactaataaatttttaacaaaaaagtaactaatataaccaaaaaggggacaggacaaaaatttcgccaccgaaatttcgccgcaaaaatattaaaaaatagatttaaaaattttttaagaaaaaaatcttagaaattcctatttagaaaaatttttcagtgattttttttttttttacaaaaaatcgctaaaaaatttttatacaaaaaaaaattctcaaagattttttcttgaaatttgaatanatttanaaaaaaaatttctttggcgaaattatgtccccggcaaattttgg

SEQ ID NO: 13093 - DNA, 1350 bp, Heterodera glycines
gaaccaaaaataatctaaaaaatattataaatttattttatttcattaaaatattgtatattcttttttaatgcaaaagttattcttttaaagaaagaaaaattcattttactatttatttggagagctttaggctggcttttacactgcttttgtcggcactttttacataataccattttaagaatttgagaaatttggaacaaaaatttatagagaattacagagggaatttttacgtgctaaaaaatgctgaaatatgtgcgaaaaattccagaaaatgccaaaatatgtgttaaaaattgaaaaatgaaatgtgtgtattattgcataaaaaattccaaaaattctcattctttttcattttagcccgcataatcgcaaatcaaacaaaaaattattttagaatcatatttaaaaaatgtattttgttggtgccaaaaatggaattaaaaattgttttttttaaaccatttcttcacagcttaacaatcagtggcttcactctctgcattaaaatgtgtgctgcttgttcttcatgcgaaaagctgagcagtttttctgcaatttcttcaccccaaaaattgtgtccaccgccttcttggctcggctttagcacataattagccgggtttttaattgcctcctaaaatatatattgcaccaaaaattattcctaaaaagtaaaattgttttaaataaaatattaggccatttagaaaattgagtgccgtcatttagggaaaacaatcgctctcgggccaagtagccagggggagggggaatttccgccccctgaaatgtaaaactaaatttttttcaataaaatggattttttttggaaatacgaagaaatattcctgacatattggattaatatccaaacaaaaaaaatttcccatcagtgcctatcggcaccggcggaccccattttaccatgttatttgcgaaatttcaccccaaaaaatggcaaaaattgatttcatttcccccattaacggctacaaattcctttttttctccaagtcgacgaaaattttgaattacaatgggaatttttttttggaatttttggcccaaagaaaagtcttcatattcagccctcagaattttttttctggctacaggcctgagtgccattggtggaacttaaatttgtgagcaaaatgaccccccccccctttttttcgcggaaattcagtgccattaatgaaatttgaaaaaaaatcgcttctatttttctaaaaaaaaattttagcaccaaaattgggtgttttttgaaaagccatctccacctttgtaacaatttttgttgcattagcacctgaatgaccgctgttgttttatcgt

SEQ ID NO: 13094 - DNA, 1669 bp, Heterodera glycines
  unsure (1)..(1669): unsure at all n locations
tttatacattttgattagttttaattcatttaaattcacatttaaaaatattctgtttaaaatagtatgatacgagtcaactcgccgcagtccaacgccaagtttggcccgtgccgagttgacccggtccaagtttggcccgtgtctgagtgtggcccgttccgagttgacccatcccgagttttggctagtgccgagttggcctgtgccgagttgacccggtccaagtttggcccgtgccgagtttttctcgtgccgaattgggcccgagtttggcccgtgccatgtttggctcatgccaaattaagcaattcccacctgttgtattttcttggtagatgctaaatcttgtgcaactgttggagtgctctgaaaatttgttgtcaatattaaaataaattttcgttttttaatttttatttaattacgattgctttcgatcgttcaacaatacgtcgcgcggtgatcacttgaggtgacggatttgatggaaacaaatttttgaaatgcacaacgccaacagtgtaaatgtcgtccaaacgcagggtaaaatcgtcgtcaagagataatctattaagcatgttttattgtccaaattacagtatctttctaaggcccagaaataaaattttaaaaaaaatacattttaaaatttctccaatatattgctttaaaaaagttttttttttgatttattaattcaattaatgtttttttcttgtgagtttttttttggtagtgttaaattcaaacgcaaaaaaaaataaaaattaaaaaaaaaacaattttttaaaaacaattttaaaaaatatatttttaggatttttgaaatttttctttaaaatttatgttttttaaattttttttcattcaatttgattttttatgcataaaatccttgaaatatccttgtgtatttaagcttttcacaactttttcgcattttcattcttttgctttttggcaattttaaagtgccaacccaaaaataattaaaacaatttttacttttcagcgcattcaaacagactcaaataaatgattttgattttcttttttgatatttcttctattaataggtcaatttggataaattcgtgccaacgactgaatttgttcgacaccattaggacaattgcatttggatcacgataacttttcctgtaaatcaattgattattttgcctagtatttagcaaccccataataatcaattaaaaacgctacaaatttttgagtgctaattaacttccaaaattattttttttaattaatggatgtgtcttattgattatttcccttttttattatcacatttttcatgattttgtgcgattttttcgtttttgaaaatgaaccaattcggagacccttcaaaatccattttacataaaaaaactctacaacaaattatttctatggaattttttaaacccataaattttaccaagagtaatttaaatttgttttttccgggtacgataaccgtttttaccggatganataaaaacctatataattttgtcaaatctatgattcatggcttcaagtccttgaatcacttattttctagatttaaaaaaaaactaaaattgtaaacatagaanaagtnaatatttttcttaaaaagcactaagaactgaacataattttgagtgaccccaataat

SEQ ID NO: 13095 - DNA, 2113 bp, Heterodera glycines
  unsure (1)..(2113): unsure at all n locations
aaaaaaaaattaaaaattaaaaaaaaacaatttttaaaaacaaatttaaaaaaatatatttttaggattttgnaaatttttctttaaaaatttatgttttttaaattttttttcattcaatttgattttttatgcataaaatccttgaaatatccttgtgtattaagcttttcacaactttttcgcattttcattcttttgctttttggcaattttaaagtgccaacccaaaaataattaaaacaatttttacttttcagcgcattcaaacagactcaaataaatgattttgattttcttttttgatatttcttctattaataggtcaatttggataaattcgtgccaacgactgaatttgttcgacaccattaggacaattgcatttggatcacgataacttttcctgtaaatcaattgattattttgcattaatggatgtgtcttattgattatttcccttttttattatcacatttttcatgattttgtgcgattttttcgtttttgaaaatgaaccaattcggagacccttcaaaatccattttacataaaaaaaactctacaacaaattatttctatggaattttttaaacccataaattttaccaagagtaatttaaatttgttttttccgggtacgataaccgtttttaccggatgaaataaaaacctatataattttgtcaaatctatgattcatggcttcaagtccttgaatcacttattttctagatttaaaaaaaactaaaattgtaaacatagaaaaagtaaatattttttttaaaaaaagcactaagaactgaacataattttgagtgaccccaataattttcttgactatttattaccatgcttcataaatgccaatggccatgtgttgttccgacatattgtttggcaaaaatttattcgacattttacgtcctgaaacctccataatgtagcgatgcaattctgtggcccggacagcaaaagctgggccgccataattgcccgaattaaactcaatctgtcaaaaagaaaaaaacaaaaataattaaaaaataattaatttttgttattaaggacgaagttttcgaaaatcaattatgtaaatataataataaaatattgtatataaaataatcgtaaaacaaaatattatacaataataacgctgttaaaatttaaaaaaaaaattgcttttcattattaaggaatagatgaatttataaaatatattaaataaacagaataaaaatagtataaatcatagaaaaatcctcaaaacattacaaaaatataaaaaaaaaatttttaattaaaatttaatttcaaatacatatatttttggcaattatacaatttaaaaaaaaagaatatattgaatttaaaaatcaattatgataataatttttttaattgaatttttaaatttaattgcttaccaaaacaatatatgtgtttactgtacctgtttaagctcatattccacattgtttgtcaatttgtcatcattttgatggaacatgtaatcctaattaaagtctcatttttttaaatttaaaattaagattttttttttgatttttttttagatttttttatttttctgttgtttttattttttttctatattttttttgggttggcagatttttttaatatttattgacattttgtggatgtagtttggctttttctttttttttatttattgatggggtttttaattttttctttatattttaatttttagaatttttaatttgtatatttttaaaaatgagtctttggatttatggcagaccgatcgggccaaaagcaatgtgatcggctgccgaacaatcgactcagattgaacttcctccaaaatgttaagccaagcgcgaacacggccatttgaatgcgcaagcggtttcagcttttcaatcagaaatttgtggtcttgggaaacgcgaaagtacagctcattgaatgcctaagttttattttttttttaattatttatttttttgaaatttttaattactttttgtaaatgaaccgctttcgtaaaaagtcggcgcgggattggtgacgggaacagtgtaaatgacaaaaatttggcggcatcttttctaaaatattt

SEQ ID NO: 13096 - DNA, 1615 bp, Heterodera glycines
gatttgctggtttcgtagttgttttcaaaatgaatcgatattttgcaggagagcgctgacataagagatacattaaatattaggggtagtgtatactcgaaaagtcttggatttttgtatatctcgttctcgggttttcagtctcgtttttcgagaacgagacttttacatctttaatgattggctctttgttaatagcaaaaatatttccacttaaagcctcggggtcaactcacggtctctagtctcggggtcagtttcggtatcgactctcgggactttgggtcttgaacaatagtagagcaatccaactctatgaacgaagtccaggaggttgagagggacggatcggaggcgaaaatttatagccccctttttgctgacaaaaatattcaaattttctttgactaacttttgtctgcgacaattttgtttttgggttcattggagagttaatagctaatctctttttttgggggctgacaaaggagaggtacccaagtgaccatgggacttccgaatgaaactttcagggtaggtagattacccccccctttgtattataaatttttttttatttttgctaaatgaagcttctggccgagatatgaagcttttcctttttgccttttcaatatcattttcaaagaatgtaaagccaatgtgagcgtcggtggcctggtggttgtgccttccatacttttttcttcttctaaagttcaattccccaaccctgtaaataattattttgtttttttttcatatccaaattagtttttaagctttttaatattaataaatttgaacataatatttttttcatttttattttatatgagagaataatttgtctattgacctattttgcttatcagtaagtgttgaaaaattctgtcgttgctactcttctcggtcctctcatctactctcgtcgcattaataatcattgtaaaaatacttcccaaataaatgccaataaatccaacaaacgttattcttttattgcaagaacattatcatggtaaagctccccctcccacccaattaacaccagaggaaaagctgctggcaaaggattttttgaacacattggaattttgtgcaaaacaagggtcagaaattgagactttggaagaccttattgtggatgaattggccgtttttgatcaaaaagaagatcagcaagattttgacgaggaatttgaccttgaagatgatgaaagtgaagatagtgaagggagtttttcctctccagcaagtacagtatgcctttttttcttggatagtttttgcattagagtcatcttcatcgagttatgcgccctccccaaagaaattgtgttccccgcatgttggatttgccgagaaaatcagtgccctacgacatttccgtggcactgaaaacaacataacagcaattgccggccgttcccacattatgacaaaagaaatggctaaattttttgttgacaattttttactgaaagtgatcggcaacaaaaaagctgtagtgttgcttgactcatggcctcaatggaaaacggccattggtggagcagcaccaacaggtccatcatcatcaactgactttgccagggacaacatatgtctcgag

SEQ ID NO: 13097 - DNA, 923 bp, Heterodera glycines
tttgattatttgtgttaagttttcccatccattttactcttcatcctccccctttccccactaataattggctaattgtttttctgactaattgcccttactaatgcaattgcgtctctgtccgatagaatttcggacagtgttctcatgcccagcatatttctcatcgtcgtttgtgccaaaagtcgcgtcgaatggtgcgcattttcaacgttcgccacacttttggaatttgtttgttcaaattgcctccgtttcgttcatttgtccgctaattgcttcttaccttatcgtcgcgttcaaaattcggtagtaaacgacggcgtccaccgaaacagtgacagaatccctaaaatggcacaacgaaatgccaaacattgttttggtcgatgcctcgtcagaatttcttgtggtgggacactgaatgagacggtccgaaggtcgacacgtacaaacgactcaatgcacggcatcacccagaaaagacctttggggcaatggcagcaatttccgtgcatttaatttggcatccaacgctttgccaattccgatcacttccaattgcttacccggccctttggcgcctccgccgatcagtcgccccaatcgaaagatcacagctcgttcgtactccttgactatctgtcaattaatcgcttatttgcaaatggaaattaaaccgaaaatccccggaattgaaaatgttttaaaaggtgccgaaaaagagcggtggcaaaaaacagaacattagatgtcaacaaaaggccatttattggatttgattttgagttccaactttaatgcaaaagcacacggagacggggaaagtgaacagaaggagaagccaagagagaagccaaaacatccattggcacaccatgctggaagtgtcgtcgaaatcggctgcaaaggggggggggggg

SEQ ID NO: 13098 - DNA, 1962 bp, Heterodera glycines
  unsure (1)..(1962): unsure at all n locations
tcattgagacaatgggaattaaaattntcgagaaaaagaaaaccttacgtccgcccgtgggcattgatcgattctttcgaggggtgtccatgtccttgccacttttgacaacactttgtcaatcatccgccatttcgttttgacaattcccctcataaatgtcattcttccgcccactgcctcactttagcaaatatcaatgggttcagcgtgaaacggcgtcccattcgcggccgaccgccggattggctgggccgcggtgtgttcagtgccgaaccgctgataataatcggaatggcaccgcccccggccaactcggggccgagcattgcgacagccgccgcttccttaaagagaaataactatgacttaccaactcgattgatcagatttaatctcagaaaacttttctccttttcctctctgtcttggattatcttttcaatatcaattaatctttcccctgctcctatttaatcactcttccgatcatgcccactttgtctctctctctctctttctctctttgagctctttgatcactcttttatctctcccactctctccgatcacctcccccctctctctctttctctctttgacctctatgatcacttttctcatctcgctcactctctctgaacagtgatcactctttcccttcctctctcgcgttttctctccctctttgtcaccctctcttttcccctgatcacttcgcccttctcgtgcacttcccacatttacgtgctgttgctgctgctggtaaaacatcagcggtgccgtctcttcgccctcttccgcgtattccttcgtttttgcgcggtactgagacggccttttgctggcaaatggagaggaggagggagcagagagtgattcggaaatggaggtggagggcgaggaacagctggacaatgggccaatcgcagcagagtcggagagggagggacgggcgactgaggactgtactgaaatggacggacggggggaagtgaacggaattggaaaaaaggaactaaaagtgaccggaggaagaaatgatcaggagtgatcggaattggaaaagtaagaaagtaagtgaccagaggaagaaatgatcaggagtgatcggaattggaaaagtaagaaagtaagtgaccagaggaagaaatgatcgaaaaagtgaccgaggaggaaaaaaagtgacagaaatggaaaagggattttatgtgaattgtaagaaaagaaaaagaaaaaatggcgatttgtcgtttgcatcattaactaactcattaaatcctcaaaaagttctgccgctttttctgccgtctcaattagtgcccttcccaaaatttgagagccccttacgctgtgccacccgtcgcccttaccgccctcagggaaatgcccccggtaaaaaagtgcggcggaacggctctgcctgatgagcacgggtccgtggctcgtgccgacgatgcggagtgggcctgctgctccctccgcttcttggccacggagtgggtccattttcgagtggtccttttttgttgccccaagtcggtggtcggttttccgtgctcggcagtgagtttaagtaaaagatgggtgcacgccgggcttttccgggaaggacgggggcattttgataaagtctttcggcaatttcgccgtccattggatgcacttttctctcggccaagtccgtccttctgccgtaggtcccattctcacaaacagagggggtggggaagggggtgccgttccagctgcccccggggggggggggacggacttggcaaggcaaagcgttggaccccgcggaccatcggcggatacagatacagacggagtgtttggtagagacacactagagaaggcatatgttggtaccaagtttgcggtcaaatccccaagagaaaaaagagatatccattttttcggcaagaattattttcgtttgcatttcaaatatcatgtgag

SEQ ID NO: 13099 - DNA, 1660 bp, Heterodera glycines
  unsure (1)..(1660): unsure at all n locations
taacgggtaggttaacccttacctcgttcttttggcacgggcccggatggaaataacaaacaaataataaattgggatggatttgtttttgttttcatcgcttttgctttgcctctgttttctgtttgtgtttattggggcggggtggacggaattttccgaaaaccaaaaatctcttcgccacgggcaaataaaaaggccaaaggcgcacaaaaacgacaacaacgcaaagctgcgctttctttttcactttattcattcgttttgattttctttccttttttgcctctcaaatttaaccgattaaaattgcattttttagttttaactaaaattttatcgaaaccgttaattcgcaacgacaaaatgccggcccaatcgccattctttctttggtggctttgtatccgcctgaatttatgaattggcattttaggatgaatgagaacagggagagattctacgagccgggaatgactcaagcggacgtggcgaaggccgcaggtcgccattttaccgttacagaattattatgctgtacagtagcccagaaaaaggaaggcaaaaaccatttattttagtcttaattcttggttccaattcctttataaatcgttttttgggttaacaaatgccatttcgggagggttgcactgggcgtattttcctcaaatagtaaaacattttccaggcgaggaatggcgccgtttgcccgagtcagagaaggccaagtggggacagagatcggcggaggaacgaggacgtcaaggggggcaaggcgagagaagaaaagggcacggatttgggatgattaaaactgtgccattttcagatgtggaggaagaggagcagtaaaacggagaacaaagggagtgaggggggaaaacaaagagaaaacgaaaggaagaaaaccccctttgatccatttaatttgatggcactccaacacattctcatgggcatttcagcctttcttcttaaagaagaccgaaaaataaagcaataaagtcggaaaaaagtttattcggttttttaattcgcaatttttaacaaaaagaaaaaaaattagggattgtaaagcagcacagatattaacgttgtcccaaggctctgtttccgatttacatacaaaagtaaaacaaagaatatttatggaagtaaagaaaatttcctttttaatatttaaaaaatgaattttgaaaatatggaacaaattttccacgtgtatttggctacgcctttttgcagaagcgatgagtgataagggagggggaaatacaaagttgaactccatctcttcatccatccgaaattacaaacaaattatggttagtttgttggatgggcaacaaaattgaaaattcgaaatgtcttacggtgtctattctccccgtttccattatgttttggtcatttggctggtgatgatgtgccgtcttccgtgctttttgtcgccttcgcaatggacgcttcggcgccgaattccttcacgcacagatggcaactccaatccgtctcgggtgcttctttcagcgggggcttcaagcagtacaaatggaagccacggtcgcagtcgtcactttagaaggagaataaaagggaagaaatgcggaattttaccagaataaaagnnttggtcatcattttcggagttccacaa

SEQ ID NO: 13100 - DNA, 2903 bp, Heterodera glycines
  unsure (1)..(2903): unsure at all n locations
tattaataaaattcattgaaaacgctttaaaaaatttccccggcggtgccgccgcaaaaagcgggtgaaaactaaaaataagcggccgcaaattggctcaaaattgcaaaaatagtcttttttgtaaaattccgttaacaaattgaactttaattgccaaaattttccccggcggcgcctatcggcgtttaaaaaatgatttttttgaaaactaataaaaaatataattataatcgtcgaaaaattctgcaaatatctaaagaagatttttaaaaataataatatttgaaacctttataaaaaacgtactttgatttgacggtcacgtagacaagtgacgcatttagcgcaattccgaaaaagcaaatcagcgtaattatcccactaattgcaacttcgaccgacacaaaaccagcctcatcctttgaataaatgaatagtgaatgaaaagattattaattttggcacagcttttattattattgttacctgttgatcagttacatttgatgacataaataattattaatttaattcctcaaaaaataagtgattcattaaaaataatgttactggttgtataaatgtgagaaaaaaaattcgaaactttcctcataattttttcaatggcatttcattataagaaggatttatttctctgatatatgtgaaaacgggcgcattagcttcattcataaatttttgttgaatttatgcttcattggtttttctagccttttattaattaggcaatcaaaatggttcattaggaaagatctggtgcacattttaatttgttttcaaaaggcattaaaagcgcagtaacgttaaaaaagtaacatacagaataaacaaatattcaaaatttgtgttatagagacaaatgaaacaaataaaaatatttatagatataacgtcataaattttttctgttttattttatttaaatttttttttttttgatattggtaataaattagcgccatgaacagtcggttctgtaactgggttaaagcgcttcgcgcttttggagcttcgctacctagatccattaggtcgaattgtctaaaatttaaaatgtaatacagacccatcacggcatcagacgggcgcttcgcgcccgtttctaaatttttcataaaattttaaaagcctttggcaaaaattttaatttattttttttaattaaaaatcgttaaaaatatatatgaaatatacccaatttaaacacattataatttggtaaggtgtcagttgtagaggctaaccaacagttgccagtggagaacactcactggatgcatggtgccaaattattatatttattttgcaaaaaatctataattttagggaccattttgcataccaaaaaatgtttagtttttttattgtcaaattactgtttttcctctcaacttttccttccttccaattcccaaaaaaataattttttcttggtcctaccccattcttacgagtgcttaaaaatctcgtttctcgtgataagtatttttatttaattttttctattttatcaaaacttagcatatattcattaaattaagttaaaaattcgaatatcattcaagtttcccagctaaatgctttatttaccttaatttccttttttatctttgataaatttgatgaaattacattgatttattgggaagtaattaattgggtgaaagcaaaatattaaaaaatagccaaaaaacttctgcgacttttaactggcctttctagcaccgcgcgccataagtgtttaaatttaattcacattgagaaaaagataaaaccaaaaatgacgaagccgaatgcggatcttcttgggagcaaaaatatttaaaaaacataaaaaacttttacctccacttccatcatttacaaatcgtcttaataagtcttatgtgcaattcaatgaaagttgctctatgaaagggatttgcacttggatactggataccgcatcgataacagaatgaatgcaattgctcccgatcatccctaatgcaattgtttttctttcagttgcattcgaaattgaattttattattacggtaaaaatttaatttaatttaactgctattagttcagcccagcaaaagttgttatttatttaaaagtaaatcaaaccaaaaatcaaatgggtaatttctgaaaaataaattaaattaatcattgattacaccctaaagaacgagttttttaagaaaataaaagaaaatgataaaatttcaatattatatggtcttacaattagctaattgctaactgtggctctcttttcggtttttgatttgttgtgattagagaccggaaatttcaaatttgtggatcccgctgcgggattggaactcaaaattcaattacttttatggctttttggaatatatatatttttacattttattttggtcatttgcatattataccatgatgcaaaaaagaattcattttaaatgacctatttaccaaactcacgcttaattaattagtaaaaggaaaaacatttaccataatggccaaccaaatcaccgtaaatgcccaactattgcatctcacgtaaatgtctacgtaaacagtcgcacatatgccctccacaatcagcacatggccaacaatgttgatgaatgcaggataggaattgtcggaatgagtgtgccaagttccaaaatgccatggcataagcaacgaaaatgaaagtgccgctgatttcggtgccgntttgagatgtttcaaccattttcatgaaaattttgtttaaaggaaaattcaaacactaacaaaagctanatataaaataaaataaaatattgccattcggacggaatatttggtttgcaactgtcatttaagctaattttgttagcttttttcgtcgcaaacgcaaataaaatta

SEQ ID NO: 13101 - DNA, 1734 bp, Heterodera glycines
aattcaaaataaaaatcattatttatttacatgcaaaatttaaaaataatgaattggtgaattcttttttttgtgaaataaataaaaattggcagagaacccatttattcacttttaaagcattgaaaaaagaaaaaatactaaaagtgttagagcagcatgtgcaaatctttttaatctgtgtgaaccacaactcatttttggaattgaataaatagcccttcccccctcctctctttttttaattattttcttattcaaataagaagcagctgaaaaaatggttgcttaattaataataattatattttttctatttttagtaaaatacaacacattttctacgaatatgaaccagttaatgagattatcaatgatcaacaagcactttagttctattttcggtaaatttttagctatttttgtcaaaaagtattatttatgttccacatatataaaaaaacacataaaattggataactattataaaagcccaaaatttagaagtataataaaaacaaatatttttctggtgtttacatttattatttttcattcctttcatcaatttcttacagaaatcaaataatttaataaaattagaaatatttcaaataatacttattaagtttatttgaaatttgccgagaaaatttattatattttatttgctttgtgcagaaaagaccaaacaaacaatcttaatttacacttaggcttaaataattcatataaaatatttattttacttcactgatttaaatttgactttctcaaaggagcataaaaaagcattgttttaattttcaatttcaattttttttaaaaatttcggaaggccaattagtgaacgaattcaacaagaaaatcaggacaaagaagcgtactttaaacaattgacctcagcttggggcgacagagcatgaacatgtaatttgaatttttaaagaaacccaagaagatatcatcaaaattgtacagaatgaaatttgattttcttatcgaaaattaatataatttgacatattttttgttcaaatattaatattgatcataattaaataatgaatgattaatattataatattaacaattaagataatgattataccgttcatacaataagaaaacttgggccagatgtaagttaccgtatcattttttattttctgtaatctcttttgccataagttgtgttattttctatgtataaatgggtgccgtaaagcatgcaaatgtgattgtgcaacagaatggccgaaaagccggcaattgtcacaccgaatgagtcactcgctgccacaattgacagactgaactcgcgcagttctttgggggcctaaaaatattcataaaaaaataattaagaatttacattatacaaattcgcataatgccataaaatataaagtcattcctctaatttaaaatgattttttttttgtatagtttagtaaatatttaattgtctctgtttaaaaataatttttatttttaattaaaattaaaaaaatatattttatttaaatatatttttaccgttttgtgaattctgtcgaatgtgttgacatatgaggcacctccaaaaaggccttcagcaaaaatcacagtgaacataacgccaaatgtgcggaatgtaatggaacagcgattggaaataaaaaaccagaatatttccgcactaaaaatgagcaaataattgaattatccctcattaacctaattattattttt

SEQ ID NO: 13102 - DNA, 2523 bp, Heterodera glycines
ttatccttttttattgcgaaatattgattatgacagcacattttaaataaaaattatttatataattttttgtaaaattgagtgtcagcagaatgaaaaatcacaaatgaaaaagaaaatttggatttagtataatataaataaaaattcggatatgggaaaaaaataaatcattaagcagtttggtcaattaaatgaccaattaaaaataaaattaattacaaaaagacattgatgaaaacgaatgaaaggtcgaaaaaaaacatttggacacaaatatcataaacatttattattggaagaaggaaataaaaaatggaaaatcggtggaaaaatgaaaattgctgatcaaaaaagataaaatgtcaaattattattttttaaaataatttacctttttgtgaatcttgtcgaatgtgttcacatatgaggcacctccgagcagaccttcgacaaaaatcacaatgaacacaatgccaatgtgcggaatgtaattgaacagcgattggaaataaaagatcagaatattcccgcactaaaaatgaacaaataatttaattaccctaattagcttaattattattgattgcctggagtacagcaagcagataaagtacataagtgggcagtgcaagcacagtaaccgatgatcgggagatgaacacgcccagctggtaaagtgtttggtaccaacggaattgactggcctcactgagtccgaacccatgggcacagtcgaaatgcagcaattgatgctttaaataatttaaatcaattaatttattttcaaaattaaacaaataattgcttttttgcttaaaaaatatttttggaaaacacttaaaagaattcaattttattataagctaaaattaatttagtaaatgtgaaatcaaacttacaagcccagagttgatcagatattcagcaaaatacacaattcccaatgggaccatcagatgaagcaaaagctaaatgaatttaataattttttatttttttgttattcaaacggacaataatttgacgcattttggaaccaaagttcagttcacttgtaactttcacacttccatcagagatttcgctattattcatctataaaattttaacattaaaaaaatttaaattaaattctgaatgtttttttttctttttacttgtataatccacgttgatgggtttaataattttgttctgtgaacagttggtgaaggagtcagaagcccccaataactaaattttttaaataaaatgaatttcaaaaaaaaattagagtacttccccgaccaattcgtggtaatgagttttcctaattaaccgaaatatttaatattttcttcaacatttttctttctttatcaccccgcaaagacagccaaataaaattttaagatattaaactaaattaaatttttatttttaaaattcaataactgacgcaattgcaaaaatgattggcacaattagcatggaaagtagggcatttcgtggtgacaatccgaacaattttggctctgtaagtgcagcgtatgccactgagccaacaattccggcaccgcccgtgccggatgaccatgccgaaattgttgatctaataatcattaattaattaaacatcataaattcatgaattttacccatatgaatttttttaccgtttgtaatgagatgagagggccagcaagcaattttcgcccaaaccattgcctaatgatgcaaaaataatgccaattaatgacagtgtgaatgattgggaaaatgccacaatgacaaagctgagtgcctgcattatgcacacaagtaaatgtcgaaaactaataaataaattaattaattagcgttagagttaataaattaatgattgataaaaataaaattataaacccaaatggcactcggtcaataataaagggagaaaacaatttgatgataagtgatggaatgatgtcagccaataaaattgcgccagttgatgtgatatgacaacgtggttttggtaaaactggctaaaactcgcatttttttagaaataaaaatatattgtttattgattaaaataaagtattgtcaaaaaaaacattaaaaatattatttaaaatattattgttgctttttttgaattttacctataaatgcttaagattaatattattaatgaatcattaattaattaaaatccctacctaggcacctttcattagtaaaatttcatcactctgatctcttctaaatgaatcagacctcaaaattttatttattaaaagagcagaatattagctaatcataaaattatgttctcattctctgattctttaattagagtgatgaaaatttttaaaaagcatttagtacaatggtttctatttttgtaaattagttatcataaatcatacttgtttatttaaattatatcattaattaatgaagaaaatttaagctaacttttttttaatgattgattttcttacgtaacaaaaaattgcagaagtcgaattttgcgttagattttgatcccatttg

SEQ ID NO: 13103 - DNA, 3294 bp, Heterodera glycines
  unsure (1)..(3294): unsure at all n locations
tttattttnttgggatttttcttacctttaagtcttactcactanggtttaaanantttgnnantnnanttttnntttatttttatttaggaatcggaagatgctgagcttgaatttttgcgaaaagcaaaattggcagatgcagggactgcaacagcgggaatttaaaccatcggagtttttaccgaataccttttccgatgacatcggatcaaacaacagtggattttacgaattgaaggtactttttaaacatttgtttttataccgttatacccatttataaatatataaaggtaaatgaaattttaaataattttgggcacttaacatctttttgggagagatgatgggaaaacaaaggtggatcttttacttatagtttcaaaattttttaaaaataatgttcagtttggtgtaagtttttattttgattggtcaatacaattgtcagattcaacaaatataacacgttttatatttaagtgtctgataactcatcagggacgttcaagcaattcgggtcattatgtcgcgtgggttagggttggagatgacgaccaaaaaccgaacactaccaaatgggtggtctgcgatgacaataatatttcgccagtgtctgaggaggaaattctgaaattgtctggcggcggagattggcattgtaatgacatggaactgattgctttctcacattcacacactttaaggtgcttatgttcttatctacggacccaaaaagattccgaagctttgagagccgaaagacgagtaaaatttgatgttgattgacactattcaagaatttcgacagtgtttttaccaagataaatttgtttattttgagtacactgttgtttttaatgtatattgttaattcgctagaatacatttgatgaaatgcttttagttttctttttctttagcattatgacaataatccgtgattttttgtgccgttcgtcgtaccaatcgttggctcatttgtgccgtaatcaaattcgcgtttattctgtagaaagggagggggcgggcacggcttcgggcattgaacacgcgctcaaattcaacaaagcgggagcagtgcacaaaaaagagttgaaggattacaaatgcgtcgaatatcttcaccaaaataattattccttttatgacaaggaggtgggaaaattacaaaaaatataacggtcaaaatatactaacttaagccttcattgaaaaaaaatacatattcgggttcgaaataatttaatgccatattcatgatcagcgctctctaaaacccttaaagcatcacaaaactgctcaaaaccccctttttgtctctttttgtgggaagtaaagccgatgattaccaaaatgacataaattcctttttaagtgtgagctgcagcaatttcgcgtggtgcaaccgacgaacaaattgcctgacaccgaaccgaagttcaaatcatcttaaaccgattgatttcatgaaaaattttgttttttaattaggaaaataaaataaaactaaaggcaaaattgagagattgttcaattaaacagttaatttaacaaatattttatttttaatatatttttgttagttaaaattttaattacacttgtataatccaactcaaaagatgacgcagaaggaattgaccgccgaattaattgaacaatgggggagggagccgaacgcccatcagaagttgctttttctgaatgaaatgacacagtcatttccgaatggcactttcccactcattggcattgaccgtaaaaaggtgggtaattcgaccggggggcattcgctggtccgatgtttccgtttataatgcgcttttctttcagttgtttttgtcccatctcttcgacacttgggctttggcctctgagcaaattcgtcttcaacaattacactttcttcggattattttgcgcgacaaaaacactgttgatttggactgttacatttccattttaacacttttaagtcgcctggcaaaactatcggctgattattttgaagaatgcaaaagtgaacctatagaaagtaggctttttatttttgtttcccattcaatttcaattttgagttgtgttggagtctgagaaatgtcttatcaatttgctattcaattctgcaaaggctcgagactttttttgcacacagtgagttttctttcaatttgtaacgaattcgtttattttgtgggtttttgaaaaaattggttccctttttgtggttatttacagaaagaaaccgtttgaccgattgatgtcgcgcattcgttctgtcattgccgttttcgacgggtcgaattcgttgtttgttggtttcgactatttgtccgaatggtcattcgttcaagtggaggaattgctgctttatgatttgaaaatagcgttcataacaacggcattagtccaacaacttcgggtggataattcacattgaatgagcttaattgaggccctttcatttttagaatgaatgcgtaaatgacacagacaaaacggtggtttttctcagtgttatcatttgttcgttggacaaaatgtcaccaccaatggccaccaaatgcgtgaatgaggcactgaatacgttgtttaatgtttaccatgacagcaaagtgttcgaattggtcggttcgtttgttggaaattccggaatgattttttattaaaggaaactgcaaaaaaatgtgccgatgaatgcgcgcgaattgtgaagagtgcacatttggacttgggaacaaagcaaaatgcagtcaatttactctcagttttgacttccgctttgccctcgctgtgtccgaaggtttttattttagtttttttttaatttatttttttaaggtcgacacaaaaggagcgtacgaaggatttgctgcaaaggatggatacgacataagttttttagactcctttttgtccgtttttgagcaacaaattgacaatgtatttgttttaaatggtagccgaattaaaaccaattgttaaagtatgagaagaaacaaatcattgccgagtttttgggcactcatctcaccgttctctgccatctctgctcagagcacaaaacagcgaggcgattttgccgggaaaaggttggaattggccaaggcatagcaagaggtcaattgaaagggtgcacttggaaaccccataatgagttcctattttgaaattaaaaaagttggcatacaacaatttagctgaaacgctgtttttggatattcatcgtgcatttagttgacatttttaaattaaaataaatgtggggcctccaaacggaaaagtacc

SEQ ID NO: 13104 - DNA, 3536 bp, Heterodera glycines
tgttgaaccctttcctcattgaattattgaaattatgttattagtttgcgagttgtccatgaccgattaatcaattgaaacgcattcttccccctcccccaagggcaagtttatttcggatgggctcctccaaagagaacgatggactttccgttgccggccgtgcaaaagcggccaatcgcctcgaagtaactgatgcggccaccagacaaaaactgaaacggcacaatctgaggtgggaaatggggggggggcacccaaggatgagtgccattgatgctttgttctttaaatggtgcttttggcattattttcctctcctctcttcagatacactgatctccgtaagtcccttctcttttccctgccattttctgttgatcgtttgactgtcagagctcacccggtcgcttttggttgtcaccacagtgttcattgtcctcaaccttcctaattatgtctatcgcatttccatccaatttttcgttatcagtgaacaggtaaattagtcaaatggcacccaaatgatggaatgtcaaattaccgaggccagcaaatatttcgggactctcgagttcgttaacacttcgtcctttcagatcaacttgagttttgccgcccacgtgctgttgtacacacaccacgccatccttttttacatttacattttcaacagcccacaagtcgttggaatgctaatggtttttgacaatttgtcccaacttttgctcagatgcgcaaaaggcttattccgacggcacttaaactgttggagtgttactgtttgaagccgcggcacctcaacgatttttcggacaatttgttccaatgaatatttatttatttattttggtccattcatttgttgttgttcttccttccgttcgcttcttcgttttgttgaaagtgtcctttacaaaaaatcattccattggcagaaaaaatgaacggatcgccaacacagaaacttaaatgatttatcattaggcaaaatttgaaccaatgaatgagcccaccggccattgcattcggcgcacgcgaaacattgcaagtggaaaacgcactttttgaaagtgtgaccgcggcaaacactgagcacccactcggacgagccgatttggccagcgcacaaatggcaaacaccgccacggccgaagagacggacatctgacaaatgagcaatcagcagaaagggtgacaaatgagcaaattgagagggcggtacaaatgagcaaacaaattcagcaaaatggggaaaggaaaactgacaatgccaagtgcacagacacagcccatctctgaagaagaaatggtcattctgctgatcaacaagacgacattcgcagcaaacgcacttcaatttttgcaaaaatgacccaatcaattgcttcctttttctgtcggtctttaccctgaggcattcttcgtgccaataacggcttatcgcataaaggcaccaatttccagcaattggattttcacattcagcacaaaaaatcatttttaaaaagggatacctaaaaaatgttatcgccaatattgagtcgaatggtcctttttaatcttgctgtcagagaatgtgcgaatttagaaatctagctcaattctcttggtgccgatgggcttatcaattttttcggtctgggaattaaacaaggacatggtttccgaacactgctgtattaagttcaagcaaaacatgcaataaaaaagtacaaattgactaatcttcagcaaattaaacgaacccaaaatgagttcgaatttaaaccaaaatcagggactgtctcatattgagggagggggggggggggggtgtattcgggcacagtccacctagttctgggaccgtccctcaatgccatttaatctcaaccaactaccaagtccaaagagcgtgacgaatggagtttgacaattgtccgtatgattgtaaatcattaaaaagaaaaagtaaatttttaatttgcattctatggagccagttgaccccaaccggagtccctccccattgtcaatcatcgaatagataacaatctcattaaatgccaaaaaataaaactaacaaagatttcccacgggaatggttcttttccaattaatttcaacaaaaacaacaacatttttcgatcatttaaaggtctttcagccacaaaatcccctcgttcattcggcctttcctttgcgcactgtcgctggtttggccttggttttttgcgagcggaggatttgcgaggcgcgtcgctgcgccagcttcgcgtgcgacggtttgtaggcggtcaccgcatttccgacggcagagatcacccggcgactgtctcttgtcaacgctgtgctggcaactgcctgtttgatgttaaacgcaataagacacgtccaatcaatgactagagccaacaataaaccggaaaagtaaattcagcctcacctgcaatggtttcgccacatttttgtgcttctttacactcataaccactcctttgccgtccttcgcagcagaaatgtccaccgcctttttgttgatcattccgttgtgtcgaatgctgttcagacgcgccatgttgaacggctcggtgctgaagtgtttcgggatgccacgctgacgtttgaggaaggcactgtttttgcggatgacttgccactgaaaaaacaaatgataaagcacaaaacaagctgtgtaccgttccttacctgaatgtagctggaggcgttgttgtagtaaaccatttgaatgtctacaatatttcagcacaaaaataattaattatattttaaaaggaaaatattttaaaaatagtaataagaaaaaactttcttaaaacaaaagtccattttgccgcataatttaaaaggaaacaaaataaaataaagcatttggagacaatacataataattattgagcgtttgcatcacttctgttcgtaaatcctatggttcaaaattgcggcacggagaaggatggcattaatcctgtggtcaaactgcttgcgcaatgccataatccttaaaaaaataaataatttaaaaaatgacaaaaatgcgcaccgatcataagtatcggtgcgattgtcagagaatttggcatgaagcactttgttataggaatcaatctttgccttcagttgaccacgctcgataagagtgaccaattccgactccatctaaaaaataggagaaaattcaaatcaaattataaaaatattgcctgttctgcagtcgtcctaaattcaactgccatttgagcgatatcagccgtgaaatatgagtcaaaatattgaatgatggcactttggcgaatagaaatgtaaaggacgttgatgtgaggtgccaaataaatattgagtagaagctaaagaatgaaaaatgaaactaaaagcgaacaaatatgttaaaactcctttttctgttaacaacctggtcacgcaattcgtggagaatgtccaaacaaacgccgaactgacttttacagaatttttgtaataattcgatcagctttggttccgattcgagagatttcctaaacaagttcgatcca

SEQ ID NO: 13105 - DNA, 2626 bp, Heterodera glycines
ttttttataattagccaaaaaccgaccctaagcccaagttgtaacgaaaaatctgtccaaattttaaataaaatttaaaaaacttccacggcggcgtattgtccatcactagtcgtaaatatatcgttttatttaaaattcaaatatttaaccaaaaaagaaaaaattacctcggcaatttaatcgggtttcctatcgagcgccgattgaggaaatgtgggatcaaataaattaaagctcgcttctttcatattttccggacataaatttatcaaattcaataaaattatcaggccataacttaaaagaacaaaatgttgtaatgaaaaatttggactcaaattttgaaaattatgtgggccactcatatctcaaatatctcagaaatttttgaatttttctcaaattttttgtttctccttagaatttatctccaaattttcaaagttttccccgtacaactcgtcattagccaagtctaatcttttctcggttatttgcattgacatgctgtccctgttgatgaaatgtccgtccctttgcgcaaatttaccgtcttttttggtgcgtttccctcgcacaatgtgttcacaaaattgaaaacaaaatccaagcaatttgctttttgctcatgataattttcgctggaccaaaagcgttcacacatttcgaaaaatattttctccattttttcaggtgtcacaaaaagtcgtccgttgtctttgaacggttgggccttcgtttcgtctgatgcatccaatgttttgtcaatgtcatgacgactttttaattaaattaatttttatttttttaataaaattaatttatttttaatgtattttcttataaatggaatgtgcttcaggttaaaatgggagaagcctaaaaaaatcgaacatcattcggcggctgtggggtaatgacttgtcgagtctctgtctcgacttgataagtctcgggttttttgtttctgatcgacttcgaggtcaagtatcggtcttgagtctagccgaatttttcggtttcgaatatccccattgggtggatgtaacaaaaaggaaataaatctcttggaggtgcctttttaaaaatttgaagcttcttcgggggtatatatattttttgtaatgcctcaaaatccgggccaaacatttttgaaaaattactaaaaattgattggaaccgaggatgagaatttgcatttttatttatcattaataatttcttacaattttctgcgtcgtgtatgtgccacttgcaaatcgaattcttaattattattttttatacaacgtaatcgtttaactgactttagtgtttcataaaccctaaatttactggaaagtgaaattaccgttgtataaaacaaattgtacagattttgacgcataaaatccgtctattaccctacagtatgtttttgttttgttttaccataatctcccgccgcgacatagacatgaattggttcattgcaaaaaatattgacacggattttgacttcaactggcacttttgaaaaggatggtttaatttgttcgggtttcttcactttcttcgacggtgttgctactgtattttcatcatctggtactgtagcattacttttgccagttgcccatggcggcgactttcgaatcattcccagacatgccgacaaacagcagaacacaagcatcaattttaattgccgctttaacatttcgatatttattatattttatgtaataaatgttaaataaaaaactaaaaagtgacgacggcaaattttttaaaaataatttatagctaataattatataatattttcaattgatatgcaaataaatcaatagaattggctggatatgaaagcagagtaaattatttttttgaaaaaaaaagaaattttatttaaatttgatagagaaaattatgaatgaagtaaatttaatattttttaagcaaacgtatgacgaattcaatgcaagcaaatacaatcaaatgctggacgcctacttatttatctcggcacaaagatgttaaatttgtgagaaactaaattgaagaaattcggcccaaattgtgatataattcacgaaaataattttggcactttgcctttgcaaatcgaaaaaataatgaaaatttggtcctaaacggaaaagtaccgaaagtcattcaaaactgcataattgggcggcggagagagtgggggggggggggggaggaaactgtttttgagctctgtgaagtcatcgcggactactgcaagacaggtacaatttttgaaaaaaaaacatgcaaaaataacaaaaaaaattgaagatgtccaaatcctggcccatggtatggtaaagatgcggcagctgttcttgtccgagactcggcatgacatcacggattccgccaccatcccgtccggctgtatgaagtattgggtgcagttggctccccacgacaaagaacgggttgccatcatccccacacttgggatacgagaagcgaggcaaacagagctccatcccccggaaatatttgaaggtgtatccaaattatttttaattttacattttgtcgactctcagtggcgtgcccaaaaaaacttgcgagagaatgccctagtcctgcgccatgtccaaagccc

SEQ ID NO: 13106 - DNA, 1553 bp, Heterodera glycines
cgttcgtttctcccttcccctctttccccactgtccgatcggtctttgatcgcatttgaactgatcccaatcagtgacggatcaccgctcgatcagccgatctctccgctcgttccgtctcgcgctgttcgcccattttagcggcaattcgccgaacaataaaagcatcccggcaaaatgcttcttctccgccgagcgctgcttactaattcattagctgcccccgggcgaatgtgtcgctataaaaggaggccatcaccgaacagtgccagcattcagttcacaaatcattttctaatcgagcttctttctcgaacaatttagcattaaatctccttttaatccgccctttcttttaaatttttgaaaaatatgccttaatgataatttattcattattcagaaattttttttaaaattatctttaatagaatttcttttatctattttttgtgtgctaaaatgaaaggattttcaggtaaaattctaaatttgattttgtgatgtctcgtatcgctctattggtccttttggtcgcgctgttctgcgcttgcgctttggtcgaccacgcatccgcgcagtattggggcggacgcggcggttggggcggaaggggtggcggatggggcggaaaccgctggggcggtggatggggcggaaaccgctggggcggtggatggggcggacgcggtggcggatggggaggccgaggtattttttttttgaaaattacagcaaatttctcacttaatcagaatttcggtggaatattaaaataattattaataaaataaatggttaaacaattcaaaacttcttaggatggggatggggacggcgctgaacggacgaaggacaatgtaaatgaatggactggttggatggcactaatcaaagaacaaatcgcacggatcggcaccgggggatcaatgattagtcctctgacaccaaagatcaatcttcgaatcccccttccacacctcataaattttctgtaatttatacatactgcacagaatttgatgcaaaataacattaaaataaatgataaattaaaaagaatgtgataagactaaaaagcaaagttgtgttaatttaacaggataaaaaatgttgaaaaaacatactgtaaaattgtaagccaccataagaaattaacgtttttgcaaatttgttggttaactcgcattttgaatcattaatggatcattatggtcatttttaacgtgattgtcttcctggtaatacggctctaattaattatttttgtggtgtctttagcagtgataattaaattaggatttgcttttcaaaaaatatttatgtatttttttcgggtcaagggcaaaagcattcggtgagtgcatcggtcagccgaacattccgccgcccattgccccccaagggctgccccctccgccgcccatcattggcgggccggcgccccaaccaccgcccattagcatcggctgtcccccgccgcccatcatgccccacattggacgattccaaccgcctaaaaatgggaaaattcgatttataaattaagggga

SEQ ID NO: 13107 - DNA, 1743 bp, Heterodera glycines
  unsure (1)..(1743): unsure at all n locations
aattattggtttccttnttcagctttntgaaaattttgcaaatttatgcctatcgaatgacaaataaaatgtntaatttgaatgtatgagagaaaaatttttacaaaaaatttcctcgaataaatattatacccaaatcttgcagttttatgaaaaataaaggataaaactaaatatttcatgtacattgagtgagcatttcggtttatcagaataggagaaccccagtcgtaaccgggtgaatattaggactacctccccgaaacttgaaaatgaaaatttttaaaatgaatcgtccaatttgaaaatcgatcattttcgagccaaaattttgataaaaaatgcaaaattcacagttttttttaaagcagttatttgtcgaactgaaccaaagccaaaactcaccgccccaaccgcccattccaatcatcggattggtgcccatcattgaccattgggcaacagagcatttgagcgaaacggacagaagaacaatggccaacaaagtgtgaggaaacataattgaagagaagagattaattaattaagagaatgccaaaataagataaaacaataattggaaaatataaacataattatggaaaaaagaaaaacattggattaaagaatgttttaatgataaataaattacttaaatttaaattaaaaaaatgcaagtacagcctttgtagatatgtgagatatatgtgagataaaagctgatccatttgtgtatttctacagcacaaaagcgcagcggaagataaagcgcaaacatttcaaagcgccgaaatttgaatggctgtaaaaatgggcaaatgcgatgcttcttcagctcaagagagagtgctcttccagttgaaatttcctttttgggaaagcggataagcaacaaaatgaaatttgtgacgacggacgaatgaatgaatgaatgaatatgaatggtctgtgtttgttttgcttatgtgtaaacagcagaacaattaggtagttgcatttgcatattaaatatacttatttattgtaattagcattaagtgtacggctcgtaatgaattcaatcattttaatgggaaatgacctaaatgaaaaaatcttcaaaaatcaaaaatcgctttttatttatgttccaaattgatttttctccaaaaaataccaaatcaaaattcacattttttaaaagcacattttattatttacttctcttttcagcttatctaatcagccaaactttttaataatacaattaaatttttggaaataattctttgatttataaatataataaaatttaatttcatttttacttccggtttcatatttattttctcaacatttattctctcattcatcccataaagaccaccaaaaacgattaatttgcatcatttcccattaaaattgaatcgaactcttttcgttatgggtgttttattaaatgaatgtttaatggattgtagtgcttacaattagtgttttttaaataaatatagttattgcatataaatacgggccgtaaaactacaaaaagaaatttttgaaaataattcttttcgtttaaaagtttgtttatgtgagaagcaaatcttctctgtcttgcaccaaatttaaatttaataaaatttaatttccattcttacttccgcttaaatgttcattttctccacattattctctcattcgttgcatagaagaccataaataaaacgattagcttaaggtttgacaaataattattatacg

SEQ ID NO: 13108 - DNA, 3960 bp, Heterodera glycines
  unsure (1)..(3960): unsure at all n locations
ttccgcgtttgcgtnntgaggtacgtgggtctcggtgagtctatgttgagagagcctcggaattggtctttctgcgacaatggcaaaatgtttgacttgtcgaaacgcatctgtcggcgcattttgcccggggatcggtgtccgttcaatggcgtttgccggtgggttaaataataattgctttcgctaattaaatggtcgttttgccattaattcaaaggggttgggagtggcgaatgagccccgtgggcgaatgtcgccgcgactttttgttttgcaacggcatccgtccgcaactgttccaatgcgagaaggagcaggaagtgttccgggacggcgagtgcaccgccgcgagttccgcttgcgacgtgtgccaaccgggggaaagcaaaaggtcgacagacaaatgcgaagaggtgggagcaaaaggcattgggtgcgaaatgatccgatttctcttactctctatcttttttcttcccccccccctccctcccctcctctctcaaattctctctctctctctctctctctctctctcttggctttgaagctgaatttttgttgtccgcttacctaatcacttggatcagtttttcttctgtgaacgggatgctagcacagggcgattccactggcggcagtacatttgcaccaatggccgagttttcaatccgcaaacgcgcgaatgcgtaccgcacggcacttaccattgcccaacacgaactttggtcctttttgtgttaattatgtaattaccatgctttaatcaccttttgttctttctctcagtgtcgagatggcgattcgtacaggtgatgactgatcagttgatggtcagaacaatttgatcactcactattcatttctcaacagtgtcgaatgtggcgactttttcgtgtgttccaatggtcgatttgtgccgggaaaatgccctgaaatgacccgctgggaaatggcccagcggcgttgtgtgtacgtcgtcattctgcgcttaaaatttcagtccgtccctttgctgctattttagcgcttcgcccgaatgtcgccgtttcaaagatttgccgtcaaaagcatttgtcggaggggccgaatgtctggacggacagacaaagccatcgatcgactgtaaaaagtttgaagagtgcgcggagggcaaatggacgacacggcactgccataactatgccagcagaaaactcaaaagtgtgccaaggatgaggacagaaaagcaaaagagagggaaacggggatatattgaccaattaacgggaaaagtgattaaatgatcagaaatgttggccagtcaaaaaagtgatcaatctcaaaatgatcagtccatccaacgctttcccttttccgttcttcgttaggtccgtgccgtttctgtccccaattgtcgtcctcaattgttggcactgaaattgaagcgaaaaagcaacagcggacggacatttacccgttggaacgccttttgcccgacaatttcaatccgttcgaaggccaaggcgttcgccaccgccgttgtgtggaaggcgaagtgtgcttttgcttcaattttcccggggaattggcattttccagaggattgtgaatcggcacgactgcgcccgcttcatggaatgcgttgacggcgattggttcagcctttcttgcccgcttggccactatttcagtttggaaaacgaaacttcaaaatttaatgaaattgaaaacccaggcccactaatccaaggctgtctgttggccagctcctcaaactcttcctcagcagcgattccaatgtgcaacgagcttctgactgtggcggagaaggccacttcgatcaccaccgaattgaaagacacaaattccaaaagcgattcagtgattatttttgattattttcagcgaatgaaaatgccaacaaaaaacaaacacaatttccctccccccacccgaaaagatgcattttttgccaattctttactcaaatggaggacaatcgccgatcggaccgggcgcggggccattgcctgagttgggggacaaggaaatacggcagaattatgtgggcgattgggaaggggccacggcatcgcaattaatccaagtcaatgacattcactcatcattccattcaggccggcgcattcagcttctgcgacgcgaacgcggccaaaagactgcccaatgcgtacgactgcacgcgtttccgcgagtgcgcgttgacaggggcggatatacgcggaaaagcaatgcgcacccggcacacaattcgacccgacatttgggcggtgcactttcaagtaacgaagtgccaaagcgaatttgaataaaattcgaattggtcagttattcttgcgcaccagcaaagtgcgtggaaggcattcaagaaggagggcaaaagtgtgggaacgcccggcaatgccagggcggggaatggcacgagttcatctgtgagcacggaatggcatttgtgggcggacgatgcagcgaccgcgtgcgttgccaaagcaaaagtgatcaatgggccaaggggaaataggaacaaattctgatcagacccaccgagcaatggccaatgtgccgagggacacacgcgggcacatggcagagactgctcaaagtatctgatgtgccgatttggccaatttgtggaggaaaactgcaacaacggacatcgcttcaacccaacagtcagtggacaaattgccgagataaaacgaaaagtcattggggtgggggagaaaaagccaagcaaagccatgggaaaaatgcgagcggtgaataaatcgcttatccaacggatttggaaagtgttcatctccctttacgttttgaagatcggccgttgcgatccgtccttcgcttgcccggaacatcaaaagccgccgtgttttgagggtcaaatgcgtgtcacggaaacgccgtccgccgcgccaacggccaaatgcacgacggaatatgagctgtgccgtgacggacgatttaagcgcatcagttgcccttacggagaacatttcgctggggggcgttgtgtcgcggggaattgcaacggtgggcaaagcggcagtggccaaggccaaaccgatcgaacggcgatgtgtaaggtgagaaggcatgtgctaattagtggcatttgccttgattatgcccaggaatcgcccggtccgcaaggctttcgatctgacagcaaaaattgtgccaagttttaccaatgtgccaatggaaaatgggtgccaaaggactgtgccaaaggcactgtgttcaatccggcattggccgtctgcgattggcctgccaatgtgccgggatgctaagaaatggcaaacggagaaaggaacagacgattttaaatcatcggcacaaagacaaaacgccaaaatttaaaaaataaataaattttgtctcaaatacaactaaaacaaagtttcaaagaaaaagtcagaacataacgtgggaattgagaaatggcgggagaagttgatgcacactcgggttggccaagttgtaagtgacccctccgccggaagtgccttaaaatgttgaaaatcaatttggatgcattttaaatgcaaatgaatgccgcaccaatggtaaaatgagtaaacttttttcaccatttttgcccattgtcaaaacacaccgcacggcaaacagccatagcacccgcacattggtggcacgccgacgcccatttgcccccctcccatcagcacttggttcatgttctgcgactgaccctgaaatggcaactccaactagtccaattcgttttttttcggcccaccatgttgtatccgactgtgctgcccatcaatgtgccgaccgtgccgagcagtgcgccgccgattgccgcgcccttccaaatgccgtgcccatggcttttcctctccttttgtttcgtcacgcgctgccttcgtcctgttcctcccccatgctcctcctcctcttcgtctgtttggcctttgtctttcg

SEQ ID NO: 13109 - DNA, 4027 bp, Heterodera glycines
aggagcaacaaaaagccttcggaaaaatcaaggaaatgttggcttcaaacgacatcctcgtgcatttcgaccttgaaaagcctctctttttggcaacagacgcgtcggattatggcattggagctgttttatttcataaggatgccaagactggaaaagttggagtcatcgcttatgcgtcaaaaacattaagctcatccgagcggaaatatgcgcaaattgaaaaggagggacgtggagtgattttcggcgtagaaaaattcaaccaatatttatacggccgaaagttcacactacagactgaccatgagccgctgaaacggatttttggacctaagggtcaaatgccagtcgttgctgcaaggcgtttacatcgttggagcttaattttgatgaactacgagttcgacatcgaatattgctcaacaactaactttggacacgccgatggattgtcacgactgccaacaccagaagtcgacaaaatttgcaaggagagcttcgacattggcgaaattcagaaggaatgccaaaatgctctgccaataacagcaaatggcatcgcaaaggagctcagaaaggacccaacgcttaaaatagtaaaaaatttcactgagcatgggtggccaacaaacaagcaaatcgatgccgaaattcgcccattttacgtggtgcacgacgaaattgagatccaaaacggatgtttgatgcttgggactcgaacaatcatcccagcaaaattccgtggagaaattttaaaattgatccatgagacacatccgggaatcgtgcgcatgaagtcgctggcgagacaaaaagtctggtggcccggcatcgacaaggacatcgaagcaattcgtaagaatgcaaaatttgccagaaaaatgctgcagaaatgaggaaagtgccgctgcacccttgggaagtgccagaagtgccttggcaaaggcttcacattgatttttgtggcccatttctcggcaaaatgtggttgatcgttgtggatgcaaagacgaaatggctggaagtcattatgatagcgaaaacatagacagaagcgaccatttcggcaattcgaattagtggggaggagatctcgtgtatgaggacttatttgatgggactcaaatgggcatttcatattttccctcttaatccccaactatcattgctgtctatttaaatgttgtctttccctccttctccccgcagtcttcccagtcattcttcatttattagcccatcctcagcgtccatcccctccttccgctcctggcccttctttggcgtgtagtgcgcgaatttgtcccggatatctcgatagatccgatccagcgatgcgcggctcgcggaatgcgagcgatcacgatcgatgacgcccacaatttggtcgacgatgtcgcgcctggcgctgcgttggagttcatccacccttttcttcggtcttcctctgtttggaggcgcataaattgaatgaaatgggttttttgaaatttaaatgaaaaatgaaggttttttaaaattaaaatgtgagagattttcactcacttttgctggtcgttggtggtgccatcggtggtaccatgtgctcgtccagctgccgacgcagatcactgatcagcgcttctcgattgcgcacctgcttgcgcagaaatttaatgtttttctctggcactctctatttattggtacacatctcgttttttcggacggtgtgttaatgtatcagggtcattaggattgcatgtaaaagtaacaaaaagaccgggttttccagttttattaacaattgccattgcggtccattagattcattaaatgttcatgcatatttcgtggcacatcagtatccaaaatgatatcctttttgaccacatggatacagtaatgatatgtcattggctctacaaatttatctagtgggtataaatctgttaattttttattcggttttcggataaacaataattctcgcagggggaatatcagcagttgaatcgcaaagcataaccgcataaacttcatttgtatgaagaagaatataacaacagtaaatctgtagcgacacttgtatcgataaaacaaggctgttgtgaacacgaaaatttacggcgattggaaatgacaaaaaaaaattatgaatttttccaaaaaaaaatgggtgttccaattactcttttttgataactcacaaatttcctagaaaccacacaaaatctgaaaaaattcatgtaagagtaactttttatgttaaacagaaaagtcagttgcgctgcgataatcagaacactccttcagagcggtctgagaaccagaaaaatggcttaaaaccggggatattttggaacaaattcctaggcggcttgagtgacacccattttttgagaaaatttcatattttttttgacattggcaaactccttaaatttcttgtacatgtttttctacataagcccattaattttccaaattacagctaaagctaatgaatcgatttggtgcccaatttcttcgtccattggcttaagttttgcctagggatttccaattcttcagcaattttcgtctcactcatcattggattactttttcttatttcctcacttcttttcacatattccaatttttcagcatccgagtaacgttttttttctcctaaaaaagcaatttttaaaattttataaattaaaaatttacgaatgctgaaaccgaattttcttttccatctacaaattgtttccaacacaacgcccaattttattgcaattttttctttaattttccaatttggttccaaattgaaattttttgcaaattcttctttcactttttcaaattcttttactttttcaatttgttgttgcgttgaaaatttcttttttataccttaaactgtttttgctgatttgaaaatgaaaatttctctaaaatttcaacataactacttaaattggttgtaataaaatgttactagctatagagtccaattttcttttccaagcagaaattgtgttcattctagcaccaattttttccgctattttttctttaattttccaatttggttccaaattgaaattttttgcaaattcttctttcactttttcaaattcttttactttttcaatttgttgttgcgttgaaactttcttttttataccttaaaatgagacaataaataataaaaaatcgaatatgccattgatctcttaccaatttccaattccttcttccatttgtaaattttctttcttttaattccaatttcaatagcaatttcattttcaattttatttcttttctttttgtcataattaaacccataaattttttcttttctcattttatcaaattttctgatcagttccatttttgtttcttcactttcctccgttttcactcttttttgtcccaattccttcttcaatttataaattttatttcgattaattcccaattcattagctatttctgtttcaattttttgtcttttctttttgtcgtatttaaacccataaattttttcttttctcattttatcaaattttctgatcagttccatttttgtttcttcactttcctccgttttcactcttttttgtcccaattccttcttcaatttataaattttatttcgattaattccaatttcaatagcaatttcattttcaattttatttcttttctttttgtcataattaaacccataaattttttcttttctcattttatcaaaatttctgatcagttccattttgatttctttacttttctccattctctctcttttttctcctaattttttttgcgattccatttcatttgcagaatcgttgtgatcagcagacgaaacattctgatcagcttcctcattaaactcattttcaaatgattcttcgcctaatttgtccatttcaatttttggcatttttatttttatttttaatttattattttgttcctcaaaatgttttttcctttttaatcttttgcattacttttggctttatgtcctccatttctattt

SEQ ID NO: 13110 - DNA, 4024 bp, Heterodera glycines
gtggttccaaagcgcatttttaaaaagtgcaaaaggcaataagtgccgataataggtaaaaagaaaatgccaaagaaaaaacgaaatgcgtcaaaaacaaataaagcttggttttgcggcccatatcgccacttaatcctccgctcatttatttggcattgaaaatgccacacctaatgaaaagaattaattgttgacgaacgatgcaattgtgtgtcacattatatcgatggattagtttttggcgcaaaaccatctctaattttcatgagatctaccatttgaataataaatgactcattagtgtaaatgaaatttttgcgaatctctttaaaaaataaaagttcgttttcagcagttgcgtttgtttatcaattaattatcaatcatcatcatattgtttcagtgccccctctttagcgatgtgtttttgtctttgttatacattttttatattaacatttctttaaaaatgatgttttttcaaatgccaacttggcaattctgtctcctcccaatgctttgtgacgccgtgccatgccaaccctggccatgagtgactatgtagttcatttggcaggccaaaatgccgtgtgaatttgtagagaaagcactcattaatcggtagctaggtaattaatgagtgagcacagcccatcaccaccaccgacttccattggcatttccatcagtcattcattcgtccatcggttgggtgccaaaatgaaatgccaacaaaacattctctgttattaattattattttatttggcgccaaagcgaaacttttgccgaccaaatgttcattctttcggtacagcagctggacgagtgtttgtctcgtttttgaatttttgtctcgtggtttataaccaattaatttattgtaaatacattccgagtcgaataattccctcgaaaatgtaaaataaaagcaaatcttggttggattggccaatttgcactattaaataattaggcattttaaagtgcgattaacaaaaggacgaaattctttgtacaatataaaaggggtggaagaagacgcgaactttaaaatattaaatttcttttgtaaatttcactttcttacaataattcatccgtccgtaatgctttctttcgtaataagccaataaaattactttaaaaatgtttaaattattttattattattattattaattttgcttttacacgcgattcccccacttttgttaattttaattggaaatgctttttctccaaatcgcaccgctggcaaacattgcgtgccaatgagcagcacatctgtcatttttacgcttatctttggtgacagcggaaggacatttctcattttacgttatcggatgtgctttgtgggcgattgaaattcagacgaatggcgaaagggctaaattttagttaaaagttttcctttaacaaatcattaatctgttaaaggaagccataagttcactcacaattaaacaaaaacccattaattccattggcaacaactcatcttttatgagttttcaaaataaatttattaatttaatttatttttggtttttttgttttgtgtccaattgagcagctgtttcccccgtcattttttaatttcggttaatattttttgccaaaaaacagaaactgtcaaaaacatctgtttgagttagtggcaataaattgtgaaaacccttcagttttcaatctctaattgtttgtttgttttgaccattcaatttctgggaaaatgagaagtatttgaacaacaaaaaattagcaacaaatttaaatcgaaacttttttgtgcctttaatcaatttttaattaaattttaagccgaaaaaattatgtaatttgtcatgggaaataaaccaataaaccaactctttcattaattttagaataaaaatcatttctttttgtttgaagtccatgtgaatttccggtaaattcccaacattttacgatgataaaaaggcaaagaaaaaaaagaattttctcactgaattcttttgatttttgaaattgaattttcgatacccaaaaactcgtttatttttaaatttaaaaatttataaagtgagaagatcccgccaattagttcatgtttatgtattacattagaaaatgacagtaatcttaaaagattatcatttaaaatttttagatttagaagtttgagacttatattaaaaaattcagatttatggaaatcatttatttttgatataaaaaatttggtgcactaaatggcaaatattatacacacaactaatttttataactaattaacaatgaacactaaattaggcgaagtcatttttccattttagtttatgttttgagcttttttatgccataaaatccgattcctcctgattattcagtttgataattaaagtgctttttaactatttcaaacttcagctgattagtcccgagagacggaactttttgatttgttagccaaattaatgggcaatttgagcagtaattgggcaaaacagagtaaattccaaattattatttcaccaaaaaacggcgtgcctttatctttcatatttggttcatatcataaaaatgtaaaattaatgttgattcaaaagaatgctttgctgttaattatttgtctcaccgtgccccccctccccgccaataattaatggccaaaacactccgtttcaggggatcatttctcgcttttcgcttttttgtgcctttgaaggtctgcaaatccataaaatgtttgtgctcgaattgaattgatcattttttcattataattatgcaagattttgattaagaatcagaatatatttctcagtttcattctcccccccccccttttggaacgaatcccacgggttttcttacagccaaaaaattggtacatttgtaatacaataacaatttgacttttttgttacgtacgtaaattctgtccataaatgttgcgccccctcaaaattcgccccacctaaaattaccatttcatttccccacttaagcgaatgtatgcgaacaaacaaatggcggcgaaagtcccacggcttgaacaaattagcttcttcttttgcttcttactcttttcgatattcaaaatttcttcggcactttccgtgcgccttttgccctcaccaaaaaatgtttttttttgccgtttttacccaattcctttgttggaaggacacaatctgtgataattattgttaattaagctgctaattttgcttctttttttgttttgttttcctctgatagtttaaaaatattccgtcggtccatcggcgggcgaatgcattctcaggaagaagcacaaaaaattcaaattaattaggtatgcaaatattgactgaataacagcacagcgagtgggaacgaaagcatattaagcaaataaataactgtaaaaagtttgtgggaataagcggcggcggaagtgtttttttcctttccttttttgggttcgtttggtaagaaagtatttaatacgtttcgtgtttgagaatttataaattcaatttcaaaacaaaaaatttttcctaattaattttgcgcgcggttttggcattatgccgaatgccaatgcccattccccaccattttacacttgtcaattgtgttattcatatttcacttggaataagcaaattaccggccccgttggcacccaatttccgcgttggcccattgccgtgggttggcccattcagcacccatttcgtcacgccattcatttctcaattgagattagcatttgcttacagcaggctaagtttttaatcaattttgtttaccagtagcagcccttctttttttaattagcaatttgaaaatgtcatttttggtggccatcacttgtcatacattaattgcaaaaaacatttagcgctcgctcattttggcatagccccgaattaaaattgtctttttttgcactgattttggtggaataatctgtgtggggaccccgccggtgtggtccccttcctctgtctcctccctcttcagccattcttgggccaattat

SEQ ID NO: 13111 - DNA, 2193 bp, Heterodera glycines
ccacacttacaatcacttgtccgggactcatgtagggtagctgtgcatttgttggcacatcaatttttttgacaatgaaagcgatgtctccacggagttccgactcattaaaaatttgtgcaacaatattttttgaggccaaaaaatgttcggccgtcaaaatgccgtcaaaatcaattttcgaagtgatcacgtcatagtcattgttgccattgcaaagttttaaggcagcgatcagacgccacaaaatgttgccaattgttttggccggcacttttccagcaaaatggtccaacatggcatgccaatagagcgggaacggcacataattatcagtctttacaaaaaattcgtgtgtaattagtgctgataaacttataaatttgataaatttcaaaatttttcatttctaattaaattctgtagatagcttagcagcactgctgaagcttttgtcaaaaaaaaatatttgaagacttacaggaatttccgctgtaattaggcaggaaaaactcccaaaatttgatactcaagcaaaatgaaaatttaaaaaatctttctttaaatttgatagccgtttgagttctttcagtttgacgaacttcacctgatccatttgttgtttctctgctccattttgttcattaaaaatattcatttttggcgaaaaaatagtgccagcaacttttggttgggcttcatcagtcaagtttttgattggctttgtcaaaaatgcattcttcctcttgcgttgtagaagctttaagtgattttgaagatgacaattttcgcattggcacaatgcctaaaaggacaatatgccaaattaaacatttaaaacaaggcaaagtttgataccattatttgtcattagcaccgaagaatgcgcccgaccaaatgcagttttatgaacgctggtgatggcacttggcgaactgctgctggcggcattgccaatcagagtttggccagccaaacaacaacattgaagaagagcaagaaatgagacaaaagcgaaaagcaatgagaaaaacattttttttttaattttctaaattaattttggaaattaaaaaattattgaaatccccactaattgttgccgattaaatagccaatttaataggcaattcctaagtttgttgttgatgagcaacactttttttaatagagtatgacgccaaaaagtcggaaattcgtgattaatccagtgttagtaggatcgccgggtttcggcatatcagataacaggcccagaaaattcggcaattctatgaaacaccaaggttcaaatttttcaggaattggagattgactaaaaaagagaggtaggaaaaagttgaaaaactcaagcggctcatcaggggcctcgtgctcgtctccggttttagtaaacccgggttcaagggctaaacactggtttcgttaagaaacgttcatttgatgtttatctcggtgattaatgcttttctttagttaggcgtttttttgaaattttagtcaataaaattgttgaaattaaaatttattaaagcggcgcaaatgtcgattttgctgggcggcgcaagtgtctgcggcgcaaaaatcgcggcgcaaatgtctgcggcgcaaaaaacgcggcgcaagtgtctgcggcgcaagtgtcgatttggctgggcggcgcaaatgtcgcggcgcaaatgtctgcggcgcaaatttcggccaaccgctaaacacgggtttcgttaacccgggttcaagggctaaacacgggtttcgttaacccgggttcaagggctaaacacgggtttcgttaacccgggttagtctatttaaaatcatttatttaatttttctttaatctttaaaaaatatatttattcaataaatatcaataaaattaaagtagcaagtaaaatcttatattttaataaatacgagttagcgagaagccatataaattgtttctgtgaaaatgtaatgttgctattttcttggtgttatattttactttttttatagcttttcgaggtgtatttgtggatgccattccttacatatgtttacatttacatggcatttgcattggcattctccatggaaaagtgccatggcatttcctgtcaaaagcctttcccctttgcccggtgtgttctgatcacttaggaaacagcgcaaattcacgtgaaattttttgtaaatattttcctgcac

SEQ ID NO: 13112 - DNA, 629 bp, Heterodera glycines
gcacttcctctttgatgttgaagtgccatgatgctcgcttctgttgctgcactcgcgcgcgtgttgctgcctcacatgccaacatgcaattgcgatcgtcatggcacggatagtgccgtcgcggcgcaacctccgctgtctttgcgaccgttgtgtcgccgctaataacggcagttgtgccagcattgtcatgctcattacgctgcttgctgaggtcgttggcatagttcgggtcattttccagcaacagctggacaggacggtgctttttttgcttcctgaaaagtgtgcttttaaaaagacttgaaacttaaaatattttcataaattacaaaataaaaatgggaatttttcagcagcttttttgaaaaaaaccattattaattcatcttaattgctgaaaaggttttcaaagtttatgaaaatttaataattttttattttaaaagtttttgaaaaaaattcacggagggaattgatacgggggggggggtaaagaactgctccccgacggaccaaaatttcataaagttttcttaacgtgatcaaattcgtattctggcacaatgccaaacatccaatcaccaatggtgtgccgtaacaaaacacacctcgcgtacagttcgcac

SEQ ID NO: 13113 - DNA, 3796 bp, Heterodera glycines
ttgttgagcaaaagttggctttcctcttcatcttcctcatgtgaaacggcctgtattattgccctgtgtttagcatattcgagtgctttaagccattgtgaacgatcaatctaaaaatatcattctgcatacctaattaggtaaattaaataattttacaatttaaattacctcatttgatgcctttaaatgaaaggtttgggctgatggagtagtgatgatctagcaataggtttgattttcacagtattttaaaatataaattattattacatattaaaacggtggctaatttatgaaattttaaaataaattaaaaaccaaccaagctgtggctcgactcgccctgattgctgtgaatgttcgcttcgctcaaatttatgctgcctctacaagagcgattgacttccgatgggtgccttcaagtatttgatttcctttgatataaaaaacaaccaaaccgataatagctcagaattccttcagcattaaggacaaaccatcgctgccgatagcccttgacataatttgtccatttgtaaagccatccggccttctcaaatttatttgggtcatttgttttggcactgttctctttcactccaacatcagtcgaattgctgccggtgtcttcgacaaaaaagctggccgatgaaatgcttgatcgctttttagtcattttatatcatcaaaattataattcaaccttaaaaagtgagggttggataaaaatgcaaattctcgtgtaaaagcaataggtagatcacggtctgcggatgcgtcgactcgatctcgactgaaggagacattatgacaaatttcgcgaaaacataatttttaaattttttgttggcttggtcctcggttgggttaaaactaggaccgaaatgaagaagatgcaagcttaagcttacagatttacctatatgataaataaaccatttacttattagcaaatgctgagacattagacttcttttaaaatgtttttataatgtttatttcttaatttctagtaaaatttgtctaacaatttatttacgcttacgataacaatttttcgcttccttatccgcatatcataatgacgagtcacacgccggaatggaaaaacttagcagcaggcggtagccatggaattcgttcatccgttctgactagtctaaacggcacaacgccatcgagaaacccaaactatgtgaaaggaaaggtcaacgagggcgatcgctatttatgtctcagaagtgaggagcaattggaactcgccaatcatttgttgtcctcgcgactgctcgtgagattttctttcaacaatctccagttttatttaatcacatgattaaggataatgagaacaccaacaatttgaatacgtccacttcatgtccgacgagtcccgcttccaaattggaacagcagacgaagaaacaaatgatgagggtcaaatcggacaatgcagtgaattcgttggctgattttgaccgagtttgcgcatttcgtaagggactcgctcctctagcaaaattcggtagattaactaataaagccatgaattttacatccaattcattctctgcaaggccacaaacagcaggtgaatgtgcttttttcttgtgttcagccaacttccagttgtgtgaaacggtctcgtcgttacgtcgcaaaggatcccgagagaatgttggatgcgccagatttattggacgatttttgtaaacaaaagttcacatattacatttttccaactattccagattcgaatttgattgattggagcaagactaattgtgtcgccgttggcttaggatcaaaaatttttcaatggaacgcggggaccggtgccgtggatgtcagttcttttacagttttttccaccaaatcttgtgaatttaaggagataaaagatttctctgaaacgcattcgcatccaactctcgtcaaatggtcttgcgaaggacaatatcttgccgttgggttcaatgacggacaattaaaggtgagccgaacggatagcgaagacataatgagacttcatttcgttttcagttgttggacagcgccaccaaaaaagtgctgagaacaattcacacgaccacagacatgcgattggcatgtgccacatggacacacaaagggcgcatttgctgtggctcgaagaacggtcgaatttaccaccacgatgttcgaataaaaaattcgttgatcaggttcaatatttctaaaaaattagcacacaaaccatctcattttaagcactttggatgctcatacgcacgaagtttgtggcctaaagtggagcccagatgagcattacctcaccagtggaggttctgacgcattagtaaatgtttgggagaatgtgcaattatcgtcaaataatccggttaatacaaatatttatcactttctattaccaatgcttttatgaattactcaagacaccgcttttcaaattgaatgaccacgtgtcgactgtgaaggccattgaatacgttcggtttctttgttcttttgatggctcatttgtgttttaggtgccaacgatgggtttaggcccagccaatctcgtggcaactggtggtggcactcgagaccacaccatacgcttttggaacctaacggatggcagtgctcacttcacattggacacgcacagccaagtgaagtagcattttacaaaagttttaattgcgcgaatttaggtttccgccattctcttcagcaaacctcacggcgaaatgatcaccggccatggggccccaaaggcgggcgttcgcgtttggcaccacgagcccaacaaaatcaaaaagtttgagcagacggcggagttgaaccaggcacatggcggacgcgtgttggcactttgtcaaagtccgtgcggagagtacgtaatcgccgcaaaccaagtgatttttgttgttttgtttcaacaaaccattttcttgctgtgaaattgcaggacgaagtgctcaggatttggcacgtttggaagatggacgaatcgatgcgaaaacagacgcaggaaagtgtaacggcaaatgcgaggaaacagcttcagggcgccgctggaaatatcattcgatgaaagcaccaaaattacctatttattttaaccctttcgttctctgcctcactattttttcaatattttagcatttcattaggattgttttttgtttttacgtattcaacttaacttttatactatctttcatttatttgtgtttttcatgcataaaacaaaaagtgcactgaaaattgttacagtaaaaagcattagaataatttgacaattattcgttgtcagcacttatcaaaattagcaaaacattctcttcccttatctccgttaaaaacaaagaaaaggaaaataaaacggtgaaatgttatttttgcgaaaatggacgccacgctgagaaaatgcatcgccaaagtgaggggggagcatgacgacgacgcggtggaccgcgccatctatgccacgacggtgcatttgctcggctttttcgccgtgctcatcatggccaagcagtacatgggcgacccgttacagtgttggttgccagcggagtatacggtaggagggggagacaaacgaatttaaaagaaaagcgaaagagtaaatgtgacagcgaatgtttcagggggcctgggaaaaatacattgaaaattactgtttcgtggagaacacttattacgtggcgcagagcgaaagcggcaaaatgtgagtgccattcctacggtacttctctcactcggtgtcatactgtattctcccatattcattctctctcat

SEQ ID NO: 13114 - DNA, 945 bp, Heterodera glycines
tgaggttcgccgaaaagatttcatcttcctttggctttggttcttcgtctttttaattatcgcttctttgaatttgctgttttggacctatcagattctttcaatgcgcagcaaagaaagaatgataattgatgcacttagggtaatcacttcaaattccaagccaaatagtaggaaattgtgcaaatttaaattattttttaatggagcaataggccaaaaggtaatgtccccaactttcagcttcaaaacatccgcccaagccgacaaattgtaaaagtttttgtttacaaatttctcaaattggacggaattctcgtccttcgactgatcgactcaaacacaggacaaatccatatggctgacattgtccatcagctatggctaagtttcaacgagaaaagctattttaaagaaacaagctgataaatgtaaaagaatttatgggaaaatatctttatttgcatttaaatggtcataaataattaaatattataagtcgacttaaacgtattctcatggtttaccatatctttgagttgagtatcggtcatttctcctccgtttccttctcctcctcctcttgtccatgtccctcggcttcctttgcgtttggaatccaaagtccggaggcagtgcagcgatccaaatggtacttgaacacctcggagtccatgctcttcgccacttcaaatatctttgccatgctctgtgtttcgaacgcttcttgcatttcctaaaattcaagtttcattactaagaaaaaagctcccaactcgccagtaaccagatcaaggatagcacatgcattttctgcttttgaacattttgttttgtatttggaaaatgagcgccatcagacagtaaaattccgatttttgcggccccataatttgtaggtttattgcccttattgttagcacgtaaaattaaaaattcagaata

SEQ ID NO: 13115 - DNA, 3828 bp, Heterodera glycines
  unsure (1)..(3828): unsure at all n locations
agaacattctgatttttcgttctccttgtataagatcagaactttctgatttcttgctttgcaattaaaacaaaatcagaatttctgatttaaggaaaaatcagaacatctgattttctatctttgttattaaagtaaaatcagcatattctgattttgtcattgtaattatacaagatgagaacattctgatttcttgctttgtaattaaaacaaaatcagaacattctgatttttcattataattctataagctcagaacattctgatttcttgctttgtaattaaaacaaaatcagaacattctgatttttcattgtaattctataagctcagaacattctgatttcttgctttgtaattaaagtagatcatctgattttgtcattgtaattatattatacaagataagaacattctgattttattaattctataaggccagaaccttctgatttttcattgtaattctataagaccagaacattctgatttttatctttgcaattaaagctaaatcagaaaactccgattttctatcattgtaattaaggcaaaatcagaactattaagatttccattctttttgttctatttttttctgctccgatttcaattttgaaaattaaaaatacaaataaatgcgttaacaatagaatcaaaaagactaaaaatcggttgaaaatgtatgaaacgtgcttttattataaatttatttattggaatataaaggttatggaaattgaaaattagggatatattctttttttgaaaaaatccaagaatcagtgatcatatgtatactttcttcaaaaatgattaaaaattgaaatcgtacgaacatttgaaaatgaaagaaataaattggagaaataattttgatggatttaaattgggaaaatttaaaaaaataaatgaatttgcattaaataaagataattactttccatgctttatccctttctttgcgagttgatcctctaaatattctaatctttcaaacagccgagcttcagagcttatgtattcagctgttagacgagcaaggcttaaataattttaaaaatattcttttttaacttattttcgtttactaaatgagattttgttaaaaaattgttgggaaaatctgccaacgaccaaaaatttctgggcaggcatttagaccataaaagcctgaaattgaaaaaatggcatcaggatagcacataaaaaaacgttttctttcttttcaagtccctaacagttcggtataatacataaaactcaaaaaattccgtccttatttaaaggtacgaacttaataggtgctaggtcgtttcgtcataaatttccttaaaagcaaccaagtttaacattgttgctaacactcgatagctcagctatttctatattagcctgcaatttcaaataaaattatccaaatttttacagtctgatagataaatacctgggctattgaacaatagctaaaatataattgattattatgtcatgttttgttgaaaaaatatttaaaatagcgaattttacgaaacggcccagcacctttgtgtatatatatatatatatagtaccggttttgcaatttttcaacatgcgtccgcaggttgcacaactgtttttcctccgatttgctctcgtcatgcaaattttgggccaaattttcgtccaaaagcccatccttcagcaacagttcacaccccttttgcatcaacaattttttggcctccggatactcgctcagcgcggcccataaatccgcttttttcagcacaaacaaatcggtgtagccaacggaacggatgctggcggaacggcgattgccatgtttgctgccttggcaaaaaagttggggaaaactttttgtaaatttaaatatttaataaaaattatttattattaatcaaaggaattatttaaattatataagtatttactatatgaaagtgtaaatttagagttctataagtatcatttgttttggattaatttaaaaaattaatacaatttatttaatgtgtttttaatttatcttttaattttttaaataaaatattacctggtatattgagaaggctgagttcaccgaaaacagctccttcaactaatgtgtgaaaaattttaactccatcatcagcaaccacttgaagacgaccttttttgacaatatactgaaaaaattaattaaaaaagaaaaaagaataattaaaaaagcaattagatataattttatattaatgtgtttattagtataattatttacttaaatatatgtattaaaattaataaacgcaccatttctcgtccaacgtcgcctttcctgcagacatagtcttttggactaaaaacctaaaaaacaaactttttttaaattaattaattaattaatttgtttttacttgtaactccaattttagcactaattcacccaagagtccagattcacaatccttaaacacatatagtattttaaaattactcttttttatttggacatatatttttatggaaactataaaatttatttaattataaaatttaaatcaacaattaaatttaaataaaattaatattattttttaattttaattttttaggacctgaaaaagtcggactttgcgcagcgtctcaaaatgcacatgcatcgcaatttctgcttgcaattttgtcggcaaaagcttcaacacttcctgatcatcacgaccacccattgcctgtttattctcccacaaataatcaaaccatttgccaattcggtggaccaactcaaaaataggcaaaaaaaaacaaaaaattttaaatatttattaatttaattatttttcaaattgtatttggttacctttttaccgaccgaccgatgcttcataaaagatttcactttgtcaatgtttgtctgaaaatccaatcgcgccgagccagcatttgtgatcagactttgaaaatatggaaaaattttattataaaacacaaaatgccgtaaaaaaagtctcttcaaaactcacgtgccaacattgccgactgttgttgcaaaaaccaaaacgccaaacaacaaatcggcacaaacaatgacaaattcgacactttttattggccatggcacttcgccaattgcggttagcatcagtgttgaccaataaaagctgtacaaataacgacggcccaatgtgtccaaagtgccactgaattttataaaagtaaagattaattttagaaaataaattttattttaaagttttgctaatgagcagttccaaaacattattttcattttatttgctgattaataaatcataattcagcaccgaaatgtgcttatatttttgtatgaccataaaatattccacattaatccttcataactttttttcaggtacaacgaaatttaagtttgttttaataattatatagatcaaaaattctctattcatcactaaaaactgaattaaattttgagctatgttatgatttattattctgcatataaaataaaataatatttgaatctcaattaatttatttttatttaaagcaaaatttatctcaaatgctttattctacctaggatatgaatttttgtgtatgttttcgctggaatatatattttttattcattatatgcatagaaatttattaaaaatttatttctttataatttcaaattgattgtcaatagagcaataaagaaagtccaaatattttgctacaaataaatgaaatttattttgatgaaaacttgatagtttccaaatgaaacttaaattccaaatctacatcacatctccccacaaattgtttcttcccaattaaaaatgctatnttctc

SEQ ID NO: 13116 - DNA, 3480 bp, Heterodera glycines
gggggaggatcacacaatccaaattctttccaaaatcacaggcaaaactcaattcaattatcggggtcaacagaacacggatcaatttggaggccgctttcggcagcaattcggccaaaacaattttcgtggccgcaataattttcgagggtcgaactttattcctttgggcaatcggttcccgagacagaacggtggcgattttcggccaaattttgaccaaaatcggaatgaacaaaattggagaggccgcggaggaggtaattcatacggaggacgcggaggaggcaaccaaggacgcggaaggagcggctggcgtgtgaatgaagtcaacttcccattcatttgctttattgcggttatttcggcaatttttatacccgccactggacaataccaaatttgcccaactcagccaactgagggaattacggtgacaatgagttttccatttccagaggaacagaactgcactctcccggtcgaaacacctccgctaacagtaaaatcgaatttatacatcccaattcgaattccacgagtttttccggcattcaaatgctggaatatcaccacaatcgcatgcacagaatcattccttcgagtcatcacactggaccaccctgataagaaaatcgaaacagaagcatctgtagaggattgtcaggcctcacttcaccatttgccgatgaatcgagtgagcgaaacgagatgggaaagtctgtcaccaattcaaagagaatacggatggtatggcgtaaactgtttcgacaacgtccaaacaatagtcgaagagggaacagcaggaatcttggaaggaaaaaggctgataacatcttggggtgattccttaaaagtcgataagagtcttggtgaagaagggagctggattcggttgccgggcgcaatggaactgcttatgtggcgaataccatctgaagaattttggcattcccacttcgctattggacccgtagtaacggaaatatggccaaataaggcggttgttgtcgatgaacttcagtatacttttccgataagcaaaaatcaggaaaggaaattcccggtgattggagtccccaatgatgctttgaagactgagaacaatgtttatgtacatgttattggtaaagtaaattcgacaaaaataactcgagccagacgggatgccaatccaaagaagtcaaatgtaccaagagccaacccgaccaaaaagccaaacataagaagaaatcaaaacgatggactcccatccaacagttccgtctcgactatggcaattccgaccaccacaattccggtcacaacaaccaaaattccgaccacggcgattccgaccaccacaattccggtcacaacaaccaaaattccgaccacggcgattccgaccaccacaattccggtcacaacaaccaaaattccgaccacggcgattccgaccaccacaattccggccacgacaaccaaaattccgaccacggcgtttccgaccaccacaattccggtcacgacagccaaaattccgaccacggcgattccgaccaccacaattccggccacgacaaccaaaattccgatcacagcgattccgaccaccacaattccggtcacgacaaccaaaattccgaccacggcgattccaaccaccaaaattccgaccaccaaaattccgaccactagaattccggtcaccacaatccgcagtagctcagcattggctacacctcaaagctccactgacaccacaaacaatattccagccactcttaaggaacttaatgagttggcacaacaaattacggatgatgatgtgctcagacacagtgcgcccacgccatttattattcaaaacgagcccagtgaagaaagtccgacaaccgtgatcacaaaaagagaggtgtccgaaagcaacgaagttgggtctgaaaaattctggaaggagaagaatctctaccacgagaattcccgacttagttatttgggatggaagacacaccgagtcaacatacaaaatgcgcgggaaaaatggatttccgattgccatgagcggaataacgctttagcaattgccaaagctcttgctcgccaaatgcctgaagatgcggctcggtcgctgtacaaaagggatgatattaccgccttttggacacagccctcaagggaacagaaatggtcaatcgcactttgcagacagatgaaagcggaagaagttttttgggatcaaaaagttgaaacaaaatgcttccgagaactgcccgtgaaagtcacaagacaaatcctctttgtgaaaccagggacgcgcgatctgacttacatcggtactgaaattagctgcgatgcacaaggaaataatccatgggcagcggagcacagcaacaataactcagaacttaataatgctaatctgggacaccgattcataacggaccaatattcaaacgcacaaaatcctctgattttttttaaccgtggctcaatttttgagtctgagcaggcacgtctggagagaaacttaaaggaattaacggaaagaatcacacgacccgaattggacttcccggaaattgggacaattgatgcaaatcaaacataagttcacggaattccggtcacgggaatattttcgattggagaaattttggttgaaaaaatgagaaacgagggagaaagcctcagaaggaaggcagaagaaacaattgagaaagggaagacatggattgaggatccaattggcataataaaatacgtcaaatggattgggttttctattttaatcgtcttaattgccgtcggctcatgttttatcttcggaaaaattaaaatttacggcactattctgacgattccgctccacatgattggcaccctgacccaaatgttaatggattgtttcacatccggaagaaatgtcgtcgaacgtgttcgacacccggtcgttatggaggtggaactccggtccttctcggaaccttccgcaccgccggaggagcaagcgctcgaacagactgcctacatattgaattatctgccgaaaatttgccaaatccatcattatcaacgccgaaaaaagagatgctacgtgaatgtcctaatcaacgggaaggacataaaagcattgttcgacaccggagcagatgtcacttacattgagctctcaactgccaagaaatacgggctgcgcatacttcgaggagacttcccacaagctcgtgctgctaattcaacgtctataaattttattggatctgctctgacgaacgtcaaattcggagaatttgagggaaaattcccaattcttataagcgaggacggaggctgtccatgcgccgctattattgagactgattttatggattttatcagcgagcaaggagaggaagaggaaattggtcttaatttcaaacagggaattgtccgagtggggcacgtccaattgcccatgattgcagccattaatattgaatgccgaccgatcgaagt

SEQ ID NO: 13117 - DNA, 3853 bp, Heterodera glycines
tttatttatttttgtctatctcttaaccaaaaaaacttctttctgctacatattgtcagaatgagccatgggataaacaataatgtttgcttgtcctggatttttgtccagaaaatgcaggtcaaagtccacattaagcagaattcttgttttttcgaaataagggcatacttaaaacttacttccgtataacgggtggggccgctaatttcaacactttcggcattaggtggatgataacagatcagaaacatactcaaaacaccagcagaaattcggaaaatattcaacagaaataattttttcaaaatttcaattatcctcaaaaaaattttaaatttttcttaaaaaatttaaaaaaatcatataacatttttttaattcttaaaaataatcaattctctcctatcgtcgtatttcatctgcttattcaccagtgccgacgaggcgtactccgtgccaactgagggcagaatctccagcgacaaaaggtgaagtcgcgagtcatgcttttggcgaaatgtgaattctgcaaatttcacacaaattctcgcgggaaatttccccacgacccgggaacattaaaagtgactataatgaggaattgtcaaatcttgcacgacaaatccggcaaattctgtccgtccaaaggtggcatcccctgtccatgaaaagaaaccagaccagaaaatttttgattttgcgcttctctaccctcgatgactgtacaaaaatgttgaaaattgccttcgcaaatcgcaaactccggcgcctcaacgaccaatttgccgcccgacaatccacacacccgccaatccgtaaaaatgtgctcagcgccggttctgcctccggcattcgcagcagtgcccacactttgtccaggcgcagagggcgccgcccccgtggggcagacggatgccgaattgggactgaaagtggctggtgcggaagtggcgtggcagagtctcaaaggggaaaagcatattgaacaatttagtggttattgtagaggatcttgacgtaaataatagcgtaatcttaatttggaaccacgggatcttcagtctcgataaatcttgattcgagtctcaaaaaattcaactgccaaaaaattaggtctacgattcatggcattattcgacgttttgaattgcaaagataggcacttttcccgacaaaaatctcgacttgtcttgacaccgagtcttgaacataaaattggctgattaattcccgattcatacattcttcatgatgatgcgacggcaatggtggtcgaatgccgttcccatgctggattttggcaatttcgctatccgtcgtccattgacagcctcggccaaaagagtccgattttgcggcataaatttggccacattggcactcgcttttttgcttgttgtacccggcacggaaacatggcgcactgaaagtcttttgctgcatattttgacaattaaataacccccaagaattcgattttgtttattctgatcgagccaatcatatcaggtaccagaaaaggtcaaataaatcgggattgggattcagaccagaataatattaccgggactcaaatccttattttacagagaatccttatcctgagaccgggattcaaatcccgtttggggatcagatcctaacattcattttaaaaaatgtcggaattgtgtcaggattcccggtagaattccgatggacgctctcctgttcttgctctaatttatataaattctcgaattttgaaattctggtccgtggtttgacaaccgaccctccgcattccggcgcacagttggcgcatcccttccgcaccgcgaacatttggtcgctgccgtttccgcccgtccgcgccgctcgcctcttttgcgcctccagcagtgcgtccatgtgctgacactggcctttgacaacaatttcttcgacacatcccttgaaaggagattggaggtgggaaaggcgtgagataattagcgtaattagcggcaataattgagaatttacaaataattttagaaaattaaatttggttttgttgcacaattttagcaaatgtttgtacctgaattgaaggtactgtcggcaatttcgttgccgacgagagggccagaggaggacgaagcggaatattggtgttcaacgccgacggaacggcgagggaattgtcggaggaggaggaggacgaatgggcaggggggattttccaccacccccccgcccaaccgcgggacccgaacaaaggagggaagaagcgccgaggaggacggcgctgatcgaaaattccggaggggacattcccgggtaaaggccattgccgtggtgaacgatccctttttttaaatttgtcgacattttcacccctcttatttctctctttatttaaatttttcatttcctttcacttttgctcatttacataatgttttccttcaacttcaccatttgccttttctttccaatgtttttgcccattcacatctgcctccgattttgattcctttgttcacactttctccgatcgccatttccattgggccgtttttgcattcatctcattttttccctttgtttggcattttttctccccgccgatttttgtacccttcggcgtcgctcttttgcatcttaatctttgccccccccccagggggaaattgtttttggtacttaagtattgtttatcgtctatttgggctcattctttttcattcctttccattttttttacacacacattcacctcttgctcttcactcgttttcactcctcaccatctttttctttttgctgaatcattcccaatttttgaccccctcaataatccttatcgcccttcccttcctccaattttcaccatataatccatcaacatctcgcatataatcatccaccaatttttgaccattttatcatcatcatcaccaataaacatttggtcggaaaagtgttgaaagggtcagagggcaaaaaggggggaaaaaatcgctcgggaacgaagtgaccaaaggggagccaaagccccgagaatcgaagcgggggacaatcccccgcagagcagcagcaaaaagggacgggagccagttcctggcggttgacgcagttcgcagccggaagtccaactcttctcccgaacctcaaccgagagcgccgacagctcttcaaaaagtcggtggtgccgttacagcaacaaccgcaaaccccatcttgtttgtcctccccaccccctccccagttcactcccttgggcacggacccaacggcagcagtagcagtttcaggaaattgagtgaattgggcccgagggacgggagagaaactcccgcgcacagaccccctagccgtcagcgccggccgagtttctttgccacaaacaatttggtgccgttagcagggggcaactgcagccatcaacaatcggtctacgagcgaccaacgagcacgaattcgagaagctaacggcaatttggtgccgttagcagggggaccagcaacaacaccccggtcgcaaaggaccagcacaaccaccaacaacagcacttcggtcgccgaggaccaacacaacgcatttgaacaaaaatggagcgacacgacgacgaccaattcaacgaaaacgcgaatcagggggatcctccccctctgatcagcaggacgagaggcgagcgatcggagctcagccagccaagcccaagaaggtcttggaagcgcacggacttgggacaagccaaacgggtgtgacacccgccgtgacgaagaatttgcgcagtggactaatcgcagtgcggtcggcacgggaccaaatcgaaagagcagcgggcactcttgccgcgcgaatcgtcgaagcgcgggagct

SEQ ID NO: 13118 - DNA, 3170 bp, Heterodera glycines
  unsure (1)..(3170): unsure at all n locations
aacgccgtgttcccatcagaatcgctgacttcgatgtccgcgttgccctcctcaacgagcaatttgactgaaaaaatagaaatgaattgtcattgattaaggggcgcttttgggtcaaattttgaaaattttagggtaattttgggtcgagcggtgccggtagggacagccgaggtctctaagaagaatttgaataaaaaatacaaaaccaatattcaaaatattaaattgcaaatgtcactctattaattaaaagctgctcgtcccgttacgtataattttcaattaaaatgttttaaaaacccaaattttttataataaatttcttaacgctcttaaatttttttatagtttacaaaaaataaagcccgaacttttcaaaaactgaccaactggcaaattgccatcgccacacgcaatttgcaaaggcacaatgccgcgtttgtccctgctcctctgatccactttggcaccgttcgcgaccaacaatttgcacagcgccaaatcgcctatttgggcagcgaaatgaagcggtgaaatgatggcttaaaggaagttcatgatacgcaacagatgacgaagaaatcaaacacaggaagcaacattttaagcaagctaaacgattttgtgaaattaataaattcgccactctagacaaaacgattaaaaaaaaagaattgttgcttaaagttgcctcagacgccagggatgatcacagggtaaagggacaaaaaaatgtggtaatttgattgacaatgaacaaaggtatgtccaaaaagtcttccggcgacgcttcggccgacgacgttttgggatgcatccataaaaacgaatggttcaaaaaataagtagaaatcaaagaatcctccccttatatacacaccatttcaattttacctttcagttccaataagatttgcatgtgtggctaagtggtttttgtaagatggtaaagagacaaagagttgaggttcgattccgtgtgcaacatgagtatttttatttattttttgtccaaaaaaatttaaaaatgacgctttgtgaaactcgtttttgaaggttttccaatcaaattgggtaattttggtatcattcgaaagctcatggagagctgaagctttttctaagaaatgttaaacagttggacgtgttagaaaaaagataaaggcgttttaaaatttgtcttttgattaacttttgaatttaatcacagataacagatactaactagagattaaggtgtattaaaaaaagaattggagaatattgaactatgagaagcttaaacaatatttcaacttcgacaaaagaccgaaacgccttaagtttttagatattttaaatccttttttctttttatttgattaaaattaatttttgttttgcaattattgtaaaaaattagtccaagattttggtgcctgttggcaaatgaattttaatttgtggacaacatcataaattttcaattgtgctttattatattagttaggtttattttgaatattactggataaatatttcaaaataaaattgttaaaaatgtcgcccatgaatttggtcagtcacatcgcaatttttatagccaaaaaatcattaaaatgtaaaattgtccatctcattttaagccccaatcgtagcttatgctttacctttttctcaacttagataaaaaatcgttcttcactcatttttaagttatcattttgctcaacaaaaaagccaaaaaaggattaatttattcatttgaaagtgaatatttaattgattgataggtcacaaataaatttgcctaattactttttgtctaccaatgccgccttataaaaggcgaacagattcagcgcaaaacagcaaatgttcattcatttatttggcagtgatgaattttattttccaaatttacatttctttttaatatgaatgttaatttataattttctagatagcacaatacactttctttaatttgaaaaaatgtcatcatccatcgcttcgccagatacatttttgcgttcagaaactgatcaaagtaatggaaaaatttttaaaaaattacgaaaaaagaaaataattattaaaaataaaataaattcaaaatctaacttttatcagcaccagcagcatcagcagcagaagaagtgggcaaatacgaagtgttcagttggcacggaaatttgagtgatcaattgtcagctgaactgttcgtcactgatcagcagctgctgaaggtgggccatttttgaatggacaaatgatcaaaccgcggcgggaggggaggggaggccaaaaacagagaaagatttatggaaaatttagttcaaaatttccattcgtttttaaaggttttccaatgatataaaattaaaaggagaaagggccgacctattcctcgaacaatttgatggcattttgccaaaaccattcaattataaaatgaacacaaattacaaattatttattgggctgtaattatttgttttatttaaggaatgccgagaaaaacttgcgaagtccgaattgaaggaaacgaaattgctgtggaataacggtgaactgaatgctgaaaatgtgagcaaaataaaaattaaatttcagaggacgaagtggctaaaacagagaaaatttcacttttttaaatttagagggctctcaaagcagagttggaaaagcagaaactgatgacggaacacattgaattgaaggcaaaagtcttcaatatggagcaggaaaagcagcaatttgagaaaaaatacggtagggaaaattttaaaaataattataaatttccagtaccgtaccccgagccttactgttaaaataagcatttcaaaaagaattccttaaaaattcatattgtagtttctgtggatgtgttcaattcattggcggaacgcatcaaacgattggaaaatcagcagcaggagaagagagaggaggacagaaatggtaaaattgaaaaaacggaccgtaaatttcaaaatttcttctaaattaacattcagctgaccgtttaccaaaatgcaattaaatttcagtttctgttggccaattgttggagaaatttttggcaggagaaaagcagcaaaaacagcagaaaaaggacaacgctcagcagagattggatggaaaatgttctgtggtggacaaaaacaatgtcgcggnngtgg

SEQ ID NO: 13119 - DNA, 2075 bp, Heterodera glycines
actaaggacggaaaggcaatcgcaaaattaaggacaacctttctaaggacggaaaggcaatcgcaaaattaaggacaaacgaattaaggacggaaaggcaatccaaaattaaggacaaacgaattaaggacggaaaggcaatcgcaaaattaaggacaaacgaattaaagacgaaaaggcaatccaaaattaaggacaaacgaattaaagacggaaaggcaatccaaaattaaggacaaacgaattaaggacggagataccatcgcaaaatggaaggacaaatgaccgaaattgaacattttataaacgatgacgaagagacaaataaataaataaaatggcatttgcttaatgaagcttccttcactttactttggcccatcgctttgcctttttctcttgcttttgcaactctctcccccattttccttggccatcgtccgtattctgtccatcaccagcacagatgtgtttgtttgtccgtggccaactgacggggttggatcactttggatcattcccagcagtggcccctcccctctctcccttcgatgatggtcccttcctttcccctccccccgataaatcttttctctctcatcgcctgccgggtcattccttcgtccaattcttcctcaactcccttttccatttctcatgagttttcgcttaaatcgccgccgttcttcgggcaccggaagcaatttgctcttccgccggtgcagcatgtcacagcgcgactttgaacagttggcaaaggtcagcagggcaaaatgcccgggggcgacgaattcgttgtgtttttggaagaggcgacaacgtctgtccgattggcttctgcttccgcttgcgctgttctcccctccgcttgttcttttcctccattcccatttgaccgtgccttttcatcgtcaggtgccctctcctcctccgtttatctctcatttcccctttttttgcccatttagaccctttttgaacattttttggcccaaatttgctcccccgtccccccaattgtcgtcattttaatctcacaactccaattgttctttctttggtttcttccgtcgaaagatgtccaagtgaataccgaagaaggtcatccgatgctcaaacattaagcaaacaattcacaaccgttgcttttgcaggtgaatccttcagcacgcgcttcacctgtttcgagtcttcccttctcatttgtttgttctattttcttggcgttttactcggctttttcccaggcaatttggtctgttttttaaaaatttgaactcggttggcttgtttggggcggctttttgccaatttggacctttcggcagatattcgcccattgggtcggtctgatgttctggctaagtctgctctcactgttcgtcccccttctgctgcttctgctccctccccgcctctcctcgtccgtctccccgccttcccctgccggcgacgacttttccgtctctgccgccctttctgtctcttccgaagcccttccgccgggctctcccgccccatctctcatctcccaacttttctacggagtccatcttcagcccgttctgctgaacgtggacctcaaggcgttcctcaccgtccgcgtgtccctttccctttgggcgctgtttctcatttccgcccaattcgtccaccacaaattcgtcctgactctctccgtgcccactttctctccctcaattcctcttctcaccacctccgcccttcagtttttctatatctttcgtcgccaatgcttcgaacatttgctaatcgatggttcggacaacaaaaacgacagggccggcttttaccgccttttttccgtgttggtttttctgcccaccgtttatttggtcccaattagcatcggaacactttcaacggtaagccaagcgattagaacatttgaatgggttgtgtttcactctttttaaggatgtttcgcaacggccgacaataatttacgtgggactctttctgatcggtcttttcttccaatgtcttaacacggcgattgacttgcaaaggcacaaattccgaagctcaaacggcgatatgaaaatggcgggaaa

SEQ ID NO: 13120 - DNA, 2077 bp, Heterodera glycines
  unsure (1)..(2077): unsure at all n locations
gtttatcttccaccttccccccccttttccatgtatgtttatggccaaatcagtttttaaaatattcttaggattcccctccaaaatgtctgaattcagcttatctcttcacccgtctctttgaattggccgaggaagagttcgccgagtgttccatccgatctaagcttctcccctcttccgactcttcatcgtccctcggcacaaccgccctcggccctcttattagcaaaccgatggtccgcaacataaatttcgttgaggagtcaccattaaattccgaagtaaggaaaaaaccaaaaatataggaatcattttcaatttcacaaaatttttgcccttccggtgggaagggtcttttgaatttagcaaggggtcaaacttgtaagccacaattctttgagccctttgtccgcgtaaggatgagaagaaatccttataaaattgtttttagaatgatttgtccgattgtgtcaatttcatcctaaaagaaagtctcaatgacaacgagggaccaaaggccgaggaacaattcactgaagcacagcaacgaatgtttgtgcgtttttcgtcgtttttccgcttgtgccgttcaaaattcatttaattcagcaaaagttttccaatttgaagtcggtcccttccaattccttcgtccgacgactcgccgtttgtttaatcgagaaaatagacggaaattttgtcgatttttgtcgtttatggaccaaatttctacaaattttgcgtcatcattgggagtacaatttgaacttgccaaagtcagtctcgccgattcctcctttatttactttgcttttgagttgtcagttttgacactgatgaaaggccccaattgtcgtgctgtctcctgcaccaaaaactccaaatgattaacttttgcatttcggtgaagaaacgaaagcacaaagaaatggaagcgaacgaaacggagaatttgggcggaagtgccaaagatttgccagcaaatcgaaacactgcgggtaaattcggtgagattagtgggaaaaccgaccgaagacagaccgatttttaattgcatcttgttaaattgggagtgaatttacattatcattttggttcgttgaaattactctcttaagacgacgagtttttcgatgcgattgaatcattcgatcaatttgacgtcgccacttcgtcggagtgccctcgggggagaagccttccactcgattcgaatgaatttttaaagagcaatccaaaccaacgaatttttgttccttttactcaggtggtcattaattgtaagtaaattcgctgaatattaccgcaaaagccctttaggaggagggcccaatgacggaagaccaaattgagcagagagagtcctttctgtgcaatttggaggacgccaatttgaggacgaaggcgcagtccgagctgttgttgtccgacatgcaagcattcaaagtaagccatgtttttgtctaagtttttggttctgtttaaggccgcaaatccgggctgtgaattggtggattttttgagatggcattcgccaagggatctgacggaaggtgagggggaggggaggagaggatatttgacaatgatggatcaaaccgtttaagaaggcgaactctctgatcggatgaaaattgctgggaatttttggcaagagacttgggactcggcccgtgcgattcccgcgacgcagcagcaacgcctcttcaacgagacgcgagaagttgagcaagtacagacaaacatttgaagggtttcgcacccaatcgaattactttttagattcttcaatatttcgcgaacatttgtatcaaagaactcgttgaacttctccttccaattgtctctgtgcatatggccgagattttactcacaaatggtacaattttactcgtaaatatttgatcggattcatacaaaatcttaaaaataacatattttagcagttttcgctgaaaaaaaaccatttatgcatttccccaaatttagccgccgaatgttgggatttggttgaaccgnaaatttgaaaaacttaaagcgaccttaatgtggcaaccaaaactggtgatatgga

SEQ ID NO: 13121 - DNA, 2827 bp, Heterodera glycines
tacgtttgctgtcgcgtgggcaaagtgcgcgttgatattggccaaaagcatggacaacacggcgggcacgccatcgcacatgtatttggtgcacaaacaggcgaaatgggtcatggcctgcacaaaaaaataaataaataaaataaataatggaataccatttattattaagcaatttatttaaaattaaaatatcgaaatattttaataaaaaacaaatcatatttttttttacttattttacgagaataaaaattaatttaataatttgtttttttaaatttaaattcaaaataaataaaccaaaatatcttataaaaaataaattataaaagaaattaaattttttaaatagtgatattttatttatattcaaataaataatgaaaaatatttttaataaataaattaaaatatttttaataaaaacaaatttacaacttttaaaattatcgctttttcccttggcattgtgccaattcccccccccccccctctctctctttcccatccacctgataaatttgctcaattccgtatcgcattgcaaactcatccacaatctgttgaccgttttcgtcaaaatacagtgtccatgccgtgtcgtacgtgttcactaccgtatccgtcgtgccggccatctgctgttgatactgtttgagttggtgctgctgctgcttctgtgggaggcgcacctcgtcatctttgtactggtactgaatttcgtcataaaaaaagcatcataaaaatggttataaattaaaaaaaaattttttattataataattttgaaaatattttaaattaggtttagaaataaaattaaaattttttttatagctttcattggttgcgttgaaccggcaaaaaatgcatcataaaatggattttaattaaaaaaaaaatttttttgaaaatattaaaagtaggagggtattaggtttaaaataaaattaaaaaataaatatatattttaaaaaaatttaattaaataaccttccttgttgaaggctaaaacatgaagaaatttttgaaagttaaatttgttttagaatttcaaatacagtccgatgcaaaataaaatccaaaatttatttattttcaaaaatgtcaacatatttataaaaataaaaaaaaatacagaattattatatcagtttttttcaactcaaattgctactaattaattggaaaataggcccccgggggctctaaaacggtaaatcatttgttgcgtgtgtgtaccgtaccaggaacaaatgctcatgaagacaggtgtactgtagatggaacggtgccagccgctcctcgccattgatgtccactttgatgtgcagccgaatggcaccgctgacaacagctgatgatttgtcggtccttttttcttcaaacgaagaaaataacatatttaaaaagaggtattgaaaatttggacaactatttaaaaacaaaaaattatttaataaattattgctgtatccgcagcattcaaaatttcatattttgtgcataatgtacattgccctactttctcccgaccaatcccgtcgtaaacttatccatctgttcatcccatcccaagccaatcctatccctctcatttccaatgttatcgtgccatttcttcctattcacctctgttgcatatgccatccatttctcttattcccttttgtgtttttccgtcattacccctcatcctatccaaagtccatccccattgtgccagtatataagtccatccaatttccccctcggggactgcgagatgtctgcggtgggtcagtctgtgccgttccttgcctttggcaatcctttcccaaataaccaattgcactgacccacccaaaatgctctgaggttgttgttacccaaacttatttccggtttttaacttataattatttgtcaatgcttttccttataataaattcctctctcttaaaacggtaatttgaaatggcttgaagccttaaacccggggacacaacaattattattttaattaaattatggaaaacaaatttatttctcaataatttttagtttttaactttgaccgattaaataataaaaataaaataaaataaaatttgtttataaatatatatttattcaaatttcccaattaaataataaaaataaaataaaacttgtttatatatatatatatatatatatatatatatatatatatatatatatatatatatatatatatatatatatatatatatatatatatatatatatatatatatatatatatatatatatatatatatatttcaatgggataatagaaagataaaataaaaaattaaatgttcgaaaactggaatatttaaaatgatgataattattttatacaagagataaacaaaaattaaacataaataaaagtaaattaactatagttaaagataaaaaagattacaaatttttagaaaaatttatatttattttttattaaagtggaatttgataattatttacgcaatctaatagaaattgtttttaatgaatattattagcttcctagctattcttctagattattattgaacctgataattatttaaatacacacaaaaagtaatgtttacagaatgttaggtgtagtaactaattattgtataattaatataattttaaaaacgaaattaagcaagaattaataaataaaaaataaaattaaaatataaatggcaaacagaaatttgccggaattattacagtacgaaactaactcatcggcctcttttaccatttttctttccattttccaccatttgaaaactttatttttaataaaatttatttcttg

SEQ ID NO: 13122 - DNA, 1207 bp, Heterodera glycines
  unsure (1)..(1207): unsure at all n locations
tttggcactccattttggactgccctccaaaattgagtttttacgacacgaagagcctgaaaaaatcttcaattaaantaattaattttattaaagagatttttgaggtctttaaaagttaatatagctcataaaattttccctcaaattttggaaatttcgcccaaaacaccgagcacatgaacnaattcaattttccaggcaaacattggcttattctccaggattttccagattccagagttgggttattttcggaatattaatttcaagtacactttccaggactccatcgactctccctcctattggccccacctgctgctgcgttttgtcgtccacgctgaacgcgtccgaaatgcggcggaacacttccggcttgttgcgctcctgggccttcattcgatcgcggatcactgcaaaaaaaaatccaaatttttcaaataaaatttatgtgtgcaaggcttacgtatttttgattttttttttctgaatttaattatttgccaaatacaaataataatatttattcaagaaatatatatgtggaagaatatgatttttacctaacaaaacccgagaaatgagttcgaaacaaaaaattatttaaaaaacaataatgtcagaaaataaaaaaacacaatgccaaagccaaagcaaaaaaaaaaaggaaataaattttaaattaaaaaaaatcagcacggcattcaacccattgttttaaaaattcattttatacaaattttaaaattgtatttcccaccttgtctggccaaaccccacaaaaggccctcacactcatagcaccagatggggggagtctgaaaaattgtgccaacaaataaaaaatttaatgccaaaattaaaagaaaaaaaaatgccaaaaaagttggaccattaagccagtgccagtctcacctgctgaaaatttgttgtgcaaaaattgtgcggtgttgtggtggcactgatcggatagatcagtgcttgaaggcactttctgtagacgagttgtttctgtgttaaaaaatatggagttaaaataaatcattaaaatatatttttatgtgtttttaaaataatgtttaccgtattttctcaaattatatgcccgtctccattaatcccccccccgtctccaattatcaccccctttctgaagagattgaaaaataatatacccgggcaaataattagagaaaatacggta

SEQ ID NO: 13123 - DNA, 3140 bp, Heterodera glycines
  unsure (1)..(3140): unsure at all n locations
aggaatcacttatggtgcatatccggatttctgtgacatctaaaagtcccggggaatcattcatacgcaaagacgtgctggaacttcgtcatcggttccatggcattctcgaccgcttctttgtattcctcaattttccattttcgaaagggcggcgtcgaaagcttcccacttttataccaatcgtcaaagactttgtacatattcgcacgttccttgagaagattccatcgtttcggtcatcatcttttattctgttttacctccgaatgtccacaattgtaccatcgcgacatccaaaagccgtacaaagtgatatcattgaaaatcaacgaggaagtgggcactaaacggtgtaaatgtggtaattaatatcggggtaggtggaaatagacccaatttccataccttggaccgggtttttggacattcctccgtaagtgaccatgcacccgccattggccaacgctctggtaaggtaagtcgtgcttttcccaccgacgcaattcaacgccaattttgctccaatttttgacttcactgccttggcgaactaaacgaacaaaaaagcaattggaagaattccctcctctttcggtacctcctcctccgtaaaaacctcagttgcccccaattgtttgagctcatctttcatctcgttaatttggggtcggtcacggacgacgctgatcgatttaaagcccaaatttcgacacatctgttgagggaaaaggagaaaaaggataaaattacaaatggttacgtttcgcattaaattttcatagttttggttttgaaattaattgcaatttgcctgaataacgaagcgtccgacagcagagtttcccccgttttgtaccacaatgtcaccggggaccaatttggcatagtcatgaagcattcgataggcggtggacggattcacctaaaaacaaagatttggaaacaggccgaattaaatcagacaaatattttgcatttgtttacttggagcattgccgttgcgattgagtcgagttgcaaagaactgtcaatagggaacagttgagtcgactgataaatgccgtgggtacaccaagtgccaaggccggcattggtaggaagaacgatgtcgcccactttcaactctcgaacgttggaaccaatctgaaaacggcaagacgaatgaatatttggtgcctgattattatgaaaaaccttctcaactcgggcacagccttcgttgcccgcaacggcaggcaaaggtggcttaatcggatacactaaaaaaggtttaaaacgtaagaaaaacatgacggaacgttacggacccccctgaatttgattgatgtctgacggatttatcggactggccatccatcggacaaaaacttcgtttgctccaatggcattttggtcgattttttcgttgctaagtttgaggacctgagacaaaataaaagatatacggcaaaatgatgcatatataaatgaatatattcacctcagcgggattcccgttttgctcataaataattttggtcgaagagcacaaacggcgagacgtccatgcccaacgatgcacccaccgaatattggtagaacaattaacacccgcaaacaccatttatgattattactaaattaaagcctacgtttttttcgtgccgtagaaaatttcgctaattgtaagttaggtacttcggtaatagtaaaaatccaatttgtactgccccggaatctccttcaataccgtttatagtgctattgaactttcggaaagtcctttcaaaaatttttaggctttataggcgctaaaaataaaagcctagaagataggcactaataactcgaaaagtagcttaacaacagcccaaaaaaacatgtttttcgtgcgtttcaggccacgggcagctcaggaaaaaataggcttttgcctaaaaattggaaccctatacattagtaacactgccaatgcccataacaggtggttgctgcgcatgaaatttgcgcctacgtccaaaaagggatttttcactaaaaaaatgaaaatctattggaaaacagccagaattgcacacacattgtatcatttaaacattattcaaaattttgggggcaaaggtatagattattggtccctaaaatttttttttaataaaatttgagaaaattgtttttagggatagtcttaggcgcaaagcacgaatccggcattattttggctgtttcaaaccccgaaccaggattcgaacatttggtaatactgtcgatggtaccctctttcttgaaaaattttaatttttttctaaaaataaagttgtttcggggtttcagggtcgaagaacccgattctgacatcaatttcgaccaaattcgaaccccgaacccagattcgaacaatagttcgaaaatataaatttctcaaactttacatttttggttaaaaatacttagggtggagcataatttttgatacccaaattttttccaattttaaaaaattcataactccgttatttctgcgcctatttaaatgattgtttttttattttgttcttcatggtgtcctcttttatatcttactatcgtttcactttttatttgattgatagatttttctgccttttttcccgaccatgccaaaattgaaaattggcccactaatttttctcgaattttttatggtcaaaaaccaaagctgatataacaaaatcttagtttttcactacaatttagaccagtagaatccaaatatggccttaaatgggactatcttttcaacctgagcttgtactgctccaactccatgcatgaagttcgagctgtacaggtttgttgcgatcccagagaccaaaactaagaccatattcgaactcaacatacccgatttaccttgtttaattaaattcagaatttccaaaaccacttttaaaacattatgttacttggtggtcttgaaaaatgccgtttttggagaccactttcagtctcagctctccaataattcaatttttgtaattaaattttatatttttgtgttcttatagtcctaactttgctctatttatcactatntctctggctctgtatctcttttattttctttaaatcagnncatcaaaatacgtacctatannatganncattttacttactta

SEQ ID NO: 13124 - DNA, 2241 bp, Heterodera glycines
tgttacccaatgaagttttaccttttcgggtggaaactttgaaaattaaggacaaaatttgcgcacagcttagcgattggttcatccgctcgatggaagagcgcaaatgggccgaactcaccgagggcatagactttcgcgacgaagtcgacccggtgcgtcacctcggcccagcgctgtcgcccggcacattgttcgaaatgcaccgacaaaacgaacacagcggcggcgaagacgacaaaagcgggacaaagtccgcggaggaattccatcggcgagagggaaactccgtgttctatgcaatttgcgatgaaagcactgcacaaatggcatcaacttcgaggtgtaaccgaatggaaaatgggggagacaaagcaattggaaaaggaaatttaaaaccaatcgaactcggtctgttcagaaaaaggaattttatattgttgcaattgttgggcattacccgtaaaatttttatttggttgaattacgaacagttaaaaaatttgggccctgaaatgtttttgcttccacaattttggtctttgacaaaaaaaagtaactgtaccaatgcgaaaaggaaatcagtttggattttacttttcaattgttgacacaaaatgccaaaggtcttgcgatttgtcggcccgttgctgtgacgtttctccgccacctccgccgatggaccgccgacgacggcacagcaacgaattgcggcaatccctggaaaagggagccgaaggacaaggactgcttgcgaagcggacgaacagcattcagcagctgatcagtgcactgtccgagaattcgccaccgtcgccaaaagttagttggccatccatcatttaaatgtgtattttagaatagatttgtgtgatcgatgaatggttgtgccgattgatcacctttttaaatagcaattttattaaattaagcgctgatttgtcttctcatttgactgttttttccgttcagtctttgcgtcgtttcgatgcgttgcgcacttttccctttccatcccttcgcgttccgttccgaaagtggcgaccgcccaaaaaggaattcatttatgagcactcaaaaccgatggagtgagttggggacaatgcgatgggcggggggagagaacgggcggaattgagacggactggaaaagtttttccatcgggcagtgggaacctccccaaaactcctggaccgtcgctgattaccaccccatatttgacaaatagatagagccttcttcaaagcctaatttgtagtatttgatcaactgtaaaatagtcttttggtccgccgatttctcctctcccgcctaaaatgaaaaacattttcagtttcatcacccaattggcccttcagaagcaccgctgcgcgggttgtggcctcaaattggaccacgtttatgtgaagcggacgctctattgccattacttctcgaagttgttctgccagtgctgtcaccaggggacaaaagtgcgaaacatttgacagacaattaaactgtcaaatcaacagtaaattcatttagacgcgaatccctgcgctcattttgcacgagtggaacttcaaggagtacccagtgagcgacattgctctcaaatttctgctggacaacgccgaccagcccgtgttcgatgtccgactggtcaaccccgggctgtaccgtcgtgcaaagaatttgcgcaaatttcggaaattgcgcgtcaaaatctcacatatgtggcccttcgtgcagatgtgcaaattggcagccgaactgatgacggaaaacggaatgtaagtgcactcttctattctggggaagatgaaaagacaaaaaaaaaacggtcccctaattacttctatttttgaaaaatcctcttaattaaacagtcggttcgggcagccgggaggcattatgcgtatccaatttttaaactattttttatttttcgcacttatcatactataactgtttgtgttgcttttccccttttttaaaattttatttttatgccttcaaaaatgataattcgtttagccttaggacaatgttcgcctctgtacccaaacgctttttgtcgttggagtcggtggacgtttactcgctgctcgactttgagcgaattgcgaacaaaaatctgatcgaattggttgaaccgttggctttgaagggcgccgcgcacatcgagaattgtgaagtgagtcgtccccgacggcattttccgagggagtggcacggcattcccccccccccccccc

SEQ ID NO: 13125 - DNA, 1534 bp, Heterodera glycines
ggacagatcggcttgtgggtccgattgaacaaaaataaaatcttatcacccgagtttttcactttttttcatatgcttcgcttgtgtctttccatccctcttatttcctcctcttttttgaacatagtcgcgttaaatgattgaaaataaatgacactgaaaaaccatcaccaagcagtgttttcataaagacatttccctcaaaaaagaaatgaaaataaatgtttgaaaaatgattttatcgaagaggtaaaaaattaaacaaaatgttgagaggaggtcctttggaataaaaggttgaggtaggaagggggaaaggaaatatgaggtaataaagttagtaaattggtggcttaaagttttttgccgatcgattgcgactccgtccgatgcttagattaaacgaaaatttgaaaaatccgaacggactcagcaaaaagttggccaaaatgtgcccgattaagcccaaaaagcatcggactcgccgcaatcggtcggccatcactttctctcctcggcacttcgtccgcccctttttcattgctcttcgccagcgatggcgtcgccctccctttcctcgccgtgcggcgccctttccttggttggtccgccctttttctgttctttgttgggacattcggaggccaaatgggcggtcgattggcacacgtagcatgccttcacattcttttgcggcattcttttgcattgcgacgctttgtgccgtccgtactgaccgcaattgtaacaactgaacggaaaaacaaccgaatgctttcaagaaacaatttgaaaaattctcagggtttgattaaaaaaaagtaaaaaaatgtctattttttgaaaaccacagaaatatgtctagatttctaaaaatccggaaaagtttttgcgccagaatcttgattagcgcctaagactacaatagaaaaatgctttcctttgttcggttcatgaaataacggaaaagtacccagggttttatttattttcgagggagaataccgaccttgaggagtcacataatgcgggggggggggggaggggaggaattatgcccaaatcggatgccataaaagcggaccgaatttccttctccttgcgcttgcccagcgggtgaatgcgatgcccgcgcagaggcgcccctccgatgccgcacacttcggccgcctccatgccgcgcttgccaagctgcacaatgaattccacctgttccccctcgtccaacgaacggaactcgggcattttgagcttcgactggcaaaggggcaaaagccgattgattgatcagtcagtgattgggggaattgagcaaattgccaactgctgctgcacctgatgtacgaacacgtcgtccgcgtgccgcttggcctcctccatgtccggcacgatgaagccgtaccccttgctgacgttgaaccatttgcacaccttcatggcaaattaagcaatgaaaaagcaaaacaagatggccaacaatggcattttctctaatgggttaatctcatggaccaaaactgtactaatccatgaa

SEQ ID NO: 13126 - DNA, 2618 bp, Heterodera glycines
ttttaattaacaattatttgccatttcggcggattgatcgttccctagttggaacaactttgtgtggactaatttttggaactgcgccttctctaggggaggcgcaaaaaatatgaatcgcccatttcggctgcttgtattttctttcaaaggacaaatagcattacaaatttttggactgctccttctatagggaaggagcaaaaaacatcaacattaaaagatttttgattaaaaaaattagaagatttagcaaaatcttatttaaagattgtaaaaatgtacttaatctgctgaaattagcattgtcgaaaaatggggacaaagtgtcaacgaattgtacgctgaaaatgcaaaaaccaataatagtgaaagtgttttaaaactgccaaatgttccttccttttatacctttgtctgtgaacccacaaaaaaaggatgtgcaaatttttgtgccttttcagtgggattcgatggagtataaaagcgttgcatttttcctttcccaaccattcattctccactccgttctccgtcattgtctctccccattttcggcaatggtactgaatttttaaaatttttttttgaatcttatttatttttatttttccaaatttaagggaaacatttttggctctgtcgctgctgatgaagacaattttgagcaacgcactcgccaattcttcgccttcgtcaacgagggaaacatcggacaattgcgtgcgctggtcgactcgctggacgcggatgagttgagcattttgcagcggatgaaccaaccggatgtccaaaatcctcgacccgctctcatcaacgcaatgctacacaagcacacagaaacggcagttttcttggtaaaagaggggtttttgtttgacggtaatcggcagcgattgatttcccccattttaattcagttggagaagggcgcagatccgcagcagactatgcttggccaactgaacggcttggacatgagtgagcagcagcagcaattccgcctcatttgaatgttgtccccaaatttacagatgtgacgccgctttgggccgctgtcgtttttgccgatttggagctatgccgtgcgctgatcgtccatggtgccaacgtcgaatcgggaacggactctggcgaatcggcgctgctgtgcgcatgtttcaatggcaattcggacattggtgaggcaaatccatggatgccgctgtaactgccaatgtttttcccattttcagccactcttctcgtccagcatggcgccgacgtcaatctcgcggacaccgacggaattacgccattaatcgccgcttccttttcgggacaggtggaagagttgaatgatttgtataagtggtgttgtcgcgttttcttaggtcgacattgcgcgcttgctcctttcacgcggtgcaatcgttgaacagactgatttctcgggtgcattttgtctctaattgcccaaaattagtggattaatattccttttttcgacttttaggaacgagatttgcgcttatgggagccgccattgaagcccgtttggaagtgtgtcgtttgctggtggacgaatgggcagcggatgtcaaccaagaagcaatcgatggcaccacagctctgatacgcgcgagcgatgagggacacgtggacgttggtgagaaaaaaatttttgtgcaaaatttcagaatttttcctcattttccagtgaattttctcatcgaacgtggcgccaaccttcaccacaccgacatggacggatacaactcgttgatgtgcgcagtgagaaacggaaagactgaaatggcacggcatttggtggccatcggcgcgagaactgaccaaattggcactgatggtgagcgaaaatgctaaaagttgccccacttttatgtaacaaattttctcccatttaaggcaaaagggcgcgcgatttggcggaagaaggcgaaattgccgaaatgattgacatttttcgtcccgcggctgagcagcgggagaacgtcgatgggtaaaaaatggtgttttttgatttaaaaaaacatcaaaaattcaggcaacagaacgagcaccaacagcagcggatgtgatcggatgagagggaatggcggctcaaaagaattggacggaagtgccgaattattcggaagatattccaatcatttatgtacgctatgtatttgttcatatttgaactcacttgtcatgtttgtctgctctgagtgtacatatcacataatattcttttgtatgataaattgtaaatgaattatgatcgagctgatttttttttgaatattttgtgattttttcggggtcgctgatcagtgatcacgaatccgacatccatttcgaccaattccgaatcccggacccgacctcgaacaaaaagtcgaaaattcaaatttttaatttcacatttttttaacaatttatagaataacattttggtcgtatttttaggcacttaactttataaatagcggtcggggtcgttttcgcgtggccgttttcgcgtggccattttcgcgtggccgttttcgcgtggggtacgttttcgcgtgagtagctgtttaggactgaaattggtcggatttgtgcaaaacatccatgtttcgaatccgaac

SEQ ID NO: 13127 - DNA, 1011 bp, Heterodera glycines
  unsure (1)..(1011): unsure at all n locations
cctgcagggtcacanncgcccatttttactttttgttttattatttatgcatcattttattatttggtatacaaaactttttttgtttttaaaatattacaaaacttaaatctatgtattacttgatttctcataaattttatgattttagctagtaagaggtaaataaatattgtccccgctcagatatatatggcgggcgaatggtttacccgaactgactttttaattgctttcttgaaaatacattttataatgcaccttttagatgctcattgattaatggtttattggtaatcggtatcaattagctattttacaaaaatttattttttttttgcccatttatttaaattatatttttggcacgatgagcaaaaaaaagctacttatttaaaaattatttcttgaccatgatgcatttatatatactagcggggtcagcgccttcggcgcatcccccgctaggtagtacgcttgtattataggattatgaatgataaaatcgactggctcggccgcttcgcggcctcgcatcctattcttggctttttctccaatcgccgggactcaacccaccagcatttcaatcactgggactcaatccaccaacattccaatcaacgggactcaatccaccagcatttcaatcagtaggactcaatccaccagcatttaaatcactgggactcaatccaccagcatttcaatcactgggactcaatccaccaacattccaatcaacaggacttaacccaccaacattccaatcagtgggactcaacccaccaacattccaatcaacaggactcaacccaccaacattccaatcagtgggactcaacccaccagcatttcaatcactgggactcaattcttctgcatttcaatcactgggactcaagccaccaacattccaatcaacgggactcaacccaccagcattcaatcactgggactcaacccaccaacattgcaatcaacgggactcaacccaccagcattcaatca

SEQ ID NO: 13128 - DNA, 2184 bp, Heterodera glycines
  unsure (1)..(2184): unsure at all n locations
caatcactgggactcaaccctccagcatttcaatcaatgggactcaatccaccaacattccaatcaacaggactcaaccctccagcattcaatcactgggactcaacncaccaacattccaatcactgggactcaatccaccaacattccaatcaacgggactcaatccaccaacattccaatcactgggactcaatccaccaacattccaatcaacgggactcagccctccagcatttcaatcactgggactcaacccaccaacattccaatcactgggactcaatccaccaacattccaatcaacgggactcaatccaccagcatttcaatcactgggactcaatccaccaacattccattcaacgggactcaaccctccagcatttcaatcactgggactcaatccattctcccgaattcaaatcactggactcaatctcatcaatccttcatcaacacaattaccgggactcagttctccgacatttcaatcaccggaactcaacctcagcaacggaatacagaactatttaaaaggaatccagaaattgaaatataacccataataaatcaaaacactatggtgtataattattgcccccaccccataaattcaaattaaaactgacctgtttaaaactttccacctaaatttgatcccgcaagtggcacgtcaatatcccaattgcatataaatattccactcgagcacaggcaaaacatgagatgtagcatttatattgctttttctatccatcaaaggctttttctttcattgtttattactatcataacatgctttttattcaaaacaaatatcaaaaaccaaatcagattcttttcatattataagcaaggaaaagtacaaaaaacgtttttaagtaacaaacctttttcattcaagcgaattctaatgcatttttttaaccaaacaattctccattatcgtttacataagcaaaacaaaagctttcacatcaaaatcaaatcaattaacaaaaacaaaatttagacaaaaaaataatgataaacaaacaataaattttttcctacacacaaaaacagaaccttcataaaccggaatttccactcaaacaaacacaaaaatgtgctcattattttattaattattttatataataaaagatgggttataaataggaagggatgcgagagaaatttcccattatctctcccttttctttcttttactctcttttcttttccattgcaatttactctctctgttttcccactccttctctctcccacacacacgcacgcatccagcagactgctgctgcacagcagcacgcgtctgtttactgtatggccctcccacccgccgctgcccgcgtagacagacaatcagacagtgcactattttcccacctttccctcgctctacttttttcaaattcatttttaacgcaaaactcaaacaaaacgccacacaaattcaaacactggacacacatatacacacactcaactttattatataagatttaattaaattttttagatgtgcctttttttacattatcaaaatttaatttttaataattatctttagtttagaagaaaaaatttttttcagcataaactcgtattttgaataaatatttttaatttaatattctattaaatttcatttccttccgccattgcgcttttcgttgaaaaccaatttttattatttttaaataatttttaatacagttatctaaaaatcggcttaaattttgttaaaatatgagttatgcacaaatttttcttatatctaataccaaatcctatattttcatgacattattgtaaatttgtttattttatagttttattttgtttaatctgttctctgtcaaatctcaatgtttaggttaaattttaagttaaaccattttcccttgattctttactcgtttttttaattttataatatttttgttttattgtgatcatattgttcagttcaatcaatattattatttaatgtatcaattaataatcaaaaattataaaatcatatgcatttaaaaattatattgctttatatttaaataaaaattaattcttaaaatattgaaatattttatacgtataactcacttttaatttttgttgaaattaattattattactaagctnttacttgtttaatatcacctaaaattgggc

SEQ ID NO: 13129 - DNA, 2012 bp, Heterodera glycines
aattttaaataaattaaaaatttattttctttaaaaaatactttaaataaattaaaaaaattttttttttcgaaacaaaaattcaattttttgttgttaaaatcaatcaataaacaaacgttagagaaccgacgaaagatcgttagcgtcttttcccctgctaattaccaccccccccccctattttttaacatttttaattttgttttaaacccacccatagggcattaattttttagatttgtggataaaagtgttcacatgagcgtaatttcgatcaaagaaaaaaatgtaagattctaataaattttgattatatttaatccggaattttcttttgggttttccggcaaagacttttttacgctcatttatggccaaccaaagaaattagaaattaattttttttaattattaaattgttcagtctaaagtctaaaggcagggacggtcctgggattttggctttgcaggggtaccgtccgtagtgggggacgaccattttttgtggcgcttttttttttaattttttgggtaacaatagaggaccgtcggtacagacaggcgcagtcggaaaaaattcggaaattttcaccatttttaacagatttttgccaaaaactgttctgttgttgatttttgtaaaaatttagcgaaatttttttgaaaatatatgtgagtaagtaacctattaatttaacaaaaattaacaaagcgagcagcagatgagtaatgaaatgaatgaatgaatgtatttgggggggggggggggagaattgaagacggcgtttttacacatagcgcaaatttacgaaggcgaggatcagtcggaatgatcgctgatcagccagccgatcagctaaactgagtattgtgagtgagttaggaccataaaacaattggaaatgaattaatgttggggcgacccataattcaaatattgttgtcattgggttcgttctttgaacggaccaaatattgatttgtcctcctctcccattaattccttccactcatttccccaattcattctttccaatttgccttcgcattgttttccttccaatttttgctccattcctccgaccaaatatttgtattttatttttccattttcttcaataaaaatattttattgtgttgtccacctgcacaaacaaatactctaatctttaatatttacgttcgtttcatgtttatttaagtttttttattttatattttgttatataattcgcttctttcatgctttgtatatttattgtattgctaaattgattgctcggtgctaggtcaagggacaaaaagtgtaaattaggcgatggacaaaaagtgcaaaatttgcaaaatttttgactaaatcaactcataacttttttccgacgcaactaaaattgcataatcttggcttgatatcatgcaattgccattgagttgcgttattagcttgctaatttcaaaaaaaattattattttttcaataattatggattttttcagttttagactagaacttttgaaaaaatttaataattttttttgaaatttagcagcataataatgcaattaaagggctatcgtatgagacgaagattgtgaatttggtttcgtctgagaaaagttatgaatcgatttaatcaaaaatttagcaaatttagcactttttgtccatcggccaaccacggattgctctagattaaaatgttacaatataaaatataaattcttttacccttttcataatttaaaacatatgaatgtgctattttttggttattgttttgtactcacagcacaaaggataagaatttatttagatctttattttaaaatccttccaattaggtggattattattatataataattcgaaaatattttttcaaataaattagagcatgttgatatgttagtttcaaaattttacttccaattttttaaaagcattaaaaatattgattcaattggaggaggaattaaagtggaactaattttttaattaatatcttata

SEQ ID NO: 13130 - DNA, 2122 bp, Heterodera glycines
ttctctctctctttctcctctttctatctctctctcagagatcagattagagagtacatatgcataagagacgggtgagagagtgcagagactgaagagagagtacagatgtgtaagagagagtacagatgtgtaagatacgggtgagagagtgtagagacggaagggagcagtccgtggactggtgagagagtacagatgtggaagagagagtacagatgtctaagatacgggtgagagagtgtagagacggaagagagcagtccgtggactggtgagagagtacagatgtggaagagagcagtcagagagagattagagagtacagatgtgtaagagaaggtcagagatggtcaatggacggaagagaacagttagagataggtgcgagatagtacagatgtgtaagagaaaatgaatgagttagtgctgttcatagcgtgacagctgcctgtatctgtcataactattcagctttttccttatgatgagattaaggtcaaaagattgaataagcacatataatgcctcattcattcatttcaccaaaacaatgcgctgtaaacagtccctgccctcaaaaaattcccaacctccgatgtggtggtatgatccagaaagactggattatataatttttaaaatgattggattatataaattttaaaaagatcgattatataatttttaaaaaaagatcgcatacaaatttttaaaaagatcgattaaaattaaaatttttaaatttcgtccgtccttctcccactcattcctcatcgactgaagacagcacttaaaattattgcataatttcaaaattaaaaatattcaaaaagaatttttaatgtaccatgggctggaatgggcttctttttcttggtcggaagtccatccatttcgtttttgttcggcatttgctgttcggtcgcctttctccccttcgagacttgcttgcgctgtatatttttgatttttaaaataaaattatttaattattttacccgatacgcattggaggatgaagcagcgggcggagacagccaactgtcctcgatgaagccgtcggagttcacttctcgctctgctcaagcgccgaacaaaatctgcatatggcattagtcgctttttctgccgtgtggtcaatcgaaaacgcgagataacaatgtttaaacaaatttccactagcgctaacaactgctccatatttgctttccgaatcagcttccgacattttttacttgatttagtcctcgccaatgaacatagccaatttgaattttgtttaatgagttgactaatttgtacttgttgttccatttttatgcacaaacacaactaagccttggtcctcctcctgctcgtccttaaatatatttgtgcgaaggcgtagtacggggtccgacgaggcgtgcatgtcaattagtaaatacccatatgggcgagcggttgccttacggtaggcgtcaaaaaaaaagtcgagctgccgcgggaaaagctgtactccaatgttacggatggacaacagggagttgggtgcccgcatcagtaccaggtattgagctgaaaggcgggcgactttgatctttcgctcaaacaaattttgtgtgacaaaaacaacagcaaattgttgatggtgggactttttggtgaataaatccgacaaatatcgctcatcaatggggacagccgggttcatttcaccaaagcaatatagagtggaaacaggttttggggcaattaattcatcagattcagcaataaatttcagcaaaaattcacttttacccgatgaagagggacggtaatttaaagcaaatatctttattggagaaagaattaagcattttcgtgttaacgaacaataatgaaatgtgacattgttgaatgggaaaatttagatagaattttacaaattagtcgttgccgcttggacactctcatagaattcctcagcggtcttatcaagagtatttttgtttttgttctttcttttcggtggcgcctgcgctgcgatatccatcattttagtagccgccgaaggactgtcgtagaattcttgcaatttcttttcatccctagtaaggtttaggtggaagcggtggcggaattttgtcggctggtg

SEQ ID NO: 13131 - DNA, 2151 bp, Heterodera glycines
attttgtcggccggtggaaacggtgggggcattttgccggctgacggaagcgagatcgtttccattttctcgattggtggaagcggaagctcttccactttctcgactggtggaagcggaagttcttcggtcttcgtttcggacagcgaatcggccagcaacatatttccaagaatgctaattgcagttttggctttcttccagcgttctccatcatgcaatgcatctgacagcaatccctgttctaccaaatcgagcgccactttcgccttccgcttcagattctcttcctcacgcaatgagtcagccatcagtccctctccatcaagtccagagcagcgttggccttttgtcgcaagtcgttcttttgctgctgctgctgctgctgctgttgttcttggtgttttgggaatgtgatggcaggcagttctccgtaggggatgttgaacacgcgcgccttgttcttcacgcggaaaaagcagtgtccgggtagatcatagatgatgtcgaacggtacaaattgaactttgtcgaaccgtgtacaccaaatggtgatgccttctttggtgatcatcgtgtccacttccacctcggttcccttgcaggaacggcatcggccggcctcatcaaaagggaggaagcgaggggatgagagacgggggccactaattgtgataccgcttgtggtaatagtgatgtcggcttcgccgagaatttggtggagaagccctttcttgtcttgcatgtttatcgccatttgatgattgtgttgggaaagaccaaaactacagcctatttataggggcaacgcagttcgggtgtggagaaatagtgcaggtgtttgatgatagccagagaaaaagagcgaagagatatagtactggtgtagaagagggtgtcaaactaaacatctgtcaccccgcacatctagctccatgccctactcccaattaattaattagtaccaattagtcatcacgaattaccaccccacccccatctgtcggcaagttcaaagggctgcacccctcccataggcttgggtttgaccaattagcacattagcacccctaattacaccacctgtcacttctaattagcgtcaacctccaacggtcccgggggggggggggttactactaatatcaggtaatttctgcaatgaaccaaaatcaccaattttttaaaatttttcatctttttaaaaatatttttatattacttaaagttaaaaatttaggtatcaattttataaaatatttaaatgtaaaaaagtatttttttatgcattgcttttaatttctagaataaactatatttaattttgtagttatttttttaaattttttttatatttatcaatttcagcaaaaaattgtgttcacttactttatacattttttactgacgaattatcaactgcgcaaataataaattattaaatttcttttttatatttatttacaattacatatttatatataatttgtatatgttttttattcctaaatgaaatttgtttcttctctttcagaatttattttcatttattcttatctaagtatgactgttaattttttaaccataatttaatgtcgctgtaatttcttttgaatagttaatagatctccttgtttctcctgttatttttttgttatttaaatcatttttttcaactttgattctagaatttaaaaaatagtttttgacattagagtgttttatattttattggttgattaattgaaaaaattacaaatcgcaaaacttacagagaaatagttccttcggaccatacttgtccttccatttaataattatttttattgttatattttttctatcagaataatatatatttatttttattcttcatatatggatttattaatttaattaataaatttattatagattatcattatgatagttgctgtgaaaattgatgtattattttattttgttatatcttttatatattatctattaagtgttttatatgggttttatagatcaaaatcacgcaaaaaaatgacccaacacctcaaatgcataaagtttgaataataagacaataatagcagtgaattatttttatctttttccataaaataaaaatcattatcttgtaaattttatatatttattaaa

SEQ ID NO: 13132 - DNA, 3484 bp, Heterodera glycines
ttgcttctccatgcgtcctcggcatctccagatttctttttctttgaacagacgaagattttcctttgttttttcctctgttggaaattgttgttgtgtttcccatatcagcaaatgttcggatgcacataactcgggtactgacagtacgcccttgtcttgattccagtgcttttttgggcccattttgctcagaattggcaacaaatttccattgtatttgttttttgccaccgaatgtatccagcgtaagacataggcacccacggttttggcctttttccagctggagtaccggttcatatcaatagttggctggaacggcaccccattcatgactgcggctgtttttatttcttcatcttctgcacttcccctgagcttctcttcatccgggtgataaacttttgctggttttggccacagggccttttcttccgataaccattttgggccatgcttccatagcaaatttctgctcaactctcttggtgttgtgccgcgtgatgccacgtccgcgggattatctgcactgaccaaatgtttgatttcaaactgtccacgtatttttgctaatcgatttgaaacaaatcgatcgcatttcttatgctccttaattcgttcaacggaacacaagctgtcagtccaaattgttgtctgtgacggtttgaatttaagatgttggagcacgtactttaacaacttcactcccagcgttatcgattgtaattccatttttggaattgttgccgcaacatctgatatgttggagggcttcaccaggctcttggcaaacaccaaatttgcgctcattttttctgtcgattcccggatgtaaatggcaacgcctaagccttttccgctcgcatctgcgaagcaatgcatttccttgtccacttcgtcttcgttgtcgactcttcgtgcgaatcgaatttggacctctgtcccctctctcgtttgccaagtctccataatttgattccattcatgaatcaattcttcttccaatccttcatcccagccgtttttggcttcaaaacgtttttgcaaaaaatgctttgctgggagcactgcaggcgccactaaccccaaagggtcataaatttttgcaatgtgtgccaagatgttcctcttcgtgtgctttccggcaaattttttaaatcggaagcaaatttcatcatcctcattcgtccacggaattccgagaacttttatctccctttggtttttggccaataattccacaggaaggcttcgtatggcgatcggcttactgcagaaaaattcctgcagcttcattcccccttgacggaacagctcgatcgattcgtggcaaatttgcgccatgtcttcattcttcttcacattgatcagtatgttgtccacgtacaaattctccattatggtttgcggtagaaccgtgtcgtagaatgaaagatgttcgcggatggttgcatttaaaagaaatggtgaagttgtcaatccaaatgagacccgacagaaccgaaacacaacggttctcacatatgttgggcttgaaatttctgtcttttgtggatcctccagccacagaaatctggtcgcgtctctgtcctcctctcttactgataattggaggaaggctttttcgatgtccgccaggatcagatccttcattcttctccatctcagaaggatcccggtcaattcgtttaacaataacggccctgtgtgcaagcattcgttcaacgatggggctcctttgcggttcgctggcttcgcggatgcatccatcacaattcttatttttgtcgtggccttgtctatttttatcacgggccgatgttggagataatgtaccggtccagttgattgtgttggatccggaactctttcgattatcccgttcctctcccactcattgaaaattttttggtattcttccaccaaattcaattctcgcaatttcttcactgtgccacaaagtcttgccctcgcttgttgaaaatttgtcggcaaatcctttactctttcgttccatggtaggccacattcatatcttccttctttgaatgtcaagctttttctgaacgttctcatcacttcttctttgtcgttttcttctggattgtcactcattccgattatgttcagcccgaaaaatgtctttatctgttcttaaatttcttcgtcagcatctcttctgctattggcacattgtaaggcacttatgagtgctccagtgtacgtcacttgcacactcatgtccgttgggccctggacttggccataaccacttatcatccgcccgactcgagacgttgacaatgtgaatccacttggcaacttttctgtctcgtctcttattttcaggtcatgtctgacatccattcccaacagaatgtctggttgccttggtcgcgatggaagtgaaagctttttcttgcttaattccacttcatccatcgaattcagcgtcacgatgggcatcgctttcacaatgaattccatttcattgagtgcgcatatgtatggatctccgttgacccccagaaatcctacgcggaccacattgctcacgtagcgtttggcttctttctctccgaaaccagtcaaatggcactcttccgtctcaatcactggaaggcctaattgttttgccacgttagcccggatgaatgagcgttcactgccgtcatccacgaaaactgatgcgatcatgcttcttttcggattggacggattgaagatggttacttctgctgttctcagcagcactcgtgaatttccttgcactgaattgcattgcgagggcgtgaatgagacttctttgaattcgtctcttttgtccggtttctcttcttcccggacgttcatgactcggtttgccatgtttttccattctgttaccctttgtgggtttgcctgatggcataatgccgttgggtgtgcttgctggcacttgaaacatttcattgggcatgggcaatttcttccgatatgatttgacttcaggcatttgtagcataagcccttctcctggaggactgcaaatcgttgttgcaccgtccttgccttttcgcaactgtcgtgtctgtgtttccctccacagaaaacacacggaagcagttccccttgagtgttaactgccgttggattccgttgaatttttgggcttcttccttgtcccttacggtctcggaatgcggaatttcgtggcgtctgctgaaaacttcgctggccttgcctcggatttggcattttttgttccggaatttttcttcgctctccgttgggttttccgaaatgtgttgtggctacattgactgagcctccgaatcggttccgccttaattgtcgtttgaatccatgctctggatttgcctctctgctttcgaagccatactctctcatgacttctttgattgctagctctttgctcaatgcacttcctaaggcctttaggagggatgacgtgtcccaaacagtttggattttttgcttt

SEQ ID NO: 13133 - DNA, 3628 bp, Heterodera glycines
  unsure (1)..(3628): unsure at all n locations
attttttggaaaaattttccaaaaaacttagtaattcatcataatttntggaaaaatttcgagtttttaaaattcttttttgctaacagattttgctgaaaaattgcattaatttagaataaattaaataggtaacttacaaatcggagaagaaagtaagttgagggaaccactaacatattatttaacatagcggccaaaaaacgacggcgaacatttggcagataactgaaaatgagataaatgtccaaaaataaaaataaaactggcaaaactaaagaaccaagggcacccggtgaaggacttgacaaaatactttcatcaaatgttctttagctttgcctaacttaaaaaatactcgcgagaatgttgtcggttatcaaacgcgtaaataaagcccacataactgagtggcatcaaaatggcactgcccacatagatgagacattcttgcatagaaagtacctgtacggcaggaactagctcaagtattaaaatataaatatatgaaaattatttttataaaaatgcgggaaaacagactttttaatttccgatacagagtcaatttatataatacacatactgtatgtacatatgtataggtaaacgaagcaatttttcgccagtattttgccatttgccacaaaaatcctagccctagggattagtaatcccgcggcatctcgtccacaaaaaatttgagttccattccagccagtgatcctcaagtttgaactacctatccgggctccatctaatacttaattacttaacagcagagtcaagcaattatttatatgtattaacacaccgtttcaatttatcttggtatcattcgaaagcccttgatggggagaagctttttctaagcaaatgctaagcaattggattgattaggaaaaaatatgagggttcgaaattttgtttctcgaataactttttagttaaccctttttttgcttttaaaaacccttacattttgttcgtaatttttttctctatcggtgtgcaaaatttgaagaagatttaacatcagagaaaaaagttaaacatcacgaagtgaattcggtttttctctattaacagagataaagaaatagtacgccaaaaagagagatgtttttttctctgcgctctctctttattggttcatctctcgttttttgaaacggtgttaatttgacatttccaatggttgaaccaaaaattccaacaacaagcgattttaacgaagaaaaccctgtaaaatcgacgccagaatcacattcgttaatcaagaatggattttttatgagtgaagaatatgggatgacaacgaaaagtgtctacacttcacaaatttcacaatctgtgataaaagctggactttattctaagaaaaatctgggagtgcatgtttctgcggcgggtaagtaatatttttggttgatggtgtggcacttcacctttcaggtagtctggaaaatgctatttggaatgcaattgaaatgggttgtcgttcatttgcgttgtttgtccggaatcagcgtcgttggaatgcaaagcctatggatgagtcagttgttgagcggtggaattgtgcaattaaagtatggcaaattcgtagacaaagtgaccaattgagagtgggcggttaagcaaatttaagcgcataaattcccaaaaatatattttccattctttttatttatttatattttttaaggtgggatatggaattccccgggtccgttccctgaaatggtacagaaataaaatttattcagaagacaaaattcccgttgcaccaaatcgtcccacatggctcgtatttgctgaatgccgggtcacccgaccaaaaaaaattggagatgacacggaaagcgatgctggacgaatgtcagcggtgtgaaaggctgggaattcaattttacaatttccatcccggtatgattttgaattcccaactttcaaagaattaattaaataagcagtaaattgaaggctccacaactggaaagtgcacgagggagcaaagcatcagcacaattgcggacaccataaattatgtgctggaaaatacgcatcttattacgctcggtaaattgggttttgttagtatttttatttttaaatttaaaagtcgtggagacaatggcgggcagtgggaacacaatcggtgcgacatttgccgaacttcggtcgatcattgacggagtgcagaacaaagaaagagtcggcgtttgcttggacacgtgccatctttttgctgctggtagcgctttgtttttttttggtcgccttccctattttttataaaggctatgacattgccaataattataagggcgtaatggaagagttcgcttcaacggttggcttgccttttttaaaggcgcttcaccttaatgattcgaagggtatttggtaaaataaataatttttgacctttcatttttagagtgttgctcatcaaagctcgaccgtcatgaaaatattgggaaagggaaattgggcacaaaagcatttgagcaaataatgggggacgaacggttagacggcatcccaatgattcttgaaacgcccgaagggaaataccccgaggttttttgtttataattaaggtttgaattattttaatttataaccaggaaatgtcacttctttacgaattggaacgaattaccgaaccaaaggaaaagaaaaggcggaagaacaaatgaatttcatttagactatctaacttaagataagtgaacagaaagtgataacaataaatcaaaaacgatcttcgttattttaaaatggaaaacgatttaaacgccgagtgtttcttttgaggaagcaatttcgacagtttccctcatcttttgcattgtctgacgcgggtcagccgaccgaacgattccagtcccagaaacgatcatattggcccctaaaatcccattatttttcgtgcaaactaatgattccactccgggggacacctgcgttcgcacagtgttcgatgttgtccagtccgaccccgccgtccacttggatgtccaagtttgggtacgcttttcgcagttggcgcaccttttccatttggtcctgcataaacttttgtccgccgaatcccggttcgaccgtcctaaaggcaaatttcatttcgcacggtcattcttcgactccctttacaatacattatgagtgctgtgtcgatcttttcgcaaaacttcatcagtttgtccagctgaactttcgtcccattgattgtcttctatcccatgaattaccggcgtcattggtttgatggacagtccacatcgtattcccttggatttgactcggtcgatgagtgtgtccaccgcttcgtcctctccgagtgcctcccaatggaaagtgaattgatcgatgcctgctttgtgcagagggtcgagccatttggacgggttggacaccatcatgtgcacgtccaacttctttcaagggagtcagaccgaattttatggccctcctcaattgctaagccaacaaatggcaaaacaaaccgcgtcatttcccaatttattcctcagacattcaatgagcggatgtccgaacgtncaattcggcacgaaatgggctanagcaaaacgaaagaatgcgaggggaggggaatgat

SEQ ID NO: 13134 - DNA, 2565 bp, Heterodera glycines
gtagattttttttttgaaaaattcgaattttctttatttgatgttagtaccagtatcctcattcttctaaatatgtttcttaaaaaaaaatgtgtctaaaaataaaatataaatataaaaaaaaattattctaataaattgcaatttttttgtagatatttagtttcaaaatgctttccatcttaaatttgctcaaatatttaaacaatttctaaaattattcatttatttatttaaagaaattcattcaaatcaaattgatttttaaagttttttgattattttacataaaaattgattgattttaaataaaaatatttatataatttcttcaatcatcattttgtaaataatattcacatttgcccacagtttatcaatgtccgtaatcatcatcagctgatcggagattttgaaacgcgcacattttttgtgatttgcgacggtaattcaacggtaaatatttttttttgtcaaattttaaaaaataaaaaaatttcaagattccaacagtatgccaaactgagcgttttcgtgtgccaattttggatggtgttcttccacaaagtgtgtcgttgaacagcaatggacgaccaatctttttgggcattgaatacagtaggacacaaaggtggtgaaaatatttataaaatgtttaatataattataaattatttttttaattaatttaataatttaagcgattctttaaatgccgtttctgctgatgtaaaagtgctttttcgacttcatgcttctgttgaccacaaggctttttatgggctgaacatcaccaacagtgcaattctgaataacacaggaaatggggtgaataaattcagaaaaattaataaataaattttaaaaaaataagccgtaaatcgtttagcaaaatgtattaaacataattttaaattttgtatttgattttttaattaacgattgaaatgcttttcattaattaggttattactttttcaaaataataaacaaattattttctgttggattttcgtttacagtttatttcaaaatttttattcgcacccaatggacaaatataatccctgtccttaaacatatctgatttgttaagatttcaagggcgtccttggcatccaaggcgagccctatccttaaatattttgttaaaatttcaagggcgtccttggcatccaaggacaaatatgtccctctgtccataaatatattagattttccaagagcgtccttaccattcaaggacatgtgagaaccactgtccttaaatatattttattgttcaaaaccaatttgcagattaaagcgtcacaaatccgtgaccgtttcgcgttgcacaatgtcagtgttgagggcaaccagggcttggctggcttactggtccaagacggtgccgccgatgtttggctcaatgacacatcattcagctggaattggggcgacggtgccaatttcatttatttaaattaataaaaaattttttattttttatttaattttctttttccaatttactgacattccttcataatattattatgcatttaattcaaaatttatttatacaataaatttattttttaaataattttttttaaattcatttataatttaataaatgcggaagcattcgaaaaataattttaatttttaaatcgtatttttttatttttaataaatattatttttctattcaatttatcatttttacaaatgcagaagcatttgataaaaattatttttattttttttgttttttattaaatctatttttactcattatttaaaatttacttttctattttaataaattactattttttcaaattaaaatacaaaaaatctaattttgcttacagttaactccgattggccttctgtgtctttgtttgctggcctgtcttcctttgccaaagtgttgatcaattgggtggaattttcggacaatatttatcatcctcatgtggaagttttcgcatgccaaagtgcaaatcagcgacttatgcatgtcgatcttagcggagttagtcccaaaaataataatatattctttacttcggcattttttcactcatcgccaattaaaaatttcgaattcttttgagtttccatacctcagcgcattgtagcgcaccatcaaaaattttcattaaaaatttaaaaaaaatcttttcatggcgccttctggcgcaccgtcataaactctctaagaattacaaaaacatggcgcacaataaatttacaaaaattgaaaaatgccgtgcaatattttaatttaattgcaagggatttaaattaatttttcaatttatattaattaatgtaaatgccaaaaattttaaactaattacagtaatcgttaatcatttctttgacagaatacaatcacgggtggcactggcaagcccgtagccaggaaaaattttcgggggggggggggggaaagggagaggtccggtccgaagaccttttttttttgcaaatttgcaaatttatccataattttttttgctgaataaaattgataaaagttgtttacgatctgcaaataactacaattttcca

SEQ ID NO: 13135 - DNA, 695 bp, Heterodera glycines
ctccaggtccaggcctgggaccaggccatgagaagcctggattttcctggacctgtgttttcctgtgttttgtccaacaaatgaacaagtctatgtcggcttttttaaaatgtcgagccctactattttctactttccctgtaaattcctataatttttttttttacaaatttcaatattttactgacatttaaatttattatgcgtttctaaaatttaaatattttgcttacagttaactccgattggccttctgtgtctttgtttgctggcctgtcttcatttgccaaagtgttggtcaattgggttgaattttcggacaatttttatcatcctcatgtggaggtttttgcatgccaacgtccaaatcagcggcttatgcatgtcgaccttagcggagttagtctcccaaaaaaaaaaaattataacaaaaaataaaaaaattttttcataattcaaaaatacaaaaaaaaaaacaaaaaatttacttcggcttttgacgcaccgccaactaaaaaatttcaattttttttttgaatttccacttttttactcggcgcattttagcgcacttgtcaaaaattttcattaaaaggcaaaaaaatttaacacaccgtcaaaaactccctaagaattacaaaaaaaaatttctccatggcgccctttggcgtaccgaaaatttccaaaattgcaaa

SEQ ID NO: 13136 - DNA, 4055 bp, Heterodera glycines
ttaaattctcttgccctgtaacatcagcgagtgcaggtcgaacttgttctgcatgttggtcaacaggatggcgtagctgatgttgcagcgcagcgcgccacaaaagtcgtcgaccggctcaacgcggagataaacgtccaaaaaagggcgccgatttggcgcatcagcggcggcggcaacggcatttgtctccccaatggcattggcaccggcgatctggcaatatattgaaatggattagcggctgtatggtgttggtgtggtgatcagtaatttaggtgatcgatcggtgggggttcattaatggaaagcccaagttttccaaattgagggaaaatttctcaaaatttcttaaaattctttaatttaagcttaaaatcttgaaaatagctaattatatttgaaaaattatttaataagcacaaaataaacctaaaatttattaattttgtagaaaatgagattttttgaacttcttatttttgttaatatttatgagaaaataccacccaataaagttttttttgagaatttttcggtccatccttaggtcaaagggctgctctatagagggtccgttttaatagaggatttttttttgggaaaaaatgccaaaatatgcatataaatcgcgcaatatgcacaaatatgcatatggaaatacgttgcatataattggatgccattattataccaatccattcacccaatcaatcacaggttttttctaatcattttttatacaataaaatgatgtcatctgcctcaacattttttttttgatcatttcttcttactaggcaaatgttcattctgtgttctccccgtttaatttctcaatttcttctccaatcatttgcgcttctttttctgctgttcgccttgaccaaaaacaatgacgtcatgtcactctgatcagaaaagagaaacagttcagggcaatttggtcaaacactcattttccaatgacatcgtttcaacggcaattataacaaataacatatgtgcacgtgccaccaaaagcctaggaaaatgtgatcagtttcccgttacggtataaataaggcccctaaatttctctgataatccctgctgtttggatttcgttaatcagattagattttgaatttaattgattcgaacacaattgtccggcatttttaataaaaaattttttatcctgattgatttgtacggactacagcgcctaaatttccctgataatccctgattggatttcgataatccgatcagagatggatttaatttattgaaatacaactgttcgagattttaatcaaaattaaaatgtttccttaatgcctgattaatttcggatatctttgatcaattgggctcaatgttgaatgagttccaattgtctgtgatctgatcaattttgggtttgatactttttaggattggatttcggtaatcctaatcatttacattgaatttttgattgaattttaattttgtccaatcgctttttgcatttttctttttttttcttttctttgtcccctctatcatcattatcagtttaccacttttcacattacatatccacccattaatcacaaccattgttagaaagtgtttcatttcatttcggcgctttgataatttggccaaaaagtcatgcggcgggtaattattaacggtaattaaactccccccattagtcgagtacaattaatgaccgaccatgttaaaatttactgataaaattttgatgtgctgtgatggtgtgcattattttgtttgtgatccagctgcggttgtgctaacaaataagtatgtatcaaatttttcctaaattccatcgcacattttcacgcccatcacgtgcctcaattcttttttttttttggcgtttccttggcgttttccccaacaaaaattgtgtacccagaatttcgttgaaatatgcgatttgatcacttgatcagtccccgtcccatcgctcgcccaagcagcgcaaaacgccaagaaatgtcggggcgtggggcaggggacgctgtttttgaacaactaatgatgatgatgaatgatggagtgcacttttaaaagacgaaaaagcggtgccaaatgggtacaaaatgccaaagtatgaaaaataaaattgggaccaaaagtttgatttattatttttactgtttaaattgtgtccagacatttgcgccccagacaattgcccttcagtgaaaatcggacatttcgtccccagtgaaattcggacatttgcgctttaaagattaacttttcgagtgttatttatctaattggtcaaattaatatcaacagatttgaattattttgaatttgataattgacttatggcgttgaccatttgtctaattaataaattttaacgccaattttactatgatcctttttctcgctggccaatttttttttcttttcaagtttgtcaatttttacagtatcccattaaaataaaaaataaaatttaaatttgtacatttgtccgattggcaaaaagtgtccaattgtccggttctgtctgattttctaattacctaatttttgatttttttttaaatgaatttttgcaattgctcttactccaattagttacaacaattaattagtctcatgactttttgccaaatgtttatcaaaaaagtgtcttttgaacactttttgccatcaattgaggacgaaaagcactcaaatttttgcgatttttgcaaattttgacaaaaatcaaatgataaaatgacaaatgataagttgaggagaatgattgtcgtcaaaaatgattgggccctgataagaaaattgggaaaacgaagaacgaaagaaaaaaaagccgaagattgatgtcgaagaaatgaaaacgacgaaacatttttggcgaagtgtaaaaattggagaagaacaatggcgagagagtgtgaaaattgtcaaaaaaacacaaaaaaataaaataaaatatgacgaaaactttgctttaaaattgtaaatgtactgtagggtagaaaaaaaaattcgaaatttacggcatggccccatagttaacgatttaaaaagcttttggcataagcacaaagagaagagtgtgaaaaaaaatactaggacaaaaacttgactttaaaattgtaaatgtactgtagggtaaaaaaaatcgataatttactgtagggcccaagggttatatatttaaaaagcttccggcataagcacactttaaatgatttggcaaaaatacataggcttcccaatttaaattaactatcagtggcttttttgactgattaggaaatttaatcaaattgaatcatttaacctaatcgagcccggctttttgggccaaaaaccgaaaaccgggggcatcggttaataaccggtcaccggtcgtgacctaacataattttgatcgaattggaaatttaatcagcaacatttggctgatcaattagcaaaaaatcggcccacctttacattgagaagcccgctgaaaacaatgcacaacaaaagtgatgagataatttttagctgttgttgatgaacataaagatcccgcattttgttgaacaatggcactgatcagaaggaatcgaggaagaagcgattggcacggcacagctgatcaataaaggagaaataggcgtgatcaatcaataaactgctggcgatcggtgctgatcagctgtggggcaatggatggatggattggattccgccgcgattgaatcaaagccgatcagcagagcgatctgaaagagagtaatttatggaatttatgtgtggatttaatggttaatttaattgatctgattgggtgggaatgacttaatcaggagatctgatcaccagtagcaggatcaataaataattggaagcagggattacttcttggataagagaaagaaaaagaatgggatagagagtgagcagagagagagagagagagagtgagagggaagagagagagggagagagagaaaagagaggaaggaaagcggaaatagaaaaagaaagatggggagagagaaaaataaagagagagatagaggaagagaaatgaa

SEQ ID NO: 13137 - DNA, 3975 bp, Heterodera glycines
ctttgtggagatgacacaatgttcaccatggacgaccttctccaactcgccaatggccgcttattggcggacatcgaagcaattgtcaggattttcactgcccatatcaccgaagagtgcgaaatatgtcggggaaatgctttcttctgcgaactgtgcacagataatcaggttaatggtgttggcttgaggaattagtacaataatttataagttccacagaaattactccgcgccacttttcagcgcatctatccgttcagcgaaaacgtggccatttgcaagagttgctgtgctgtctatcaccgcccgtgctttgaccgtgccagcaaacggtgtccgcgatgtttacgcagaaaggcgagaagaaaagcggtgatggaagagaatgagggggacgaggaggaagaagaggacggacaacaaccgtaggacagcaaacttttttatttttgcataaatcgggtcacaatagtcaaaataaaaagaatttattaaaggaaagtaaataaattttgaaaagatttcgtacacaaatcaacgtgttgtaattgtcgcaacttttgctgaaagatccgagtcaatgtcgcggacaacgggcacaatgtggtcaatgacgtcggcagcgttcatcgatcggccgacagactaaaatattttttggaaattgttttgtaaaaaataaattcgacctgaaaggtccgtagcgatgcgttgcgcaccaaaagcgaagcggcctccgccccgtccagcaaatgctcggaggaataaatgtcggcatctgaggctttccttgcccaaaatgcgaaaagtgccgtcgcgccgctgagaatgtcgccttggccaccgcaacggcgcatcgaagtttccgcttggacaattcgcgtttgggcggcggaaccgttggagattatgtcaatctctcctaaagtgccaatgacaattgttattgaatccaaacctcatatttttcggttgtgtttcgtgccaccgaccctttctcatcacagtcacttccaaatgctttgccaattgttccgccatttcgcattgaattttcaattcgtccgtgtcttctcccttctgctggttagggaacatttgggtataaagccgaacaaattcttaagaaatatgcattttgtttgctttgcttttggggtgcgttttgcctctgtggtttggcgtaatgatcactttgtctgtgcaccctttgaacagttgcgaacattctttgacgaagaacagaccgtccgcgtcaatgaccaaacaaagcttaaaaagcaaagaaaatgatgattgtatctcaataattagatggatttagattggaggggaattacattttgtttgctcctgacgaaatttacgacgtccgccagcaaattttgtgtgtgtttctgtcggccaagccccggcccgaataccagcgcgtccaaccgctcaatgctgtgtctattcgtggcgaaatcggtgctggggtaaacctattaaggaggagggcaattagcaaacccaaccccaattagttaactagtcatcatgaaaacccacgatcagttccggactgtaacttttgatcaccggagcagcgtcggaatgggcgtaaacaaaggccaaatcggcaccgattttcattggggtgatcgaagcgaaataaggcgcacctaacggggaaaagccataaaaatgcattcatttctctgcaatatgccaccggtgtagtcgggcgaaccgccgatcactccgattttgccacagtcgcccttgcgaaggtgtttgccgaggacggggaaaaggcgctttagcaatgccattttgtcagggtcaatcggactcataacaaacgaaaatatcacactgatcagctgacaaataattaggtattaagaaaataacgtaagcataaaacgggaaaaagcgtatggtttgaaaggcaccgacgcataaaaaagaaagaatttatttgagctcgaatgacacattatgcatattttacaggattatgaatgcatatgaaattgaaatcacaaattaaaatgcaagagatttatataaaaagttaaggcaagaaaaaaagaaatgaactcgttatgatgggattggatgggggagatttgtgttaatgatttagagataacgaagcaaaatggacaggaagttctgaactcgtcgatttaaatggcaatctttcaatttcctttccaattttttttggtgtttttctcttttgttccttccgtccgtccgtctcatttcttcttcttcagtttgatgttggagatgcgttcgcccacgtcgttgaagaaattgcccacgtcgtccaccactttgtccaatccgtgcttcttggccagtcggctcaccttctctttgaccatctcccacaagtgtttgacgtactcgcgcaactcgcgactgcgtcggttcgccacgcattcgaagtcgcaatccttcgaaattcgaatggctttttgtggccaaatctgtcctccaaattacctcatttggctgtgtgtccgtcggcagtttggcccggtcggcctccaattgttcgggagtctttccgcaatcgctcatcaccatcaatgtccggtaatggtcgagcgtggaacagtcgaaatgttcattcccttcgacgtcaacggccttaacggaaaaactgccgagttctgatggaatattaccaattaaaattgaaactgtcatcaaatttaataataaaatgaaatttaaaggaaagaccttcaggtcgggcagtttctcgagcagtacttcttcgctgggcagcacatcgatgttattgcgggtgagcgcgagcacagtgaaaccgcggagacgcgacgggggcaattggacaaagtgccgatcgggacgattgtgacaatggatggcctaataagggagagcggaatttggaaagggaaagccaaaacaaggaagtgaacggatggatggtaattaattgacataattaaggtgagagtgtaattgattattaattaattaatagaaaaaaggtaattaagtaattgatttttaatcgattaatattttataaaaaagtaattatttggtgataactgttaattaattgacataaaaaagattgagtttgtatttgataatcaattaagaaaaggggtattacgtaaataattaataactaattataattaattaataattataattaattaattaattaattacctcgtcatcagtgtcacattcgcacccgtccaaacaactgaaagtgtagcctgaaagtatgttaattaattcatcaaaattcttccattttttaccttcgaatccctttgccaaaacgagcaaaagaaaagcaatgagaaaatagcagaacataagtgggaattaatgctgccaaaatatttaatgagattattttaaacccaaaaaagaataatgactaaaataaaattaaaccaaatcaaaggaggggaaatgagaagggaaagagacgaataaatgttgatggatgctgaagaaatggggcggagcaatgggagaggagtggcacagtgtttggaaatgggacaaagtcaaacaaatatttattgatgggattttcgtttggtggaaaagcgactgctaaaccaatgaaaaagggtgaaaataaaaggatggatgagatgagtcatcgcaaattcatttattcatttcattggtggaaaatatgtgaaaaatttgttcgtttttcgtataattatggaaatcgcgagactatgagaaaaaaagagaaaagtaagagaaaattggaaagaaaatataaataaaaattataattttttgatcaaaatctgctgctgacagtgcgtcgcaaatctttgtaattcttcaaatgatttgcgcattggccgcacgtcagcggacatcgctgagccatgaaaactttgtacgacttaaaatgggaagggaattcgttttcacccaatttgttaggtgtttttgcat

SEQ ID NO: 13138 - DNA, 1100 bp, Heterodera glycines
ccaagtggaaaatgcttctttcgtgcttatctgtgagtattaaatgcgcaagattttaggtatttaactaaaaatcgcatccctaattgtcagttttctgtctttaaattgtcaggtttctcttatccattttttctgaaaaataacacattgaaatatgaaatcgtatttaaaatgtcaggtttctgatggtcacagccaccgtcaggaaactgactaaaatgtcagattttttcatccttaatattgccatttgttcggcacaaaagtcgtttgacgcctaacttacacactaaagccacgactttttgtcagtaaacggagacagcaatggaaactcgacttaaattactgacacaattattattacaaaatcaaactaaattttctccatcgaattggcgtcatttatgttttttctccacaaacataccgcaaaaaacgaagattgaccgtgttttggtggcgaatcggggcgaaattgcacttcgaattatgcgcaccagcaagcagatgggaattaaggtcattaactaagtatttttgagatttaagtgtaataataaatagatttttgttaaaaaacccgttaaaattggaatgaatttttaattgagtaaaatttgagtggatttatttttaaaccaccgtttttccctcgttagacaattgcggtttactccgatgcggactccaaatcgctgcacgttcaatttgctgacgaagcgtgccgaattggggaggcgagtgcactgagaagttacctttgcgctgaccgaattgttcaggtgaatttattcgaaatttggatagtcttcgaaaatgacttaaatttgcctttgaaaggcggctctgtctgctggtgccgatgccattcaccctggctacggatttttgagcgaaaatgccaacttcgcggaacaatgcgcagctaacggactcattttcatggggccctcggcggaggcaattcgcgtaatgggaatgaaaaacacggcaaaaaatatcatgacagaggtaaaaacaatgccaattgtatcttatttgaaccataaaattaaacatcaacacggcattttttgccattttagcggaccggg

SEQ ID NO: 13139 - DNA, 2926 bp, Heterodera glycines
  unsure (1)..(2926): unsure at all n locations
cctcgggaattggcgcaggactttgctaatttttgtctgattttcncactttctccatcccaaaggtggaacatccgatcactgaggcgatcaccggattagatttggtccaatggcaatttctggtggcccagggcgaccgtcttccgttaacgcagcagcaaatcgcactgaacggacatgccatggaggtaaaagtgcaaaagggtcggcaataattcactagtttctcggcttttgtacgtcaaattcaatttttaggcgcgaatttatgcggaggacagtgaggcgggatttatgccaaccgcgggtcattgaatggccaaaaagaaaattaaatgaattttcatgtgcgccccgtttaggccatctcgagcaccttttcttcccttcatcgatgccgcatttgcgtgtcgattcgggcgtccgcgagggcgacgagatcagtgtccattatgacccgatggtggccaaagtgatcgcgtggggcgcagaccgatcggaagccatccgacgattggacgaaggactcaggtgaaaggtgccagtgtttaggcacaaattaggacgattattggaatagcttagcccatcgtcgcttttttgctgtgccattccctctcattttgccagacaaactcgcatcggcggactgcgcaacaatgtccgcttcgtccgcgcctgtctcgcccacgagcgcttccgtcttggcgatgtgtacacggactttgtcgcagaacacatcgaccagctgttggcccactgcaaatcgccgactgcggtggcgcgtgggcgggaaagtgttggtggattgcttgttgaggccgcactcgctcaattgttgctgtccagggttcgttgtttatttggatgtttttaaaaaaattgtgtgggagcaacgaggctctattgcagtgcacccgacaaaaaaggacacgaccataaaatatgtcggcaatttttaatgcatcattattttttccagaaacatccaatcttggtatcattcgaatagctctacgaattcttcattagactgcaaaacatcgaaaattttactttgtttcaagaaagttatgaccagaaatttcaaaaattatttttctgaacctttgatcataaatctttaatcttggtgattttttttcaaccttttcgtagaattaatcgaggccccagcatggattagtaaaggattatcaaatggcatggtatttgaggggggcgggaagaaatgacaattaattcataagtgaacataataattggttaatgaaccaacccaacaattagcggttttctcatagcgtggtaattttttgagaattctcctggctatgtctgtcaacaccgccggaccccctcccctaacattttaagaattttgcccaaaaagcgagtgccgatttgcttttcaaattttatttcggcattctttcagttccgttctctctgtgccgccgccccttcgtatccgtttgcgcaccaaagtccgttctacgcctcgcccgcctttttccgcatgaatcattttgcgcgtcgtacactccgattggacgctgaacaaagtgccgaggtggaaattcaacgggacggactctaccgtatcaatttgagggtatcgtagtcagttgaaattgggtatatttcacaaatttgaagtttgctgatgataaccaacaaatgcacaatgtccgagtcggcaccgtacaatatgaaaaaacggcgaccacagggaagccaatggtccgattttcattggaaatggacgaaagaaagcgatgggaatgcaccgccgttttgctcgagagagaactggcggtaatgattatgggacgaggatttagtgcttattttttaactcttgacattttttgtaattaatcgaaaaaagtcccaaaaaagtcctttcgactttttcatactcacctgaaatctttttctttttttccccccagattttcggactggacgagcaccagtggccgaacccgttccttcagcaaactgacgatggcatttccggcgccgtgccattgttggacggagttgccgatgggaaggcacggagtccaattcccgggctggtcgagaaagtttttgtgaaggcggacgacccggtggtcaagggccaacccctcgtggcgatgagttccatgaaaatggaattcatcatccggtaatgggatgggaattgagaacttttcattaaacgactgtcaaaatgggatgcctttagggctccgttcgatggcactgccatttccgtcttttgtacgcccgggcaaaatgtggcaaaggatgtcgtgcttttgctgcttaatgtcgccaaaactgacaatgatgagaaccaaactgaaggggaaaaagcgatggataacgaaggaatttaaatccgaaaaagccataaaaaaagcgaatttgattttgtaaatgccatattttcacattttacacttactatccctccacatatcttcttttatgagtttttatacagtgctcacaaattatctcttaataaaaaaaatgccttccattcatttgtgaccgtttaaacattggaaaaattggccgtcaccgaattatttaatattaaagtaacattctttttcaatattcaatttctccccgccgcattctcaaaagtccagtactttttcagagtttaacccaacaagaataattttgtatttgtgttataaaactgtattatgaaataggccaaaatatgccattttctcccggcggctccggcaccatctgaccagagccctaatattaaaccgcgaaatttaattattttagttcccctcaatttacctttccacgtcgatgccatcgcctgcctttaatttgattatttcttaattcattttcttcaaagttgtattggtaattgccgaactngtgttttgttttgact

SEQ ID NO: 13140 - DNA, 3678 bp, Heterodera glycines
  unsure (1)..(3678): unsure at all n locations
cttnaaattttgcatagcgatagagaaaaattttctgcatcgaataatatagattttgcaaaaataaggctcactaaaaagttatccaaaaaaacaattttcgaacgctcttatctttttctaaatcgttaaaccgcttaacattgctttagaaaaagcttctcctcatcaagagctttcgaatgataccaagattgtccaatttggttggcgaaaaccttcaaaaataacaaatcttttttggtacaacagctcagtttccggacggtgtgcttagaaaatattttctcttcacgagtgacgagtctacgaatgacaccaacattgtctaatttagttgccaaaaattcaaaattttttttttattgcaaatcgctattttttgacgaaaaataaataaaaagttactgtcatgtgtcgaattcgaactccaactcccgcccttttccctttattatgtatcttataaaaaccaatgattgcgcgagccactcaatgcaaatccttaatattgatacaggagttcatttttgtcaaactagtaaaatatacctaaatttttcaggtaatgtattaaccaaagcttaaaaatgaaaagcaattctaaaactgctgacattggtgatttttacgagatattgggcgttcctcgtaatgcaagtgagcaggaaatcaaaaacgcttaccgaaaattggcactaacttatcatccaggtcggttctattttaatattttctgtaaaattcagataggtatatttattcagacagaaaccctgggaatgagcaaggtattcaaaccacactaatcattttactgaaaaaatacaattaaagcgcaagaacagttcaaaaaagttagcatagcctattctgttctctccgacccaaataaaaggcggcaatacgatgtgtccggaccatcgatggcaatgaatgattttgaaggactcgacatatccgaacttggcggagttggtgagataagctcaatctcactctgttcttaaaaatttatttaggtcgcttttttggcgcaatggttcgctataagtgctaatatacccttttaattgttttcgccagtttaccaaattgggaataccaattcctacccaaattggaccgaaagtgcttgctcaagctcgtgatctctctcgtggcaatgtcacaaacggtcaacaggctaagtaccaaagagagcatttaaaaaaattctttttatgtgttaaggcctctcgagccaggtctggtgctgtccgaaacagtgaacaatcaggaggcaaatttctacgcgtttcagatgactcccgaattccaacaacacggaggtcctttcattattttacactgtagccaatgttttgttcagtgatcattcgatgcaaatcattggcaatgagcaaattcaaattggtccttttcgatcaggaaggtattccgttattttattattacccccttatgaaattgtttaattttgtttttaaggcgcagtccgtcacattcgcgagagtcagaagaaaaagaaatacacttccgctgaacttttctttgtgccgttccaacgaataaacatttccgaattcattccaattcggtaacttaaattttttaatgtgattgaaattttaaatgactactttagtttttacatggaggacaaagacactccgctgccatttcactttctggacactttagaaacccatggttacacattagcctattaaaacaacataaaatttgtctgtttttaggtgctaatgtgatggagcttcagccaggaaagcacatcctttgtgtatacggcgacaatttcttgagaatggtaaattattgggtgtctttttgtagaaatgccatcaaatcagtcaatttgttcctttcattttgcatttgttaggtcagttacgaagtcactttcctcccgctgaatcattacgccagcgcagcaattaacaaaatcaacgcattggagcccgtgttggcatcgaagaaatcggaaatgcaagaattccagaaagagtatatggacttaaagaggaagtgagccaattcggcaatgttaaagaattgtggtccctaatttcttttttattctgggctcagattcagtttcctggggttttcgagggtgctgattacgaatatgaactcggatttgcccaatttcgaaccccggacccgaattcgaacaaaaaattagaaaaaaattttttccaaaaaaaaaagttaaaaccggtcaaattttggcgcaacttgtgtattttacttaattaaacaatttaagcattattttacatcaaaataaatagtgttaaatgaattagaagcttttatccacgaaaaatgtagaccacaattctttagcattgccgccaattcggacaaagattcgtatttcaattgttcttttcttcaggtgggaagcagcgaaagaaaaactgaaaaaagaggaggaagacatcagcagttgcctgaaggcaagggaaaaggcatatgacgagtgagtcccttaaatcatccaatcagctgtaaccgacaaatcattcctactttaaaggttatatgacgcctgttcgaaaccttatcaaagccaggcattaactgcgaaacctagtggattcttatcttcattatttggctagcacatgtataatagttctcgcgattgtctgttatataaaccaatcctcttaaaaggtataaataaagtttattataagcggatccagaatacatatatcaatcaaggtgaatatttcactttccatcacaatacgatctcatgcgaatgtcaataaacaattattgtgtataataaatgagacaagcacaccgcaatatgttcccatgttcaatcgaaggtgattaacaagtcctcctgtacgccggtcatttgatttttttgctcatcagcagtgatagcgtttggtggcatggaattcggaatttgctgataatgcggttgctgttgatgagggtagggcgacgccaaatgcggcatttggtattgatgcatttgcggttgctgtcccatcatttgttgttgcataatctggtgttcgttgctttgaaaagctcgaattcccacaagatttacattcgtcaacatttcctaaagtgataaggccacaaaaattttgagacgttattgcatttacatttggtggcataggcgtggtgatgttttgtggcaaagatggaatggcattcattgtaacagcagtgtttggtggcatggaattcggaatttgctgataatgctgttgatgagggtagggcgaaaccataggtggcatttggtactgatgaatttgttgcggttgttgtaccagcattcgctgctgcataatttggcgttcattattttggaaacgttgaattgctagctgacgctcattcagcaacatttcctatattaattctttttaacacattttagtttttggattcaaaacccttaatttttatatgatataatcacgtgtttcatttgtcgcatgtgttccattttgtgtctcaattgactctgtcttctgtcgtgctccgctcttagcatttcccgtcgctgacgttcgttctcatcgcgcaatgcgttcaccgcctgtcttgcttccgttatgtgtgacaaattgtcttgcatgcgttcgtagcgttctttggaaggtaaaa

SEQ ID NO: 13141 - DNA, 2072 bp, Heterodera glycines
tcgcccaatccgccgatgtctctttcttttccttctttctttgttaattgattttgccgttctttttcaataataaatttcgtccttttgagattatcacgcgagaaaatcacagagaaatggcagcaaatgttgcggaattgaggccaaatgagtcggtgtttctttttccctttttctgccctttacaaattcaaattgttttcgtccggcattcctttcctttctctcccttttcagtgtcagtgttggcgaacggcgacaacaaacggcggaaatgccacacaaccaaaatcaacagcaatttgttgctgctgcgaatccgagatttggcaacttccgagaccgacttttccaggcgatgttggtgagtgggccgtggcgaaagtgcggaagtgtccgctcccttttcaggtccgtctttccctcccttaccatcaaaatgtgccgcgcactgtccgccgtttcttcgaatttatcactttattcaacgtaactttttcgcattggtctgatcaatctgctgaatttgtcctgttgccaggctttcgctttactcgccgtgctcatttatacgcatttccttctcaactctttccccgcccggtgtttggactccgtttacagcgattggccaaggaaaggcatcattcgcttggaggttccgcacatttgggctcatacaatttaggccaaatttttgttacatccatctaatgaatggatctgaattgtgttggttttgggggataatattaattttgtcgaaatgaatgttcgaaattgtgaggcctaactgtaaaagagtccacatttgttaaataattaaccatttttgtgcaggtgattcaaaatttggaggaataccgcgagagattatcgagaaaagaaagcggtgagtgaattccttggcccaattttcatttgccatcattttgtaatggttcattgtatttgttacatccacagaatcggcccattcgtcgcattgtcttttggacatcgccgacattttgagaaacggcggacttccggcggtcctccgcattcagctcggaagtgtgccctcgtcctcatcgcctccgccttcttccgtttcgccgtctctgaaagtgtccaatgacagcaaagccaacggcaacaacattcagcagagccgtgctaggttcggtcgacccttgccgactttgttcgacctgttcctttggttggtcgaccagttcaaccagcagcaatgggaatttgccaagggaacggacggcggagaaacggcgcaatgggcggacgacaaaggtaaaaaaagggtggacgaacgaatgtaaaagcatttcgcttaaatgacaatttttagcacaaaacgaagcggacgattcttccgacggagaagacactcaccagggacagaaactcaaatgttgtcaatttgcaaacaaatgaatttacaaatgcaattcattctttcagttcattcattgtcaaatgcggcgccgcccgtttattacgtaattttattttcatcaaattttcttacctttttatttagcaattggtcgaattttcgttgcattatgggctgctgaaactgagcatggaaatgcgacaggaattggacgtcgaagtgcaaatagtgcaggcaaaaaaacattcgaatcaaaaaatacttaaaatgtttttagttggacccggaaaaggccgaatgtttcagagattggcgggagagatttctgatgcgatatttaatcgaaatggacgagctgattctgtaaggccattttggacatttcaaattcagagggaatttaaggagttccgtgaagcatctgatggaaaatgagacggaacgaggcaatcggaagtttcacttccgcggccatttcctttttaggctttttgcgcgatttgatcggtggcgaattgtaccatttcgtttacgccggtccgtcctcctccagcacttatctaacggccgccattgtgatgcttatttttgtgggtcattttttaatttattttttgattgttttctaaaaaggatttttatgtttatttttgtgttgtcttcaccagacttt

SEQ ID NO: 13142 - DNA, 1728 bp, Heterodera glycines
aatggtgctcatgtacagataaaaccaatttattcggatgccataagtaacacctgcataggcacaagcaagcccaagtttaggcctatgtacgagttgtcatcgcttccaatacccaagcacataatttatgcattcctcacacccaattttgaacagtttgaagcgccataataggaaaggtcaatagaataaacacaggaaataaaagaaaatacaaagcatttagtggtaatacatggggaagaacacaaaagccacaggcgaaaataaaagaaaatagatataattgttatgtggataacgacagttgtgaatttcggaatatgtaaatttgaattacttataaatgccaagttttcgcaccgatcacaattttccgctacgctgtacgtgccctagtcaatattctacaatgtcttcttgccaccgtcgcccgaccggtgactgttttctgacagtttttcccacgagttgctgtcgtccgtccccgtttgtgtcccttcttcggcgtcgtctccttcacttccgcttgtcccgtcttttttcgatgagcttcgactttcacttctgctgctgcagttgcgttcgccttcattttgtgctttttctgccatttggactgtttcatcagttttattttcttctttgggcaacggagccaaaggaacagtcggaggtggtgaaacgaattctgagtcttaaaagggttttttaaattaatagaatggaaatgaaagaagtgacagaaaaatcggtgcttaagacctgatgaaatggaccggctaaacgcaattttccccatggtatctcatggccagcccttggttcagtttctcaccctcttcgctcttttcctgctctaagaacggtgtcttttcgtcctcgttcttcccttcggtcgttttttcccctcggctttcgttgtccttctgctgttgttgctgtccctcctcgcctttcttttgaccgtctttcttcgcttcgactccttttttctttttatttttcggctcctttttcgcgaaaactccaccggggacgtattccttaaaaacaattgattgtaatcagaaggaaactgtttcattccgctttacataagtgtacgccggttggaaactttcgaaaaagccgcactcctccagcaaatttgggagaagccaaaggcgatgacggcccagagtgaacaaccaaacgaggccaaaaagaattgtacgagctaaaatggaagaatgtaagaaaaaagtcagaatttaaccatcagaatgatggaaatattaccaaatgcgacaccgagcaaaagtccaaagagggcaatcccaatcacagaaaggtaataaatgccaagccgtaaccaatcaggcctaaaaatgcatataaagcgatcaattgaaaagacattcgttagcaatgaccacagcgggaacagacagcctccgatggtgccgaggacgatcagaatgccaacacatttcttccacaacggagtcgggtcgaacacccaaacgtacacatcgctcgtactgacgtcaagcgtttgaatgtcgtggaacagaagtttgaccttctttttcctccgcttttcttcatcctaaacatttttataatacattaaattttcgatttttttcaaggtccaacgggtcaatttcccgggagtggggaaataatctgtgagttgcgaacacccggactgttggacccctcctacccgacttccgcccg

SEQ ID NO: 13143 - DNA, 2140 bp, Heterodera glycines
  unsure (1)..(2140): unsure at all n locations
acatttgccggacaaggaggattactgccctgggtcaatgaagcagacaaatatgagaaattcataaaatggtattcatacgatttggtatttttaatgttatgtttttttaggtatgacgagaacaaaaacacaccggtttatttaccggacgaactaaagacgtattgtcggaacgatacggagattcttcttgctgctgttgtccaatttcgccaaattctgatgtgtgatatcactgaaggttttgatgtgcttccgctgagtgctactattgccaggtcgttatgccaatcggttttctaatttaatttctattcagcgtttgcatgaccatctttaaagggaaattccttaacgaaaaagagcttgccatcgtgcctgaaggcggttacgagcggaacgatagggctagcgtcttcgccatcaaatatttggactggcgctccaagcgagacggtgttcgcatacaacacgctggaaatggtctcgaaaagagatggcggcagttcaaacttgatgggtggattgcggagcagaacaagtgcatagaagttctcggctgctactggcacggatgtgagagctgcttcaaacctgacgacgaactggttgacggaaaaacatgccgagaactcaacgatgctaccaaactgcgtttgctaaaactacaggagcctgttccagctgaggatgcttgcggcgaagcagatgaagagggccttgacgtggaagagatttgggagtgtcagatccgtgaacagctcaaaagagatgatgaaatgcgagattttttcgacgacttggggaccgaccgggggcccatcgacccacgtcaaacattctacggaggcagaactgggccgcttcagctgattgcagagccaaaggaggatgagaagatttctgtcttcgatatcgtcagcctctacccgtgggtcaactatgccaccgactacccgaccggaatacccgctgtcatccaccccaccattgaggagatgatcgtcgactggactcgacctgagcatttacaataccaaggaatttatcgtgtgcgggttattcctccaaaagggctcagaattccggttcttccactaaaaatcgacgaacgcctcctgttctgctgctgccatcgttgtgctgccaaatttcggaagttgaacacacgacgagtgcacaagtgcacacacacggatgagcagcgggcttttacaggaaactttacgcatattgagttggcaagagccttggaaactggctaccgagtggacagattctggagagcttggcactacgatgaatggtatgagtttgttagggaatcttaatatttttgaaatttaggagtgacggaatattcaaggactatgtacgtctattgatcaaattaaaggtctgaatatattttttaaagttaaataaagtccaaattgcaggtggaggccagcggttttcctgatggtgccaacactgtggaacaacagcagcagttcgcggacgagtacagaagaatctacagtgtaaacttggagctggaaaatgtgcggagaaatcctgggttgcgcttcatctctaaactgatgctgaacagtctttggttggtatcaaaaatttttatgaaagaataaatgaaacttttaggggaaaatttggcatgcgaaatgaattaggcgcgaacaaagtgctaacaaggccgcaggaatttttcagcctcatcatggatcataaaattgtaaaccataatgtgtaaatgaattttcaattttgtacattgtttaggaagtgtcggctgtcatccctttgtcagacaccgccgtccgtgtcatgtacaagagcaaaaagaatttcgtcagcgaacacacgtccagcaacattgtgataagtctgtggacgaccagccgtgctcgcctcaagctactcgattttatgacacaaatcgatcgaacagagggagccaaactgctatatacggtaaaaggtgttttaatattgcaaagtacatttgacccaacttttangacaccgacagcgttgctgtgctccatanacgtgacatcgtgcccatccagacaggagaatacttgnnggcaatgagcgaggagtatctcgactatgagatcaaaacttttgtctg

SEQ ID NO: 13144 - DNA, 1992 bp, Heterodera glycines
  unsure (1)..(1992): unsure at all n locations
acgagtacagagaatctacaatgtaaatttgacctgaaaatgtgcggagaaatctgggattacgcttcatctctaagctgatgctcaacagtctntggttggtaccaagaattntagtcaaaataaataacaaatttaggggaaaattcggcatgcgaaatgaattaggcgccaacaaagtgctaacaaggccacaggaatttttcagcctcatcatggatcataaaattgtaagccaaatttgtaaatgaatttcaattttgtacattgtttaggaagtgtcggctgtcatccctttgtctgacaccgccgtccgtgtcatgtacaagagcaaaaagaatttcgtcagcgaacacacgtctagcaacattgtgataagtctgtggacgaccagccgtgctcgcctcaaactactcgattttatgacacaaatcgatcgaacagagggagccaaactgttatatacggtaaaatgctctaatattgtcaagtacattgacccaacctttaggacaccgacagcgttgctgtgctccataaacgtgacatcgtgcccatccagacaggagaatacttggggcagatgagcgaggagtatctcgactacgagatcaaaacctttgtctgcggaggtaaaaaatttttttttttaatttttgttctaaaagttcaggcgcaaaacaatatggctttcgaatgctgaacaaaaggacaggagaagtggaatacgtacaaaagatccgtggcattacattcgacgtcaacaacagtaaggcgctgcagtttgaacacttcctgcaaaaggtaaaaaattacggacggaacactggtgacgacaacgatgatgcacctgccgtgttttcctacgacaaaataatgccaacacgagacagccgagtcatcacacgtgaactacgcaaaaaatacatgccaatatgtcaaaaaggaataatcaacgagcaatacgaagtctacccatttggatatgaataatcaattttaaaatcatattgtattattaatcaaaaacaagtcttattaacacatatttatcgtcatgagaatgtagcaatacaacaattgtttcagtgaaaaatgaaaatgtttccgttttaaagggtttctgttttggagacacgtaacaattcaatgggaaaaatatcgcggtgatgaccaccaccaaactgaacaacacatggaagggttgggtactttaacatgacacgatggcgagtgtaaaggtgttgctgaaccgtgattcctaggaatccacggtatgcaaacacctgatttgcaccgatggggcacaaagcatcgggaataatcttaatattttttctaagatggacagtctcaatgtccaattggctcagataggcaaggttctcagtccgtcgtttctgtagttgcttcgtcagtcggtatgggccacagttgttgaaccggcacagcactctcaccaggttgtagtctcgttttcgcgttcgtcgtcgctccaataattgatcagatccagttcgtccacgatcaggttcatgctgctgctgttcggttgttcgcaatggcgtgacagacacagcggcgagtctcccgggcaaatcttcaagtccttcagttccacatatagaggttcgctccttaaaaaaaacaaatgaaaatattaatatttttttattccgaaaacttaccacactattccctcgtacttcttcttcggataacatgttgagtacagttcaacgtcagcaatcaattcgagcgacccgtcgatatgcacaggttgattcggatggtcagcgtttgaaatgtgtacacagtcgacagcacaaagtgggttgggatagagacaattcccaccttcaggcccgcttttaatttcctctttcaaacaggtgtacagatcgtctacactgctcagcccgtaactgtctatcagataacggattgccctttacaggcaataagcaggtcaatatggggcggcagttttgg

SEQ ID NO: 13145 - DNA, 3059 bp, Heterodera glycines
ctgaaaattgtcacttttctcttccaatgcttttccattcgctttttgtgaatcgagtccatcatcagattcattctcctcctgtttgtttcctgtttgattttggagttcgtcgagaagcattttcccgatctcgagaaattcgtttgccatcaaaaaaagacctaaaaacaaaacaaaataatatttaaattccattgaaaatattgttcaaaccttttttgctttcatcgtttgtgcccaattgaccactcgataaatttattgccgcaaatagcgacagaaaaaggccaaacccatgcattggtgcggaaagcattttgttactatggcaaaaatttgaaaaaactttttttaaattataatctaatgtaaaaatacattgttaaatgcagataataaaaatatttctataaaaagggcacgcccatcaataaatggaaataaaatgggagatggaggcatgaacaaagaaaaaatgtgacataatacatattgcggtgctaggtcgatcctaaaaaagtctcaatggggcgatcctaaaaaagtatcaatgataataattaattaaaataattattattcaatgaaacaaatattttgcaagtaataaaaattgttttctacataaaatattattacgtcggaaacgataatcaatgtatgtcaatattatttgccatataataacaaatttttaatttaaaaatatatttcccttcagtgttaattttattcattagattaacataaaaaataaaaataatttttattagttttatttttcccttaattttacttgattattttgaaggccataaatccggatttgaaggattcgtaaaaaatcctcaagcaatatcacttgtcaaaagctatgaaaaaaggaaataaagacacttgatgaatgtcgcagctcagcgagctgcgactgtccgatggtcggacagtttcaacgaaatgagctaaagatggaagaaggcacaaaaaagggcaacaaacgagcaaagagcaaaaagaaaaggaggtgcagcgaatgagtccgctgattaatgagcacgtgaaggggcaaaatggagcgatcaaaaccggcaacaacaccctttcgcgcaaatgtggaccgatggaacggcaaaaagaggagcccgttcagccgacaacaacacaacgaatgcatgtgaaggaccggccgcaacagcgatgctcgacaaagagaatgaggaaaaaaccccgaatgatcaccccatttcttattaattaattgtagcccaacccaaatgtgatcgtatttaagccccacaaattgttcatttcaagggctccgatcgtacaccgaataaagagagaaaacccagcaatggatattccggaaagcgccctcccccctctccttcctctcccaccccaccccgaaccaatggacgacgaaccgtcccgttgcggcttgtgggccgagccgcaacaagtggcgaccctggcagggattttggtggggttttggggtttgtgagcaggggtagggggagcatgccggccccacaggtttttcgtaacctgtggcgtctggcattagcgctattccattttgcgttccgcgtttctggccccttgggttttttgtaacccaaggcgcctgcattccgcgccatagggcccctcgggtcttttgtgacccgtagcacctcgcctttccgcgccttgcattccgcaccgtttggcctcccgggttttttgtaacccggggcgcctccattccgcaccatagggcccctcgggtcttttgtgacccgtagcgcctcgcctttccgcgccttgcattccgcaccgtttggcctcccgggttttttgtaacccggggcgcctccattccgcaccatatggtcccttgggtcttttgtgacccggggcgccttccattccgtgccatacggcccctcgggtctctttttggcccgtggcgcctcgccttccgcaccacagcccctcaggaaagaatggtcatgcgcttaggcagcgagcctatctcgcactcattggcggcattgtgccgagctcacaaagagggcagtgagcctaatctgcgcaaattgttgaagcgcattggagcagcgcatgttgaagcgcaaattggagaaagcgcattggagaagcgcattgaagcagcgcaaatgaagcgcaaattgaggaagcgcagaccgaggcggaatggaaaattgtcagaggaagcgcaaattgaggaagctcaaaccgaggcgaaagggaagagcaaactgtctgagcaggaacaaaaagacagcgcgcaaattgaggcgaaattgaggaacgcaaatcaattgcaggcgcaaactgagtctgagcgagggcgcagactgagattgaacacaagcgcaaacagaacgatggcgcaaactgagacgaccacaggcgcaatactggagaaccactaagtggcgcccgtagctcagttggacagagcacttcatgctttgaggaggtcgtgggttcgagtcccaccgggtgaaatctgtgttctacactacgagcctggctgaggccatcatgaagtcaatggccatgggcgctggggcccatcatgaagtcaaaggccatgggcgctggggcccatcgtgaagtcaatggccaagggcgctggggcccatcatgaagtcaaaggccatgggcgctggggcccatcgtgaagtcaatggccaagggcgctggggcccatcatgaagtcaaaggccatgggcgctggggcccatcatgaagtcaaaggccaagggcgctggggcccatcgtgaagtcaatggccatgggcgctggggcccatcgtgaagtcaatggccaagggcgctggggcccatcgtgaagtcaatggccaagggcgctggggcccatcatgaagtcaaaggccaagggcgctggggcccatcatgaagtcaaaggccaagggcgctggggcccattgtgaagtcaaaggccatgggcgctggggcccatcatgaagtcaaaggccatggacgctggggcccatcgtgaagtcaatggccaagggcgct

SEQ ID NO: 13146 - DNA, 984 bp, Heterodera glycines
attgcatttatatttttgtcaccgggctttagcactattatattaataattaaatgtatttataagaaatgttaaatattatttaattctttaattctgcaattattttaaacatttattttgcgttttatcgtcagataatttaatttaaaagtggatttattaatttttatttttattattttcttgtataacatacacttaagaaataaactctcataagtgcctttaattttcaaccttaataatgttacttttggtttctttgatataattttttttttactttttttattgaatttttaatttattatcataattatttggaaaaacctttcaatttgtaatctaattattttttgtattatattattggttttatgcaataatgatcatattaaaattaaagtcactatttaaatctgtttaaaaatagtggaaaattccatttttctaaattttcatagaaatttgtctaaatttcaaaaaattaattttcttaatatttaattaataattgaattaaaaaacataatttattcttttatcattttataaatgaagttcagctgttctctcagtttaagtatttatttatttgataatattttaaataaaaaactttttattgaaataattcacttgcgaatttgcttcctatgtttgcagctttttcagcaatccattcaaatacttcaactttgaaaggtttgctacttgaaaagttagattcttaagattaaaaatcattttattttatgttttaattttaaaattattgcataatcaaaaataaacaaatttaattttaagtcaaatttttgtatatttttgatttgatgaattggcttgctatttatttatttaatacatatgtgcatgtaatgattttatatcattagaaattgaaacaatatttttaaaaaagtcatttcatatagattataaaatattaatacatagtagtataggaacccaaaagcg

SEQ ID NO: 13147 - DNA, 2789 bp, Heterodera glycines
  unsure (1)..(2789): unsure at all n locations
aaaaaatttaggagtttaaaaaatatcaaaaatgttttgacatttttgaaagcatagcgagagaaaaaanttgaaaaaattctgctaaagtcaatttntcatgtganccaacaaaatgttcacagcaagtggatcatatcactccttcatgttgatctacactagagatcaacattttgaaaaaaccgtagctgtacctgtttcaaaaaatggcctgtaccagggatgggccaaattgaaaaataaaaagcgaaatgcgaaaagcgaaatttgcgaaactgaaaaatgcgaaatgaaaaaaaaagcgaaatgcgaaaagccaaaatatgcgaaaatgcgaaaagcgaaatgcgaaaagcgaaattttttctacaactttttaatagttaaaatcataaagcaaaaatcattttttaaaattttattccaaatttaaaaatcaataaaacgcttttttgaggcgcgctttttccaaaaaaactttttgggaagagggagggggcaggcggcgccgggaaaattttagaaaatttgattaaaatttgttgacagattttcactaaaaatgatagtagtatagagcgtcaaaagcgagcgggttccgagcgggtgtttcccgcacgaacccgtgcctatgggaggggtgcagccctttgatgttgccgcccagggacccgtgcctatgggaggggtgctgccctttgatgttgccgcccgtggacccatgcctatgggaggggtgcatccctttgatgttgccgcccagaacccaaacctattggaccactttaaagttcccgcccagaaccaaaatctattggaccactttgaaattaccgcccaaccncatnccaatttcccaaaaccgccacgggtgcttttttttgcccaacccctattcctccccgccgatgcatcgccgcgcaaattaatcgataaaaataatcgataatgacactagcactgtcctccctatcgatgtcgctgccgcgcaaaaaaaaatcaataaatttaatcgataatgagaccgccactctcatccgctccgtcgatgcgccgcgattccgggtcgtgaaaaaaaaatcgataagcaccaaaattgtcaatgaaattcgaatttattaattgaacaatagttgaataaataaaaattcatttaaattaatgaaattgaatttttctgaaataattgatggtcttttattttcttccattatttcgcaatttgcacgtgactttacgatttcgcaatattgaccaaaattaggtcacctgtcaatcaaaatttttttattttgcattttccccatcgatttcgcaatctgcacgtgtttttgttgcatatttcgcaatagacacgtgactttctgccattgcgtcgaaaatataacatttgtcaacgaaatattccacaatgtcaatgaaaaacagtcacgtgccaggtgtcagctgacacgaggcattctgcggccactataaaagccccccaaattcacttctccattcagttcaaccaaaagttggattttgctaaaataaaaattgtgggctcttatttaaaaatattaaatttaattaaaatgacttcaaaacgcaacgggactttgcaaaaaggcggtccgtcgaccaaaaaatgggattttcgagctatagggtaagcaatttttaataatatatttaagagacaagtgtaatcaataatttttcaagaacaattttactgaggaaatggaaaattataaattaattgacgaacggtcgacgatttgcgaaaaatttggattcacgaagaacattacggaatttcggattaattcggatgtgagacgccctgacgaagcgatgagggacgcaatcgacacaatgattaaggcggcttttaagactacggaagaaaggatgaagcggaaagtgcggatgtttggtatggcaataacgggtgccgggcttgcttcccggtttgggtaccgtacagggcgtacccgcagaataatgcggatgttattatgcaggagattaataagttggggcagagcggggacggagatgaaaataagaaaacgcttttgttgtcggagcctattatgatgaaaattacttgtgttacaatgcccagcggggaagggcccagaaatgtccacaaatttgactttggatttaaggaacatcagcggataaggtaagtatttccaatttaaaaaatgcaaaaaaaaatcaataaataaatcattattatgctaatttttactaattaattatttattaaggatttcgaatgcggataaaatttgtttgttttatgcgttggtggcgtcaaagctttatttggaagtgcatcggaatatttttaatcgatttatgaatagcatagtgagacaacgggaggcggctgttgaactattacgtaattgtggaattgatattaacgaatatagctatggagtggaacacttgccgaatgttcagaattattgggtgggtttaaaatttgggaaaacgtaaaattaatggatttttaggataagatttaccccggaaaattccggattgttgcgtttgagaagtctcggatccgcggaaatcgatccgtgttttaaggaagggccctatgggacgcgaaaatgtagtgccgatatttttggagaatggccattgggatggtctgaagaattacgtctgcttttttaatcgtgggagaaaattctgcattgattgtgagtgcttttttgacaaggatgttaaacatactttcgactgccgggcaaggtgttattattgtaacaaagtag

SEQ ID NO: 13148 - DNA, 1029 bp, Heterodera glycines
aaacattccgaaaacaaatcacttcccccggcgtccttttgtcggaacaacaattcttcccttttggccacaaatgagcagcagctgttcttctcccaattccttggcccactcgtcacggcacctcctcccaagtgtttgatgggtgccctcctcctccgttagcttggcttcttcccccccccccccccattctcttcctttttctcttttcccattgttcctcctctgttcttcttctctccgcattgtgttccattgttccgtctttttcctcctttccctttttgtacttctcttctttttcttctcttcctcctttcacctcccttttctctttcttttttccatgtttctctcccctctgttttttttttgtgttcctttttccccttaaaagagcctttcctccctcctctaaagccactcacaaatcagttttattcgcctaaatttgttacccaattttgcactttagaatctgtagctcatccatctcttctcatcttcatcctctacttttgtccttctccccatcgccatgtctgaagaggaatcgcaatagtgagttcgttcattgtccgtcaattggcacactttctctttatctctttttttctctctttccttttctctctttcctttgtttctgtttctgttgttgttcatctccattttattcttatactgcttgttctcgcccctctctacctctcctattttccctctctttctctctctcatttgaatgttccccaacaatcgtcgtcctttcgctccctcctcttcctcttcctcgtcccatttccatcattctcttccccaccatcgttcttcttcctcccgctttccttctccctctaattcgtttcgtccttctgctgtccccctgtcttctgcttctccttcgtcctccgttcgttcttccaatcgtcattttccttcttcgccttccctacgacgatcctcctcaacagttcgtcctcctctccgttctgttccgtcttcgtcctcaactccaatccatgg

SEQ ID NO: 13149 - DNA, 2609 bp, Heterodera glycines
  unsure (1)..(2609): unsure at all n locations
atccatggccattcttctcaaccgcagcaatacgtttcgtcctttttgctgaaaatacaaacgcaatatcatcaacagaaaagagacggaggtcatcaacagcaagaggaagccgaaacagtatcaggagaacaaccgcagcagcaaacgctgacggatgagcacgacatggaggaactgttggaaatgtacggagtgcggaagagtggcgaaacggtggcggaagagggagtgccatcggtgaaaaactcatgggcatcgacgtatttgcgggaacggaaggcaaatgcacaacaacagcagcaaaagacagggacaaataatgagaaaggagggaaaagccgaacagcccaaaattgggaggagggcaaagagagggaaaagcaggagacgaacacgggcaacgaggacaagcagttcagagaggtgagagggacatagacaaacccatgggacgagcagagggcatgaagaaaaggcaattgccctttttaggcccccggaattgcttttccgactttttagggctttgacttcttctggtgatgaccccaactaattagaaaaaatcccttcgatttcagcgccttctgaacgcacatcaaacggtggacgaactgctgaagaaacgcggcattggcgacttaaagaaggagagggaaatgctgctgagacagtacgaggcactgctggcagcagcggacgaagaattggagacggaatgggcacggatgagaaagaggggcggaggagcggcggggaacggacggagagactcatccgactcgggactttctgaggattattcagaacgagaaaaggcaccgacggaagggaaaatggaagaggaggaaaagatagatgaggaggaggaggaagagcaagagaaagaagaggaagaggaggaggaggaggatgagaacgagaaggaagaggaagaagtgaaggaagaagagaaagaagaggaggaaagggaagaggaagaggtgagaattgaagaaaaattgcacaaaaaagaagaaacagaaaaagtgaagagacaagtgaagtgccaccagagaataaaagaaaagtgtgagcagaagatcaaagagagtgaagagagaaaggtggaagtaacgctgaaattgagagagaaaaaagaaaaggaagcgaaagcagagaaaatagtaacagagaagagaagaatgaggaaagaacacagcataaagaatgagggaaaagaagaggcaaagataaaagatgaagagaaaaaaagagaggaagagaagaaaagagaggaagaagtgaggaaaaaggaagatgaagagaggaagaggaaggaagaagaaaagaagagaaaagaagaagaggcaaagagaaaggaagagaatagaaaggtagaagagagaaagaggaaggaagagaaagaaaagaaagaaaagaaagaagaagaaaagaagagaaaagaagaagaggcaaagagaaaggaagagaacagaagggtagaagagagaaaaagagatgaagagaagaaaagagaggaagagcacaaaagagaggaagaagtgatgaaaaaggaagatgaagagagaaagaggaaggaagagaaagaagggaaggaagaagaaaagcaaagaggcgatgaagagagaaagaggaaggaagaagaggcaaagacaaaggaagagaaaaagccaaaagaaaaagctcaatcaagcagaaaaatggcaaatgtgtcgcttcagcattgcagtttctcattaggaaaagaaagtggagaaaaagagaaaggacagaaggagggagaaaagagtgtgagagcacattttcgactgacaatgccaacggaagagaaaaaaacaactaaaaagacaatacaagtgaggaagcaaaagagtggggcagagagaacgatgaaagagaggaaaggaagagaaagggaggaaaagaaaatggaagagaataaggaagaaagagagacggacagagaagaaaagggagtcaaagaaagggaggaagagaatgaggaaggcagagagacggacagagaagaaaagcaagtcaaagagaaggtgaaggaacagctgacacggaaaaagccggccaaagaagcacaagaagttcgagagctgcttcaaagtttgcggggaaatctgcgacgaacggaaaagcctaagagacaattcccagtagagaagcagagcaagacgacgagagagaaggggaaaaggacacagagggagagagagacaatggagaagggtgtgcaagcagagaagcagaggacgagagtgagtggcgcacgaggagagcgaaaagaaagagaggagcaaagtgaaaagaaagcgggggaaaagaacaagaaaagggaaaaggaggtcaaatgccgaaaggagagagaagcggcggcgggtgacttttccccttcgcttctcccccggcactccgatcagtccgatcggcccaattcggcttcttcttccccggcacgtcgtccgcatgatgagtttcagccctgctgctcatccgtcgcttctcctcctcatcctcttccaccttcagctgatgcttcatccctcgcctcatccgcctcngccatttgcgtcccatccctccgttagcaatag

SEQ ID NO: 13150 - DNA, 985 bp, Heterodera glycines
cggtttgttatatcaaaattttgtggtaaatatgtatattaaggacccccccggcgtttcaaaccttttcaattgggcccaatgggcacaactatggaagaaaattttgtaaggacaaaaaaccgaacgtttaaacttagaaaaatatcgcaataattttggaatacgggtggaggaaatatgggtcagtacaaattaacgattttttgattaatatttcttaggaatgtgaggtcctacgaaagctcaatccacgtgataatgaaaattatgacatagaaatgaagaaatatttcgattctattcccgataagggtggggtaatcaaaacaaaaagcaatttagcaaatatttaggaccaatcgacccccgggatgcttttgcgggtgggcgaacgcaagcgttttgtttaaaataaagtaaaataattgccttcgaattgtgtgacaacagttgcaaaattcgggagcaaatactcttgaaggaattttaaaaaacgaaataattaaatgatgagaaatgggaccaaaatccatataaataattatgctgatgtactgaaattatagtttttcaataaacaaacatcttcaaaaaacgagataaaaaaatgattttttaaaattccaaaaaaaaaaattattattttttcttgggggaaagggtcataaaaatgagaaatgtccccttccaccaacccaaccaccatttctttgaaatgggtcgtaaacggcttggactggccgaccaaattgcacatgcaatataattactgccgatggtcccccacccttgagaattttttttggtaatactgccgatggccctttacctaacattcattttgcccaatttgaatcctggacccggactcggacaaaaagtcgaaaattcaaattttcaaaaattcacttttttcataaatttattcaggcaagctagattaagtgcacacattggcacatcaaaaaaggtcattctgtac

SEQ ID NO: 13151 - DNA, 2087 bp, Heterodera glycines
ctttccaaaaaacctctaataaaacggcccccatcagctaaatttggattttgacccttaaaaaccggaaaattttccaaaaaatcactttttagcgaaattttgtcgagaatattgattaaatttatttttcaaaaattggtaagtttatgtcaaaaataagcaaaaaagccaaaatttcgctttttgggttgatttttcgctaaaagtgagtaaattttagttgtatcatgtttttttcttctaaaatggttttaataccatatttagccatttttttgtaagttttacaatattttagcgaattagaaggaattttgaaaatttaaatgcaatttcaaccaataaatttgaagaaatgttacactcacttttgaaaatttatatccatattttgagatttttaccatttatgtccatatttcgcgattttagtccatattttatggccatattttgcgattttatatccatatttttaccatccctagtcatgttttcatctaaaattagctaaatatttattttatttttatttccgttgtttgcctctctagtcattccttggccggaaaaaaagttaccaatcttgaccgtgtccagaactagagcccggaaatttcaaatttgcggatcctgttgaaggattggaattcaaaattttttgccggaccggatccggccggattaatcctgcaaatcctgcattttccaaaaaatgcaggattgcgaactgggatcctgcaaaatcctgcgcaggatccggtcctgctccgagctctatccagaaccgcttatgaaaataaataccgaaaagttgatagatttgaataccctttttgaaattcagtgcgatacaaaatgatggttagccgacatttgcggaccgacttttgcggaccgacatttgcggaccactatttttgggttgaattgtcaaaaaaaacaaaaaaaaataataattttttcaaaaattgagtgactaagtagttttatttgtgatttttaccaagttgaacatcgcccttcaagagtaatcgatcaactttttgcaatcaacatcgaaagaacccattttttaaagaagtttagtttccatagataaatatagtatgtagttgctcatttttaattttgggcccatagttttaataacagcaaattacggacaatttttgagaaaaagataaactattttagtttttgtttgttaatttaattggtttgacatgccggaaaaaattaagctctcggttaactaaagcgtggaagtgaaacaagataaaaaattttcttggtataaaattcttgaactgacttttatatttattataagttagaaattctataaaaaagaaagaaaaaagttatgtcaaataagacttctctccaattgagacagatcgctttgcatcagcttaccttcactaatttcaatttgggaatattgaatttattaaaatttcttattatttttttctttatttagacagttctatcgagaaatagtggtccgcaaatgtcggtccgcaaatgtcggctaacccaaaatacatcatgcggggaactttcaaccaaagtttttgaaccagtttttatgagcatttgcttgagcattccctgttgtccgaatttttttctgaggcctcgcatcattatattctcacagacatcacgccaaatagcaatattgaaacaacgaatccggtcgttttttccaaattttttgatttttgcagtgttatttgtcgccatgattgagctaacaattgtgggcgatccaaaaaaaaactcagtgtgggcgatccaatgtcttcttataagtagaagtttttataatgcaaatgtaaaatataagttatttttattagttcagtaaaacaaatttattaattaaatgatttttttaaaaaaagccccaaatatctctgttgataaaaaatgagaccgagccggaccggacccggtaacggttttaccggtacggcaaaccggtctgcgattaaaggagaaatccggtttaaaggacccaccatccaaaggaccaacgccgacaaagagctcacggacagaggacccacgaaaaa

SEQ ID NO: 13152 - DNA, 2438 bp, Heterodera glycines
ctttgggatgacaggggcgttcggattttgtaatttttaatacaattaacagtttttgtccaaaaagaccatcgcctaaaatcttatatttcattttgtggtttttcgataggtcaatgaggctaaatttacaaaatgaggctttgaggttttttgaggcttttgaggaaaatcgtcgtaatctgttaaatttatgattaatcgataaattggcataatgtatgagaatcatttaataatttgcggaaccctcagttcggccccacggttcggcaccacctcgtttttccacgatagcttttttatttggcatccaaatcaaacaatcttggtatcattcgaaagttcgtatcatgctctattagcctaacaaaaaataaaattcaagcctggaaaaaaaattattgagaaaaaacttgaatttttgacttttttgcagtttcatgttataactaatttggtaattgtctaatcgctaagcaatagcttagataaagcctctaaacatattaagctttcgaaagataccaacaacattggatttggttgacaaataaaaaagttatagaaagttatattggaaaaacatgctggggccgaaccgtgggggccgaactgacgtagaccgataatttgggtttttaatagagcatcaaaacgaaaatcacattcaaattttccaaaaaaaattgtttttcataaaaaccagaaaatagtcaatttttcccgaaaattctcaaaattaagaatattttcaatgaaaatatgctaatggtcaaaattcttaattttcgcaccctaaaaatgctcaaaatcgcaaaattttgccatttttttggacaactctgttaacgaatcgtattaaaaattacaaaaaatttttccggtgcgtgcctatcggcaccgccagccccctttccccctaaagttttttggaaaaagcgccgcaatcatgcttagatttcataaaaatcttatttttatataacaaatacattgaaaaagatataacatttgaaaattttaatgtgttttgaaaaatttataaaaattaggctttttgatccaaaatgaggtttgttgcttgccaaataacgtttttcaaattttaatctggctgccctgtttaaaaccctaattataatttagagaaagtttcaattacggctacaacgacttacaatctattttcggcaaaatccaacagaaaatcccaaacataattggccctcaacgctttttcaatgccatgtttatccataatcaaaacttttggaccagcgagtgtacgattcaacttggggttgcctatattccaatcggatcaatgccgccattcaatttcgtggagttttatttttccgacccacaaccctggttttttaatttccgctatcgtctgtatcttattctatgtatgctttgttttgtttaattttgttaaattttttctttagaacttggcgtcaagcaattatgaggaacgaaagtggaaaaagacgaatgctttggtcccgattttttcctatgttaaagaaaaaagatatattttggtccgtccagagtttttaattttcgtatgttaaagaaaacattcactgaataaagtataaaaaataaaatgtatttctgttggaatttacacttaaaaaaggaaatagtcagtcctaaagtacttggtatcatattggcaaactttctacaataccttatgtatgtaaaaattaactcctttagaaaaaaggtacaacaaaattcaaaaaattatttttgcttgtaaaattcaaaatatggcaatatacagaaactttggttttcttttcaaaagtgccttagggtcggggtcagttcagcgcgggtttttcggcgtggggtttttggcgcggccagttcggctccctatataaaatggctttttcgccgccaatatttaaaaacctcaaaaatttttaatttgcttttcattacgcatagaatttatgcaattttctttcaaagtaccgtgctaatgcaatagtgagcaatggtacataattgtggtccctaattaacttttatattttggttcaaaatcgccaatcgctgggttttcgagggtgctgatcacaatctttgaccatagttttgcctaattcagaaccccgtactcaaatttcgaataatttatattggtttgactttgacttaaaagtcacaaactgaccagttattatttgatggtacacaacgctgcataaattcttttttaactctctcaaaattagcctatatgtagttcatagcagaaaatttttgcttttaataggctttgctccagatttagaaaaaaattttgaaaattttttcggcgccgaaaaagtcattttaatagggcgccgaagtggccgtgccgaactggccgcaccgaaaaaacccggcgccgaaaaagccgcgccgaa

SEQ ID NO: 13153 - DNA, 4936 bp, Heterodera glycines
tttgatcgtatgcatatttcggtattgcattgtatatactgtacatatgtacaaatatttgtacctatttgttgttgtattttgctgtcagtgttgtataaaaatgtatacaatttactgggatttggtcaatttacaaaagtaatagtctcctaaatttgcccggtatcagaatgatcatttcgctggagaatttctggcacttttactgttttgggccaacgaaaaaattccaagggggggggcggaggaaagtgccgttaaagtttttcggtcagcgttcccattttacaaggaaaattcgccatatttggggaggtccgtgccacctttttatgcactttttgggaatttctatcattttttgctacaatcctaaacagaagagttacagacagacccgggactgaagtgtctccatttaccaatgggagaaatcccgaaagttgagttggtttttcaagcattttttgctgccaattaccgcaataaacaaaatacacgttttatagtcaaaatgaaaacaaaaaataggtgtgtgatgttgtataaagtcaataatcgttatcataaaaacaattctgtcaaaaaacaaaacaacgcgagaaatacataaaatgaagatcatggagaggaataattccgctgagctgagtgtttacgaacaaaaaacaaaaaataaattaaaatgaattttggatgacaatttcatcagagtaataatgactgagatattcgcctaccgaattcccctccgtaaattattttacaggatggggcggggggaattgaattcgggtcatacataccaaggctcggaaaatttgtgacccaaatgaatggaaaaacaaatttttgaaaatttccgaaaatttgggaggcgaggtcaaagcaaatctcaacattacaacccagaataaatttattggcagtttaatttatacaggttttgccagctcaaaacggaatgaataagcaaggggatatatgtgtgcgtgatcaaaggtgcgacgacgacgaggacgacggctcattggctaatcatggaacagcagcgcgttcagtttggaccaatagggcgtgaaatagcgcgattttgtttctgacgacgaacactcggccaacagcgtggccaggtcgttgcgcagcttggccacggatgcctgtggtggaaaaacaatttgtatttgaaaattataattttaaaaaatacaagaaaaatctagggtttcccgacatgatgggataacaaaatttttggagtacggaataatgaactttcaaaaaaatatatttaaaaatacggggccaaaaaggcccggctttccataaacaatttgttacaccccatgcatgcatggtaggtgtgtaatcaacagtagttattgttcgagagtcccgagcctcaactcgctcaatttttcaaggtctgggtcttggggccaaaagtgtcatggatgttgagcctcgtgcaaaaacagaccctcggcgaaatttgttcctcgttcaaagatcaatggacaaaattaggaaattttttaatttttcactattttccaaaaccaccaatcgcacgcacctcaaaattgacattgctgtcactgatggcgaacaccacactgtggaactgttgttggtccgcgtccgtcgtccggctgttgtttctgttttctgcggcacttcggagcccattggcactgctgttgtcgttgctgtttgtgttgttgtacgtcaccactttctgtgcctgttgttgttgttgttgctgtgctcgctgctgctgtccctcctcctcctccgacggcggtggctgattctcgcgctgttcaatgccatcacaacaatcatcattgttggcgttacagttttgctggtgatgcgggtggccattgctgacaatgaaaaaggcacaattaaaaaaaactattcaaaaatttaaaaaaaaatgccaaacttttgggtttggagaaatttttaaacgatcaaatttttcagggtgatggggcgagagtaaaccatggaaaaagccagccaatgtttctgattaaatacatttttatgaaaaaagtatgagtatgtatccgcctccggaggattttttgaaatttgggtttttcgtgttggtaatctcccaaagacttccctccccaattatttttttagatgaaaacgcctttttcgaataatttctcgaaaaatcgcatcagtgtgtttatatttttccccctctttaggggcctcgaattaatatttacctcaggacatcacggcgatgatcagtgccgtcttcgtcgtcctgctggtgttggttggtgatgtttttgttggtgtcccggtcatcgtttgttgcggtgccgtcgtcgtcgtcggtcgatgccaacaacagcgcatccaacacatccgagtccgagtgttcaatgaacacacaaaatttgctgactgaaatttgtaaggggaaataaaaaaaatgataaaaaaaattaattaaattaaaaaagaaaattcttacttgatcccacaaaatcactcgacatttcgaatacactggctgcacactttcatgaagtttgctgagagcggacggtaagaaaagtgcgagcctggaaatgtttttttaaatttataatattttaccctgcataaatattgcaaaaatgtaaatttttggttttttgagaaagggaaattaaaaaaaaacacaaaaatcaattatttaggttaaattaaagttaatttatcacacatatataaacagtaatgaactcacaacacgccactcagcaacgggtaaaggccggcaagcagtacatgcgggtccttcgtggcacgaactttgtcaaaaatgtaaatgctctccacagcaccctaaaggggggggagggggtttattttttttatttttttttctgtcaccaatttattgtttaattaatttgaatttgtttgtacctcttcaaacacataatgggccaatcggttgagaaacattcggactttctgcaaaatgatgagcatcgagtagaaagatgaacgatattctgtaacaaataaaaaatttagttaaaatatgccagtttgctttataaaaattttattcctgtccttctccactacgcgccggacgacctccccccccccgaagtttttttaaatcaaatttacaattagtacttttcaaataaaaacctagaaaaatttaaattgaaaatttgttagcgattttttcaaaatttcatggtgacaaaactatctatgtttttctacaaaagtttcaaaaaatctcagatttaaaaaaaaaaattttttttttgattcgagggggagggggactgtgcaccaaaacgcaccgctccgtgtggccaaccgctggcgcacaacgcgtaacaaattctgtcccgtgtagtccaactgagcccgctgcaactgcaggttggacacaaagccgaacacgcgcttgtacgcccggagcgcattggtggagaaaaattcagcaaccgcttggaattctgttgaaataaggcaaaaataataattaaagaaaaaaaaccgctcaaccccctaaattcctagtaaaacaaattgttcgttaggtttttaaatttgtcaaaacaaaaaaaaaaaatttttttgaattttatttcatgttaggtatttttaaaacacttttggcttcatagaagcgttttttccagaaaattaacttaaaaggttgtttttcaaaaacttaccgtttcgttggccttcccgaagtcgacttttgagcatgaatttttcggagaaaattttgcacttcatttgctcgcgtttggtcagtttgacgccgcacaacaagtgcatcagattcgccacatttgcgggcggtgagcacattgccaacgcgtcgttcacacatttttccgcaatttttgtcgaatgggacacatttttgcgcgacgaaaatggcgtggcacactttttggttgcggtcgttttggcggttttgatactgcaaaaaaaaaatgaattttaaatcttggattaatgtgttgcccaaatcaacattttaagaattttatcaataatatgatatttgcttttttcgaggaaacaaatttcctttaacagttaaaattaattttaaaaaatttggaaaatttttttcaaacaaaaaaaaattaagccatcggagagtccgtgcttttgacggtgaaaaaattgtttagcacccgtataactcaaagaaaaaggcattgaaaaacagaatttgtttgcttgaaaaagcacattatagctgtgtggggcagtgatgccgcgggttgagaaaaatttcgggtttcgggtcgggcactcaaaaaatttcgggttcgggtttcgggttgagaaaaacctcgggttggcatcactggtgtggggtacataatttttttaatttacaaaaaaaaatttttgtttaatgttttcgaggtgaacctaaaaaaaaaaatttttttttttcaaattaaatttttttttttgatgccttgtcttacaagaggatgtgctcaagtgcggaggcaaaatcgccgcgcaacatgaagaagtagccatggaccaggcacagatggtccatcaaccgttgccgtcccatcaattcccggcccatttcctcgctgaccaccgcgtgcatttggcgcaaaatggtggccatgcgaccgatggcggacggagtgcaccaaacattggtgggcagttgggcacaaagcgattgttgctgctcattgttggcatgggcgggacgcaacattttgagaaagtgcaccttaattggacttaattgtaccgacgggggtggggtaattaagattcgtttccaaataataacaataggttgtttttgaaaaacacaaaaaatttgaattttttcgtcatattttcaaaaaagaaaactctcaacgcgtcatcagtaagaccaaggaat

SEQ ID NO: 13154 - DNA, 546 bp, Heterodera glycines
ctccctgcaaattttcgctttttttaacatttgtttgttattgttttcctaaatccccattgatcatcggtttttatgttcacaatgtttgccttttgtgtattttgtacttttgcccatccgtttccgagcatcacatgaacaaaaaattattataaactaaaattgaaaggacgtgaaaacattctactaagccttgcattgattccgagtccgaatcatttatcttcacatataacgcaaaaatttaagacagttggcgaaatataaatcttttcctcccttctcatggccgtattcactcatccgccgattggtttctccgatgccccccccctccaccctctctctctctcttcccctcctcctctctctctctcttcccctccccctctctctctctctctcttccccccatcaccgctatagagattgaaggaaatgtatgcgcggatgaaaatacaaccatttaacagagagggaaacgatacgggcgggtgacagatagggaagcgcgggggggggggggggggactggtgattagt

SEQ ID NO: 13155 - DNA, 2137 bp, Heterodera glycines
aattcctttcaaaagagagccggagctcttatcgcaccctgtatgtgcactacatagagtgctatgccacattttttaaaaatatttaaatatttttcaatgatgattataactagtaatttgccttcccttccttcgtcttctcttttgacgcttcttttgcctcagtttgctgttcttcctttcaaccttccccatctgtaaaagccttttcatatgattgtctctcgagattgtcacgaggtttaaatggagttttgggtgggaaggaacaaaacgaatcggaggggggggggggggagtgtcctcccctttccgccgaatgtgcataaatgaaagaatgaatcacgtgttcagacattcgcggtccaggtattgtgccccggacatttacagtcaatttcttaagggccattttcggatatttgcgtcccaagataaatcagttttttgcggccaacggaacaccaaattgtcattcttttagaattaatttttaaataattcattagtttaatttcaccttttttttgaataaatgcattcataattaaattttaatatttttcaataaattttcacgaaattgaagtgcccatacctcagcgggtataagtcgtagagacttgtaatcttttgcatattgtagagcattttatttcttccagagaacataattatttttgcagaaaatgactgtatacatattatatattttcacttttggactatttcttaacaaaatgattttttaaaatggggtgcgccttcaaaacgggaaaaacactcttttcgcatgtctttgctttgcttttccatgcttcgtccgccccctcccctccaaataattagcccccctttcgtcttcttatgaccggcttctccaataatggccccttcaccatcactgtccttctcgcccacccacgttaatttatgttttatcgctctctgtgtgtgttttctcaaagcactgatgaggggacttggaccggtgccaacttcctttgagcatcatcagaacagacaacagtttcttctcttcacattctctgcttctcttccaccatttccttctctttctatttcgtcttttcttttctctccattttccttcgctgccgttttctcttccattctctcgctctctgatttctcgcacttttttcgtgttttagtcacaagtcgaaagcgcttgccctacaaaggacattgaaatgttatttgagaattatcatcttttgcatcatttatccaatataccatgtatgtttatcaatcatcatactatgggacatttcgggactgggttgttttggcgccgacgttttggcgccagcctcagtttttttattataactttttttcttgttgaccaaatctaacaatcttgatatcattcaaaagcccttcacactattagccttacaaaaaacaaacaaaaattttagcttctaaaaaagttattaagaaaaaaactcaaaaatttcgacttttttggaatttcatgttataacttttttggtaattgtctaatcgcgaagcaataccttagaaatatcttctaaacatgttaagctttcgattgataccaagattgctggatttggttaacaacaaaaaaagttatagtccgaaaacttgggctggcgccaaaacgtcggcgccaaaacgatacggaccccttttgatagccctaagtgtcctctatttacctgtaaaattcaaaaaattcgattgtgtttcaaaaaggttgtggctagtattttcataaatttatttggtaaacctttttgaccacaacttctttgaaactcaaaggaatttgaattttaaaggcaaatagaggaaactttaggctatcaaatggtaccaagattgtttaatttggatgcttctagagaaagttatggtgcatgaaatttatcaaaatataacattgtcgtgtcttttttcgtggtcgtgtaaactgaaatagagccaaaaatatttattgttattattagcttattattaaattataaatttaaataattaattaatcattagaataactcttccgtactgaaatgacccgccccctctgatcacctctcatttgcctttttgtcacttcgacacagcacctctagttcaa

SEQ ID NO: 13156 - DNA, 2473 bp, Heterodera glycines
gattggtcgcgattaccctcattaaaataataataaaataatgtaaataaaaatactttcacgattgattaaaattccagtcctactgatcacaaaaactgatatttttattaattttacatttttaaactgggcttaatttaccagtgaaattaattaaatttgcgtctgccggcaacgccggtggtcttcagatcccacttacacagggatgggcgcaaggcgcaattacgcattttggaaatgatggcgtttttggacactgagattaaggattacggaaatgagggcgttttaatttcttgaaagcttcttggtaaaccacacaggcttttcaactgaattcagcggccaaaaactagagcacgaaattttgaaaaaaacaggacccggaaacccaagatgaacccgggcaggattccagatcaaaagggcttaacagtttttttaaataaagaaaaacaggagccagactagggtctgggaaaatcctgtacaagatcatgccctgtctgggctctaataatgcatatcctcaataatgatttaatattttatacttgagtttttaaataaatttaaaattataaaaatggtaaaataattttttattttcaaaaagtacaaaaagcaaatcaacaaatatcgtaagaaaaaggcgatcaaagaatatctctttaattttcagttcttcttaattacttctccaaattgtttcttccaaataaaaacggttcgttgattaattttcaatattttgcaattttctcgtcactcatttttgggttttgtcctttcatttgcaaataaattttcactttttccattttttctttctccgtcattccttcacccattccaaattgtttcttccatctcttaattactacttggccaactctaattttcttcacaatttcggcataatttctcttccattcttttctcgaatattttcttcctttttgtttgattttctccttaattttattgaatttttcaataatttctctctttttttgatcattttcattttgatcatttcccttttcttctttttcttcccatttttctccaaatatttcgtcaaatgtgttttgctcaaactttttcttttccgctccaatttcaattagagcaattaaaaatgcaattaaaaagaataatatgcacagtttcattgctgaattttttctaaaatgaatatttatttaaatataatttctcaaatgaatttcttatttttctcttataaattcttaaacattttatgtggaaatattgacattattacaacactcattaaattgtatactgatttttttctctctacttatttctcacatttaataatattataataataaggtaaataattaaaaattcaatcctactgatcacaaaaagtaagatattttaattatttttttattagtgacgagaaaattgcaaaatattgaaaattaatcaacgaaccgtttttatttggaagaaacaatttggagaagtaattaagaagaactgaaaattaaagagatattctttgatcgcctttttcttacgatatttgttgatttgctttttgtactttttgaaaataaaaaattattttaccatttttataattttaaatttatttaaaaactcaagtataaaatattaaatcattattgaggatatgcattattagagcccagacagggcatgatcttgtacaggattttcccagaccctagtctggctcctgtttttctttatttaaaaaaactgttaagcccttttaatctggaatcctgcccgggttcatcttgggtttccgggtcctgtttttttcaaaatttcgtgctctagtttttggccgctgaattcagttgaaaagcctgtgtggtttaccaagaagctttcaagaaattaaaacgccctcatttccgtaatccttaatctcagtgtccaaaaacgccatcatttccaaaatgcgtaattgcgccttgcgcccatccctgtgtaagtgggatctgaagaccggcgttgccggaatttaattaatttcactggtaaattaagcccagtttaaaaatgtaaaattaataaaaatatcagtttttgtgatcagtaggactggaattttaatcaatcgtgaaagtatttttatttacattattttattattattttagcattattaatcgcgaccaatcagtagggagagaagagaaataattcaacatttctctttaaaaaagcaacaattatcataaagaaaaaaactaacaatggaaccaaattttatctccttaatcttttaatcctcatttattcttccccaaagcgtttcttccaattgaaaatggtccgttgattaaatttcaacatttttgaaattttctcgtcacttatttttgggttttgtcctttcatttgcaaataaattttcactttttccattttttctttctccgtcattctttcaccc

SEQ ID NO: 13157 - DNA, 1114 bp, Heterodera glycines
tgcaggtcagaatattgaatatatttaaattttcttaaaaattggcaaatttatgacaaaataagcaaaaaagccaaaatttcgcttttcaggatgatttttcgctaaaaattagtaaattttaattaataatttttggatccaaattttgttagaaaatgaattgaattttgacttatttacttttttaaattttctttttgcattaatcgcccaaatttttctaaaaattatcattactgcagcaaagatacacaaataagaaattggaaattttaccctaaaatttggctatcatttttatgattttttgccagacttatgacgaattaaatttcgcgaaaaaatatcccaaaaaatggcagaatttttgtccctcgcctaaaggcaaacatttttaacggagatagttccttcgagagtaactttaaccaaaatctaattccccaataactctttaaagtgatcagaagcttactaaactctggagggatactaaaatacgaaaaaactagccgaatgtatctataaattttcttatcctataaatcaattttttaaaatttttttgagtttctccattatttatttttttacctcatttttcgctaattttatccctcaaaattttttctaagactgataagaagcattccaaatttttaaatgaatattaaaaagacgagagaatattgcttatataaaaattaattctcatttttatgaaattttttagttaaaatattaatttaaaaaagtaataatctaaatcagataaactgactcatatcgtactccgtgtgccacagtatacaattttaaaaacacgaaatcaatttttgtattggaaattaattctaaattaatagaggcttttggtttttcaaaggcttatcgtagaatagatttttgaaaacttattaattaatttttcgataactaaaggattaaaatgaatgagaattagttcatacagttgggcaccggaaaattagacacaaaattcctcctttaaaaaataaatacaggaatttaaaataaattaaaattttaatcagcaattaaatttaattaaaaaaagatattttttttgttttacttttgctttgatcga

SEQ ID NO: 13158 - DNA, 2326 bp, Heterodera glycines
  unsure (1)..(2326): unsure at all n locations
ttcttcgtcccttcgttcttcaccagcagattaatgccataaaatgaacaccactaaacattttaattaaaatgacttttaaaaataatttaaatttattcgcatgcaaaaagtccaaatttaaaaaagtgaatgaaaacactatttaattagtgccttggtaataataatttcaattcctgaaaattctatcctttttttacgaaatgtttcattttttattattgccaaaagcagcaacaattgaatatatatatttaattatttttataattttaatatttagtgtacaattaattccttttttcgcttttttacacctaatttactactttctaaattgaaaacaccttaatttttttattttcgtactttaggtaatttgggtttacgaaatatttcattttttccccattaccaaaaagcagcaacaaattgctgctgatccaagtgaaggcggaagccgggccaagcttctcggctttgctggagctgttactgtgatgactgtgcgacttcaaattgctgttcatctgctcctcagactgatcaaggttgatcaactgatcaaagctgttgcacactttgccgtcgaccaactcgtcacaatggcgacagtccgacgaattcccacccgattcacggcagaatgtgttgaaaaatttcgggcactgcttgtcattttctgtagcgcatccattaatgcgaaaaaggtctttaccatgctctgtaaataagatgaaaaagttaattttatattgtttttcagcaccggcacaatccaagcaattggaaaatatggcattcaaattttttattcggaaaaataaatgaaatttctcaggatattgcccggattttctcaggatcatgcctgagttgggtactggaatgggatgacagggtcataattttttaacggcaaaatcaggatatttaaacccgataatctttttgacccccacccccaccaaattctgatcctcctagctattttttaatttaattgaaaattttatcataaattccaaattttgcattgaattttcaaaaactgtaattttcaattaaaaaaactcaagatttaaacaaaactttaatataggaatagagaagcaaatttgctgaccgtcagtgcaagtgaatgtcaggcaaccataaaagccgccccaaatatggcccaattcgcccccgggcacacaatcagctgtaaaagtgttgcggaaaacgttcgccttttgggctgcttcacgctgatcatagcgcacagcaagatccacgtacgaatcaagctgaattgaaaaatttgccaagtgcttcaaaacaacatgttatggcacaatgtgttggaagacaatttacttttaatttttggcacgaattgttgccaaggtaaaagcatactcaattgtttatacaaaagctattaatgtgtattgtttaggagcaaatactgttttagaaaatttatttttagacgtttggatttcagattaagaaatttttatgagccttcaatcaatctgctatgtgcacaaattgcacttgtcaaaaattttaaacggtttttaagctaataagaaaatttttaaaaagaagtcttgggtctcgagttttttgggtctcgagtctcgggtttttcggtctcgggatcgagtctcgggaaaaaaatttgtttacttttgagccacgtaataaataatttttttttttttttggttgatttatgaggtaacgcccattttgatggctttgagtaacgacaaaacaccaaaaacctagggcatgaaatggcactaaacttaaacagactgactgaccccaggtggaatctgagtacgattacgaatggccacaacacaatcatccgctgaaattttgtgcaaaattaatttgtgaaccgttataaaaatttaatttaaaaaaacgaacaagcgggattaaagaaatagtagttgaagcatggatcgatcagcagcatgatcagaagcacgctgagaaggctaatgggtgatttgcatgaagccattaattagggagagggacgaattagagagcactgggatgaggaaattcaaattttgaattcaaattgaactgaaaaaaaaatattttaatttaggaatgtaaaatccaaatttaaaaatagattaagtgaatttatatctgtgtggtcttttttataagttctgttttgtattgtcatttccggcaaattgtaataactttgctgaaaaattttatgtgatttctttaaagaaaattaatagaaaaatttttcatcgaaaaatcttattatttttttttttttgcaanaatttcaatg

SEQ ID NO: 13159 - DNA, 779 bp, Heterodera glycines
ttgccgttgcggtggtggtcgacggggacggcgtcaatttggaggcgggcactgccacatggcgatgatgttgaagctcaatatcggtggatgttgacttcatttctacaaaaaagtgcgcacttcgatgaaatttcagcaattacaaaataataaaaataattttcgacacaaaatcggagaaaaatgaatatggaaaataaaaaaagtgaaagttttagaacaccaatttttgggcatgtacataaaaattttttaaaaacaaaacaacaaaacgagaagaataccaatatgatgtgtaagtgtgttatatgacattcgatgaaaagaaaattttaaaaaatttacatttcaaaacataatgctgcaggcaaatttttaattcattcatttcttcggaggccgcccatttgggttattggaagaaggaattgcgggcggacaactgtcagctttgggttgcctttgagaagcttaaatttaaaaatgttattattttgaaaattttggtattattctttttttgtatataaatttttaaaaaatgaaaagttaaaaaaattgtttgataataaccaaaatttatccccacaaaatcgaaatcaatttatatttaaaaaatcacaattatcagcagaatgacgctgaacattattgtcattggcaccaacagcaacaaaagcaggcggaagtgacgcattgtctctgccccgtagtgaacggactgctgaagaagaactcgtggcgccaattgacgacgaggaggagacggacgaagt

SEQ ID NO: 13160 - DNA, 1575 bp, Heterodera glycines
cccccccctcgatgtgcccaattttttttaaatgtgccgcagtgtctgaaaagtaaaaaaagacgtccgggtgcggtgcggtacgcaatccaagccaaaatcttaggaccgggcttgttgtatgaaacaaatccgacatattagaacaaccactcttggttacggtccgggggcctaaaacaattacaataatactaacaaacagcagtgtgtcagtggacggcaaatgcgcgtcgacgcgtgcgtaattggactgccaaaggctttgttggcgtttgctttgttgccgaacaatagtttgagtttccatttcaggcactgtgccctcctcctcatcctcccgtatcggcatcattttgcaccgctttcgtgccgtttccgtcaactcctccatgtcatccccttggtctcccgtgttgttatccgtggtgttgatgtactgcttgaattggtccaccgtcatttggcgtggaaaggatgaagccttctccgtcgccgccgtttcttcttcaccattttcctccattttggcaccgtttgaattgcttatttgtgccactgccgcagttgacgtttttcgagacaacaaaagttggtcagcacgtgccaacagatcgcttggcaacggcggcactccgcccgaatgcttcacaccccgtcgcaattgtagttctggaaactggaccaaatgggttgattcttacaaattaaatgtttacgggccaaaattcaaaatccaaaaatataaaagaattatctttaattattcgaaggtttcatacacccggtaatgtaacaaatttccatctctctatttctcaatttttggaatatactttttttcaaattatttaaacaacaaaatatgtaaccaaaaaatgccctccccccaacgtgccaatggaacgtcgtaccgtcaagcattttttggcgcatttgtccgcccattgccagcgcaatttgcaccaaaatcgggtcacagctgcccaacagtttgatgtcggcagtatagttgcgcaacatttggcgatttatcaaaatttgtggcacatcgccggcaatgttgaacggaatcagtgagacgggacgcacctaaagcaattttttgattccgaaaatcgaatcgacgaggagaatatctcttttttgcgtaaattttaaaaaccgtatgaaaaccttaaaattttctttgggatggtaagagcgttaaatttgattagcaaacgcaattcgatttacagaaaatttcggtccaggttcaattccagcaaggtaaaattattttctaaatatttgaaattcatgaaaatattatttgttggtgtcaccgtctccgaatttttttaaagtttaatttaatttcacaagaacatctttccaatttgctttgtttacctgcatggacgagccgatgacgaccaacaagtccaattgagtgtggtcggcgcccatttggtcatgaaacgcgccacccaaatcctcgccgaagaacacaatgtccggcttcagcacacccgtcacacaccgattacagagggcaacttgctgatgaaaataatttttcccaaatgataa

SEQ ID NO: 13161 - DNA, 744 bp, Heterodera glycines
  unsure (1)..(744): unsure at all n locations
atggcagtttgcggatcagcaattccgttgatttttggtaacggcgaatntcgcgaagcgcaacggtacctgcgaagggaaatgacacaaaattatgtgggaaaagcacatgaattaaaatgaatacaaaatttcaaaggttagcccacccaatcaaaataggatttttaaatcaactttgtctttttttctcaccagggcggtaacgatgcggcttcttgactccaccggtggccggtgccgacttgcgagcggccttggtcgcgagctgcttccgaggcgcctttcctcccgttgacttgcgagcagtttgcttggttcgtgccatttggagagagagcaatgaaagttgtcgtgaacacaaaatggaaagagtgagccaagcgagcaaatgaccggctatttatggggctcggggagggcgggtcaatgcggaagcgacgccaagccacaaaattcaaatgcattttttagcgcgcatcttttcgctgcgattcccaaagggatgccacgcccatcccacttagggctatttaaactttaccaatcccccaccttcctcacactgtgttcacggtgaaactctctgcctctctgctgttctttgtgcttcattcacacaaacattttcgctctcttcaaaatgtctggacgtggaaagggtggcaaagcgaagaccggaggaaaggccaagtcgcgctcttcccgtaaggggctccaattccccgttgggcgtcttcatcg

SEQ ID NO: 13162 - DNA, 1767 bp, Heterodera glycines
attaagaaatagttttaaaaattattattcttaaatagactactacagtttttaaaaagctattcaattttataagcaatacatttagctaattttttgaactttagtgcgctgttataatgtcaaaaactttaatctgagtaaattatgatcaattaattagtaaatacttctaaagatttgaccgaatagcctgaaataagtgttataaaagctaaacaaaaagtataaatattaaacaatcggaataagagctggagtttaagtccattaagaaagccgcacattcacccattctctaatatatttaattaagttatttattattttgtgggtccttagtctgtgggtcgtttgatactgcacccttactgcaaaagtgccaaaaactgtctaataatttgcattaacaaaatgtcagacaaccgaaaagaaggagaagaaaaaatggcaaaagccatgtaaaagctaaaatttcaattttaaattttatttttcctttttcagcttaatctctgccgattgtttgttcaaagtgttcaatttgcttccgcctactcaacttggcctcggaattgcactgattagccaccgatttgactgtggacgaacatttcaaatcgcgcaaatgggcgctaaaatttattcgaattctaagcgaaattggacagaatggcgcaaaaaaagggaatggaaattgtcaatcgctttgacaatttcgcaagcgacgccaagacgctatctgttcgtccaggcgctacgcgcgatttccgaaaagttcgaaaaaaagttagcatatctcagcgcaaaggtgatgcaatttaagatgcaaagacaaaaagttcttaaacgagatcagttgtcgaccaaaaaaaaaaatttcctcgccatcaaacaatatatttcaaatttggtgcagttcattcttttttaaaattgtttctaaattcatttttaatttattatagtctttatagaccatatggttgaagtgtaaataaaaattaattaattaagcaataaagtaaaaaattaattacttaataattagttacatagtagttaataatttgttttttttatctttttcgcatttttaatgtgatcagtaaaattgaaattttaattaataaggaaaaatttattttatcattattttacttaataacaatattttattcatggataagatttattcacaaatgtagaatttctttgttgctataaacaaaacctagaaaataggcactaactaataggtaactcgaaaatagctcaaaaacaaccaaaaaacatgtttttcgtgcgtttcatgtcactgggagagctcggtattttgaaaaaacctggacctggatttcctggacaaaaaccaggaaaatccaagtccagctaaaacccaggtagccaaaaaatgaaatggacctggacccaggaaaaattcaatcataaatccaggtccaggccaagctctagttattaacaacggcgccgaactggacggttccccagaaggtgcccaaagagcttttttttactcaagggtcaaaaaattattttttttctctattaatatttttcaaattgcagagctggggcgaaaaagcaggaatttgtacaggtcttacgcaaaaaaataaccattttatgcataatcccccatgggggataattagagaaaacaccgctaaacacccgatgtaattgggagaaaaatattcgatttcgtcgcgacacttcgcataccaatgcaaatggccaattttg

SEQ ID NO: 13163 - DNA, 2344 bp, Heterodera glycines
ttgaatttgaattcctccgaaccaaaactggccgtaatttcgtccttacggtcaaacaaagcaacgagcggaaaccattggtcaaccgcggaatatgaagcaaaggaaaacttggaagaatctgtgggaaaaaatatatgaaaaagagatggattcttaaaaagcacaaaatttctaaatatattattagaatttctaagcgaatttcaacaaaaagtattaaaattattttcactttcattaaaaaattataaacaaaccaataggacgtccattctttgtgaaaattatctgtcgggtggccaaattaacgccgcatccgacaacatcaccagcaacgaatttatatttaaaaaaagctcttctttcttctccgttaatgtgaaaaaagccattgctcccataagcataaatgccccgggaggaaaaaccattcctttcatcatacaatgagtgccttttataaccaaatccgatcataaaacaactggaaattgtaaatttgataatttattgtaaacactttttatttaaatcattacgcttaccaatagattttttgtactgtaatttcaaagtaaaaaatgccggacgattcatttttgggcgaaattgaatgtttagcgaagactgggcggaaagaaccttttgatgaaatattcaattatttaatagaaaaaattaaataccagattgttttgccgagtgaatgacagtcaaaccatcaatgattcggaggcgtgtatcacaagcggtggcatcccagtgattttccttaaataatttaatttattttaaataatagttttattaggattggccgggtccgggtatcaggccgggtccagaacccggttttttcaagacctggacgggattttttgaaaatccaataaactcgatgaaagaaaaaaattatttaaaaaagtatttgaacaggttcaattcaatctcaggaatgtaatccagcagtagccaaaaaattagtaataataattgtttttatttgttattttttagagtatttgtcagtgtgggtcgtctcaggtttggatcatcataatagcttttttaattactcaaaataggaccgcccaccaataacataccgttttcctaatttcagttttggcctttttgttatgcttttcctcatcaggatttgcttgtttgcgtttcgtggtgttcatgttgctatttgaagaagcctcggccattttcacatcgccaattccactaccatttgagcattcaaaacaaaaccacataatggcagaaaaaaatacaaagattgggaagtgaaagctcattttgttgggtatacagttgatcagtgatcccgttctatgcttatttgttaggtgaacttaatgtttgcctgaaaacgctgtgaaatttaggaaaaataagttaaaaaataagaaaaaaaaatattgtaaagtgataataatttcatattttttttgttttatattgcgaatttctgtttaatagcagaatattaagcgtcgtttatagcaaatacagacaaatatatacacactacagcatcagaaagtattatacaaacattaagcatgtgaatcgtattatttaatatttttacaaattgcagcgtaaaatagaatagagaatggaattttccgtctgtacggaaacgggtacgggttacgggctaaaattcgtatacggttccggcccgtatctgatctctaaatataatattactaaatattatagcatgcaaacacaatgatcaacattttattatataatatttatacaaactctagcatcagcagaggaatattatacaattttaagcatgtgaatataatgatgattttttattaaaatacttatacaaactatagaatctgtagtgaatatgtaataatacgcatataatacaatgatgaatatttttttattaataatatttatatatcaataaaagctataagttgtgtttactctacttatgcagaagagttgtaaatttttaataataataaaaaattgttaatcaatttatgcatgttatattttgtatagttgtatagttgctatatagaatgccgaatttcttaattgcattttacatttttagggatttgagttattcactttctgttatttgcgttatatttcataaggctatgcgattatcgagaacttaaaccgagaaatgcattttttagagcctttccatgccttttttaatttctaaacagggcccggatttttaaatgctaaaaatcccgaaatgggtacctaatagttgctaaaaaactgccaaaatagtttctaaaaactcaaaaatgccaaaatagttgccaaaaag

SEQ ID NO: 13164 - DNA, 3404 bp, Heterodera glycines
  unsure (1)..(3404): unsure at all n locations
aagtcattcaggaatacatatggctcatatccacctttgccgtccaaagacgaagactcacccatagcgcaaatgcatcgcgaagtccgcgaactaatgcatatgcaactgcacagatgcagtgatagttggtgtggtccacgtgaccccaactttgggcggtgtaaaaagggcttcccagccccgtactcgaaatgtacgatactacacccggacaggcccgcattgtattaccggcctagcccaaccgacggtggtgcccaaattgaggtgaacggcttaatatacgacaactcgcaagtcgtgccgtacaacccatacattttgctgcgttaccgagtacaccacaacgtgttattcgcatacggtaacaaagcgaacatcaaatatgcactcaaataccctttcaaagggcctggacattgttatgtcgagtgcaaagaggagtccggcagcaaaatcggtatcgatgagccggctcaatatgccaaaatgaacttccgtggtgctacggaagcttttgcagttgtgcattcaatgccatttgcaaaactctcgcatcacgttgttcatttgtccattcatttgccaaaccagcagcccgttgtctacagggcattccaactggtgagcaaagctgaggaaattcagcgaggcgaactcccagagacgccatgctctgcttattggaagcaatggcaaaatgaatggcagcatgttccttcgcttaaggacatgctttttgaaaaagtcccagagcaatttcgctgggcaaaggaccgatgggtcttttataaaaagaagcctatcaaaaggcccccaatcggtcgtgttgtacctgtccctccaacggaccgggaaagatttgcgctctatgcgttaatgcgtcactttcccggtgatccggaccacttaaaactggtcaatgggcagcagtacaacaccttcacagaggccgctttacagcatgggcttcttgaagatgaccaaatttggcacaaaacgctcggcgaggcagccttgcatcgctggccagaccagatgagatggctcttcgtgagcatcctcgtctttgggcagccgagcaatgccctagaactgtggaacaagtacaaagaccaaatgtataatccacagggcatcaccagtgcggctatacgccaagcacgcgagcaggaagcgctagccgacattgattggcgattgcacttctttaactcaagctgcatgcactgtggcctcccagatccaccaaattcaaaagccaaaaatatcaatttggcagttgaagaagctttctttggtgatgatgatcttaatatgccgcctggccagccaaatcctaggcagcagcaaaacgctccacctccactcaacagcgaccagcaaaaggtctttgatgctgttgtgagggctattcaatcggatccgaaggatccgactgtgcctcgccgtttctttattttcggcgatggaggtacaggaaaaacattcctgtttggccaaattatcaagcgcttgcgcaagcccccatacacctacaaagtgcttgccacggcatccactgggtgtgcggctattttgctgccttatgggaaaacagcccattccactttccgtctgggtagagaagtgtcattagacaaactcccaagcattcccttggagagcttctttgctcgacggatacgtgaggcccaactcatcatcattgatgagatcaccatgcttcacaacacggtgattgcggtaatcgaccgagtgtgcaaagaaatggcaattcgccagcacaaggacctcctcttcggaggaaaaacggtcatttttagcggtgacttcaaacagtcactgccggtcgtgcctcacgaaggcctaactgcacaagttgcggcctgcttccaaacctctccactgttttgtcaattcctgactatgaaattgacaataaaccagaggttgggccaagggcagcaagcttacttgcaaatgtgccgccaaatcgggcttggagagaccggagaacacttctggattcctccgcagttcctcgtaaagagcagggatgagttgatagactttgtctatcccgacttccagaaactccttggaaatgacaaggaactgctaaatcgtctgatcctcgcacctcacattgacacatgcgatgagatcaacgaaatcatgatggcgaatgtgcctggtcaagtgcgcgaatatttgtcctcggacaaaccgcttgacgagcggccactggatattgatgaaatcgagtccgaagtggcagcgttgaatcgacgcacagactctgggatgcctccccaccgtctgcgactcaaggtcggaagcgtcgttgttctccttatcaataaaagtgataaggaaggactgatcaacggcacgcgcatcgttcttgaagaacttggcgacgatcgtctggtcggtcgtgtcattaacagcaacgctgttggtggccaggttaagttcttcatcgaaagaacacgaaatgtctacgaggacaaaacgcctggcggcataaaatatgagcgtttgcagtttcccatcaaacctgccttcgccatgaccattctcaaaggtcaaggccaaacaatcagcacggtcggaattgacctcgaaagggatgtattttcccacggtcaattgtacactgcattttcaagagcaacggacgggaacaacgtccgagttacgctcccagaagggagaccgacgacccagacagagtcaaagtgctgaatgttgttgcaacgaaaatgctcaatttgcaataaagcaaacgagttaggtccagcgcgtgcgcactttatgatgtcactccgttctcatctgcacttaaaacggacacatattcaaaaaagtgctgccagctggactgaaggaggcaggtgggccaatgacgtgcgagttagggcacttccggtttccattgcattgaaaaatgcagtgtgtcaaggtgaaaccaagtgcatgtcggctgacgcaaagaccctaacacaaggcctaggtagcgaagctcccaaagcgcgaagcgctttaagcacccaagaaacatgtaagcacacacccgctagtatatacgttatattgacaaggagtttcgttgctaaaaccattttctcccggccgaaggccgggagcgccctgaaagtggtggaagggtcttacaactttttgaggagcatccgggaaaactatagagaaaaattcagcgcggacgactgagtcccggggaccgatttctcactttttcttgcgtttgttagcccataactntttttctaaaaccccgaatcaaaagtgcccgctgtgagggcactccccacaactgtcctctacatgatggtatttttatttttttattagaagccaccccctgggctgcacgc

SEQ ID NO: 13165 - DNA, 2779 bp, Heterodera glycines
gcaaattacaattaaattaaggtgccgattgtcagtgccattgttggacaaccacgcgaaccgtgacagaacaaaaaatgggcaatggttaccttgggttgttcaatacttatgacgtttttcgctatcgaaactcacagcttgcgactcttaacttttttctggacattgaggtggattcccaaatattctgggaaaataataattatgatcatatggttctgataaaataataataataataattggttttatctattttctataaatatctttcctaattaatttaatattattattttaaacggcgtaccaccggggcatttaactgaagggttaaaatattggaaaattgctttagaaactgatggacccggccaacgggtggtacaacgcggaggaggacacggtgacctttgtcacggattttttcacgtaccaatgaaaacagacgcaactcactgatcggcggggaaatgagaaataactttttggcactggtcaattttggattaatttttgatcagttatttatgaataatttcaatgatcgaatggatgaatggtcttttaatgaggttgtaattttcaatttgcttaaatactgttggttaattcgaacattatcaaaaatcattgtgacccgatttgttaggaacagatttatgtcaaaaatagcgataatattttaaaatagtttaataacttaattatgtcaagaaaagtgtgagaaatctaaagttattcaactgtaatcgaagtaggacaatatttatgacacaacataaaaagaggagcattaataaagtaaatattaaaaaggtttttcatttgcatgaaaaaaataaaaatattaattaaacttgaattaattaattatttttatatttgccattaatttgtcgtcgattgtttgtaacttttgtacatttccttctccgatttgtcactttccattgccatttgtctttccgctgcttgcgaatgatttgtgccaattgtgccaccgctaatttttgcgtttcccaacagccaaaaggtttccattacgcctttgccctaaaataatttttaaaatatgcattttaaaagcaaaaaatgaatttgagttagtcaagaaaaagccaatttagaagcaattcgattatttataatgataatcagcagcactaagaaccttgtgctttttttggacaaaattaggcaaatttttgccaagagataaagctttaaaaaataacaaatattcctcttaattctattgattagtgctctctctgattttgaagactttgtctaatttgtgttcaccttaatgatcacttcgcctctgctttccgttaagtaagcgcctccttcagagttttcgtgcaacaaaatgcacgtttctttggagatgtgaattttgttggctgaaatttaaataataaaataaattaaaatgccatttgcttttcgaccgcttgaagaactttccatccgagacgcggtgttcaccgtgtcaccgaagaggcaatagcggggcatggccaacccttggggaattaattgcaatttttaaagggcttgagtcgaggacggtcctaagatttaggcttggacggggtaccgccccggcgatcattccatttttttgcggcgcgcttacaaagggcggtgaccaccagggatgtgcctaggtttcgcatttcacctttcgcattattcgcattttttggtgtttcgcatttcgctttttggcgcgaaacgcgacttttacagccctaagaattggattaaattcccataaaatttttaaaaatttgacctataaattggctaattaatttgatgaaaaactgttctcagcggcgccccaaaactcttattactcattagaaaaatgataaaaatcacaaaatttgatcattttttagtgaaaatctgtcaacaaattttaatcaaattttcaaaaattttcctggcggcacctgccggcgccgcctgccccctcttcccaaaaagtttttttggaaaaagcgcgcctcagaaagagttctattgatttttaaatttggaataaaattttaaaaaatgatttttgctttatgcttttaactattaaaaagttgtagaaaaaatttcgcatttcgcatttcgcctttcgcatattttagcttttcgcatttcgcttttttttcatttcgcatttttcagtttcgcaaatttcgctttttatttttcaatttggcccatccctggtaaagtaatacctatttgacagtatagttaataatgttatacggtaatcattgtccattttacccttttgctgttgatgtgccattcccattttgtcaaccttcgattgaactgtcacaatttgttccatcagctttttctcgagctctgattggaatggcttctgctgaaattaatgaattttattgcaataaatgtgtttactaaaatataaaaatattagggccaaaatatttatttttatttttgtagctttcgattctcagcttcggcattctatgaaataaaaaatcttagcaaaaaaagaagcgatgtcatccaaaaaaatttcggaaattagcacctaaaataggcatgcaaaaaagtgaaaaagcataaaaatacacaaaatgaaaaaaggcaccagacttttggagcaaattttggtacttttccgttttggggccaaagtttgatttttttttttaaatcaacagcaagctaatagaattgcagatccattcgaagaggtataactcaaattgtggcatttatcctc

SEQ ID NO: 13166 - DNA, 4388 bp, Heterodera glycines
  unsure (1)..(4388): unsure at all n locations
cagtcgactgatgattcatccatcgcatttctccggcatcaatgccccgtcccctggatgtttgtgcttgtggagagcattgaaatgtgtcagattagaaaagcgcanaatcggtaatntaagcgtaggcgtcgctttgattcttcgcctgttttctctnntcagtatannccttcccctggacacgcgcttctaccgtatttctgttctgccaatccccggtgattttgctggtgccaccccaataagcgcagcttcgtcagtgtcttcatcaaagcgttagaacgcattgctcaaacgatgacttgttctagtggatttattttatcaccttttcgtcttatgtgttcattctcttttatttgtacattattatacctccattcattttaaatttccgagaacaattgacactttcgtcaattgtacgggtgcgtatctgcttcattctctgcctatgttctttactttgcttgctttagaatttgccataggcattttagtcagacgaaagctgccgttttctttaatttttggctctttatcattttcttcccatgacaatgcgtataaattcatttctacaactatttaaatttagattctgcataactcaataataaaataaaaaaagttgctaatttcgttatttccttttattcatttattattattatttgttaaattatttattttttagttagaaaaaaggcaagcacaatgatcttggcggaaatgccagaggacaaaaaaagtgccgacactgaagtctttgaccgggcttttggtcttcggataaggtgagattcgtcggtcgtgaaggcattgttaatagcatgtgtccataatggaaatccttttaggaacccaaaaattgctctcgaaactttggatgctttttgtcccgggatgaacaaagtgcggctgagcgagttgaatacgcgggtggggcccagcggagaatgggttacgatgggtgttgtggtgggcaaaaacgagccgaagaaaagtgtcaatggcaatgagtacatcatttggaaaatgtccgacctccaatttggtgttccgtccgtaaaagttcttctttttggcgaatgcgtccgccattattggaaggtccaaatgggcgccacacttttgctgaacaacgcccaatggacggaggcgacggatggcaaaaacgaaggtgcaatttggaagcaaatatgggtttagtttttggtttgtgaattcgacgaaacgaaacattccgattttgtgcctccgtttcgatatagcaattttaatatgctcttaaatagaacagagcatttgtatatcgaagcggggcattttcactttatatcaaaagaaaaatgaaaatgcatgccatccccaatgaaattttgtggttcagtgctgctcaagctgttcaagtcggctcaggtcgtcgaattgggtttctgtgccgattttggttattgtcaggtgactcgtttgtctgtctattcggttgtttgaatgtgtttttagggtatgaaaaatggtggcgaaaaatgcacaaatgcagtgaacacctccctctgctcgttttgccctttccacacccaacaacgcgcccgccaactctcaatggcccgcggcgctttgaaccgatcgtacaatttaccgccaaagaaaatgcgctctttggaagagcattcgaattcctttgacacaccaactcaaattggcgtaaaaaccatcgcaaggactcaaatatcagacggaaagatgtacgctttaacaagggaatttgtgggtaaaattactcttaaaaatattcagtttcacaaagccattgtccgtcgttcagcaaaggctcgaaagtaaaacggcggaaatgaaggaaaaacgaatggacgaattgaaaaagctcgtcacggaaaaggtaaatgaaaatgaaggaatattttcattaattattatgggaaaggaaaacattctgttggttttagccgtttggctttggtgcgaagaatttgttgctgaagcagcagagggacaaagagaaccaaagcccgcgggcggaagcgtcggcaccgttgcagtcgcccagtcaaaagtcgcttcagtccatgcgcgaattcatccgctcgcgagtattacaacaattttttttttaaattcaataatttaatagaatttgtgcggctcccggtaaattggacaccagaaaattggacactgttgtaaataaaaatgaaaataaacaaaataaattactaaacaaaaattttggtttggcctaaaagatctttatcttaatctgccatatgttgtttataagcgtaaataatatggaaatgaatttgttattatttttgtaacttcaggagaagaaaaacatcatatcattcataaagaaataagttttattactcatttctggtggattttttggcccattgatcaatcatccctcatttaacccatttattctactcaaatttattttcacctagttcttgattttttttaaaaaggaaatcttagtgtccaattttcctttagtgtccaaaattccggcggtgtccatttttccgcttggtgtccaattttccggtccccatttaggctccctatatttacactgtatataccattattatttttgcctcaaaatgcgtcgtcgcctctcacgcaaatggaatcaatggaaaacacccaagcgcaaaatgttgaccaactcacagcgaaagaacgagcgaaaatcgtaaatgaatttagcaaaacaacaattcaaacaagtacggccattttccttttgcagaaacgcgccgcagaaattttgaaaaatgctcccgccaaacggcacaaacgtaaatttaaatttatatgacctttctggcaatgttccatttttgagccaatgacagtaaagcacaaaaagaaaatggaagtaaaagcgacgacggagaaacaaattttgggggaagttttagcgacgaacaaattcgaacacttttggagaaaacgtctaaccacgacaaagaggcgaaaagggtaagaaaagggcaaaggaatggacagcgaaacaatgcaattttcaggcggaattgaaccaacaaaacgtttatttcgaccggcgccaaatcgaagaacaaattgaaacgaatgcaacttcactaatggaattgaagaactgcaaagtcgttacctgctcaattgtgagtacagaaattgaaataatttctttaaaaaagtttgcttagatcgcaaaagccattgaaaaatagtattttttttgctgaaaatttcggttttctccgtcagacccctcttgttcctaaaattttctttaaattgtctgacgtacgtttgttcacagtgcgcttgcacgagtcgccatcaaagtgtttattgtaagacgtcgggacacgaagtgaagcggcattttgcggacaaacgcttcttcaagtgcaaaaagtgtcagcagcggacattttgctacgaccgaatgcccacgagggcgtgcattgtgagaatgaatgcttttgaccacttttggcattgaatgattttgtttttaagtcgtgcggagcaaaggaattttgccgagtggcgatgaaagacgagagaaaagtgctgacggagagggaaagactgaagctcaaggaggaggagaagaacttttcatcactcaaagcgtagccgagggaagcggcggaacgatttaattcattttttttatgacgcactttatgagtccaatcaattgacaatgcctggtttttatacaataactttgttcatgtttgaacaaaccctatattttttggcatcattcgaaagcacaaagtctaacgaagctaaaacatataaaatctcaacgtttaggcaattatgaaaaagatgtgattaattaagtaattgctgattattttggtttgtaactttcttgaaatgttaaaattatcttgttttctcgtatattgtcaattgattggactcataaagtgcactagagccttttttatcttgtattttcgcaatttttgcttaatttattatgataagaacattaattagtttcatttgaattattcacttatttaatttttgggtcagaaaaaggcaatcaaaaattaattagtgtacagtaaactacctaagttatcgtctaagaaattaaggttgtgcgcctttattagcaaagttttgaaaaagtattactttcaaattattgtcaaaaaaaaaacaattaatacaagtgtctcaatccggagcaggacaaaactccgccaagaaaaaaaaaattaaaaaaagaaaattcaaacttggaaatttttcaagaaaaaagtcttagaaaaattttccagcgattttacgaaaatttcatgatgagttactaagttttttcaataaaa

SEQ ID NO: 13167 - DNA, 1976 bp, Heterodera glycines
catgcaagttttgaaaagtttgaataaacaatattgcctcctatgtatggcagaggattattattataaaaataagtgcttataattaaaaaattgctattttcatcgtttacacaaaaaaaaaggctgctgggcagaaatagaaaagaggagcggctcttaagatgtaaaatgaatgacattgtatcagagatttgtaaaatttattaatattatgagaatattgtctagaccaaaagtgccgattaattcgtatattaatcaaaaaaatttgcttgcagaaaatattttaaaagtttgaaacaaaaatagttaataaaaagaatatatttttaaatgcaaaaagtaataataattaatttttatacacaaatataaagtttttttttaatttcttttcaaaatttgttgccaaataaatttattcaaattcttatatggcagtggaataataaaatgtcagctttcactcacggcaacatttgctattttgctcatcgtatttgctattcaacattgtcgctcgcagtcttccttttggcaaaaatttagaatgtatttgtgatcaaagcatttttttgtaaaataatatgaaattttaattatagattataaaatttaaaatggttttgagtgatttgtcgaatgccgtcaacaatggggcaacactgagtttgcaagaactgcggcggcgccgtaggacggccattgtgtttctggcgcccgacttggcggcccgacagcgacagttatggcgagaacgccaccgcagctcgaatgcagttgaacagcaagatgttattgtattggattagaagatgacggcggaaaaaggccaatttggatgctttttttgttaattttttgttcgaattaatggtaattaattgtgcttgaatctttataataaaaagttgaattttttattttttgtaaaattaaaattcatttaattatttgcaatttttgcatttctttttaattctttggcattttgttttttaagcaagcaattttatccactttttttgccgtccatgacagaatttcacacatttatccgtaaacaattgaatagtttttttatggatcaaaacaggaaatgcattgaaatccgtttgctgacttacagacattttttggtcggagtttgctctttcttggtggagcaaaaagatgggatttgaactgattgacggaggagcagttgaatgaatgaataattgttgtgttttttggttggaccagtccaccactttactttgtgaaatttgtgtttttaatttaaattgattttataggattttaattttaaattgtacagttggtgattttagaccgacttctgttcataaaactatggtctctttggatgattttacgagtacactattcatttttttcaacaattccgttcttggcctcactattttctcattaattttcaaaacattagaaatggcgtttttaattatatacaaaatggtaaattgataaatttgaaaactaagttttatagctgatcagtagggggtcgaaaaaacatggatataaattccttaaatatttcgccaacaaaatctcaaatttatggctaaatttctcgaaatctcttcaaaagttcagaggtgatccgtcaatcaaatttctgtttaggtatctgaaaaaaagcgagaacgcgagagagagtaagagagagagagagggtgaagagagagagagagagagatagttaaagagaaagagaatcaagagagagatagacaaagagagagagagataaagagaagaaaagattgatgttgaaagtgcgagagagagggagagggagagacttcataaaaagacagttagagtaataatgacaaaatattttaactatgaaaaatgcaaatcaaagtcattgctagcgtcagtttcaaatatttattataagtagtgaaatcagtgaatgaagacactttgtattatttttt

SEQ ID NO: 13168 - DNA, 1618 bp, Heterodera glycines
tcaatttaaaattattcaaatttaaaaagaattttaaaaaatattttacttaaacatggaagccacattctgataaatccgcacgatggaccaaaggctgccaaaactgtaaaaaaaataataaattttaaatctgatgaaaaattctggaaatttgtacagtaagcatagtcggctccaggcgcacgaataactgaaaaatcattatttggaaagtcagttttgttgtacagaaaagaatgataagaataaggatatataaaaatgtatgtaatactttttaacagataaaagtgaaaacagaactaatgaaaaaattaataaattaaaagatacattaaccggttatttttttaataggtttaagtaaactaattatttgccaaaaaagtggttcacgagactcgagaatttgtacagaaattgagattaagtatcagtaaccgaggaatttgtaatcatctaaaaaatcgatttaatttgccgaaaatcttcagcaaataaatctttttaaaattacgaattcatctcaatttgcaactcaaattgttgccgtttatcacttcaggcaatttattagttaattgaatcatatgatgcagtaattatttaattatatttaattatttttagttatttcagtgcgattaaattatgtaaattaaaaattatataaaaaatgaatgaccattgctggtgtcgccgttgttgaacactttctgccgtcaaattgtggatggaattcgtccgcaatttgtgtttaatgccgagttggtgcagtcagaaaatttgacaaaagttgtgccaacgtcaaccatcaaaatgttgagcaaaatgtctgtaaaatgaaaaagtagtccaacgggacatgttattaatttaaaaaaatgtgttgtagacaaatttttacaaaaccgtaaacaatacttataggataagtaaagaaataacttaaaggaagtgaaagtcttttaaaatgctcctttttatattttgttttaaattgatgtttggaacaaattctaaaccccttaaatcatcccgtcaaaatggaaaatttaaatcccattgtagggtttaacaaataccaaatatgacaaaatgggaaatagtaaaggaaaaaacaaaataaagacatttgtaattaataaataattttttaattttctttaaattttgatacaaaaagttcagtttaaatgagttcctgttaatagtttgttgttgtagaaaagctataaaagtcacaaattaatgttctcagttttacccaacaatttgggcaatcaattgaattaactttgcagcatttgcagcagttttcaaaatcatagtgaaatgttattgtagccatttttatagagatttatatttaattccgatgcaaaatttctattgcttaataagtagaaaaatttttgagtaaaaactaaaaggagaatttcgattaaacaatgagcactttcccaacttcatttgaagacccacccatggtgggaacagttccaaaatttggtgctatatttatagtgtccaatttataagaaataattatttgtaggtattaaataaactttttattggactctcaaaacacttttttataaagaaacatttc

SEQ ID NO: 13169 - DNA, 1174 bp, Heterodera glycines
  unsure (1)..(1174): unsure at all n locations
ccncggtaccggttcccctggctttaaaaaaccgaaaatccgttaaattttacttaaaaatattaaatataaagaaatttaacatagatgctaaataaatatttttaatataaattatttaaaataaagtgaaaactaaagtaagaattattattatttttcatcatttcaccctataacaaaatgaattaaaaaattaaataatttttaaaagagcaaagcaaataataaggccaacaagttagccagtcatcggattcaatttaatttgttgaatgaaaaattgttattgaaagggagctgagttaataaaaatgaaataaactaaataatgcagtaaaaagttagaagaagagagggaaaattaatgcattctagaaaggctaaataaacaagaccacccaaatggtaaggattggatgcactatataagtaattactcggatagaacaaatatgataatcatttaacgccgaaatgagcgccgtcttcattttactgcttgtgtaaaaatttttattaattgataaataaaataaattaattaagtgcgttgaatttctgtgcaacggctcagcaagatgctgtgcctgctttggtggatgtatgaatgttattttaattaatgtaaaataattactaaatcagatggctgttcgccgaagagtagcacaccacgaagccgggcacattatggcaaatcacctaaataaggatggggctgagtgcttagcagtaaaattttgaattgaaaaattaaaaattcattaattttagtcagatatagtggaagatcagtttatgtgcgaacagttcaaaaaaagagaagtcaaggaagcaataaagcaggtatctcttttagagcaattcaaaaattcaagaattaagcttgccaacgcgttgcttcaacgaaatgtattgcagtgcaacgacataaaacggttagagatattttccaatgacaaataatcatttttatagaattattgggcacattaaacgatcgtaacgttcattctactgacagggatggagctcgtctgaaaaaggaaacataattatattagcaaagcattagtgtgattaatttctttggaaaaaaaaatgcttatttcattattttttataaagaggaattccactccgattttgtattttaaataaaaaataaatg

SEQ ID NO: 13170 - DNA, 2059 bp, Heterodera glycines
atattaattccaaatttgcatttttttcagcgcttcttcttgttccttatgcaaagtttcttcaaaattgccatagtgatcagtaaaaatgccgtcagttagattactagtgccgcaataaacttcaaaacactaaaagaaaaaattatatgcatttttgaattttttaaaataaaatattagtataatttaagctgaatttgaaaccttttatattttgcattattttatttattcaatttgattaccacttcgttctttttggccggccgataactcactaaaccatcactgtcagtttctcggatttgaatgtttcctctgaatatttgctgcaattcttttttcttttttgtcaacgctggtgctgatgatgactcactactgttaccgtaatcgtaattgccacccagtgtactgctactgtaactgttcgtctcaaaaccgtagtttccacttgtagtactaccgtaaccactcgtgtcatcatcaccatcatttacgctataccagttatcagtgtatgcgtttgcgttataccaattattatttccaggaaaattactgtcgttaccataaccataattattgtagtagtaataaggatgatagttgttgttgttatcatcgtcattattcattgagcttatttccgggctttcaccaaaaattaccgggttttcattaaaaatggtattcgtactgtgccattcttcaccaatgccattgccaaaatctaaatctttgccacccattttgccatggctttcctcagcatcatgaccttccgtagaacggtaaaaattgcggaaaaattggggaccaaaaaactgaaaaaatattttgccgcggtgtgccgatgcggcattctttcaaaaagcgcctttttgttggcagtttggggacacacaaaaaaaaagtgtgccggaaatggggcggcacacaaaaagcgggacggatgccattaatggcacaagatgccaaagaataaagaaatgtattatgtgagactatgcgttttgttgagcaaccgctgaatgtgtggtggaatagcacattgttggtttaaataataacatttaaaaattctgttaatttaaaaaattatttttaatataattttaatttttatttgatccaatttcgtgccgctcgagaatcatggttaatttagtgattaattttataaaaagaaaattcaattttaaaaccgcacttaatttggcattattatatgagaaaaccgattaaattcactccttaagattttggcaattcgttaagaaatgaaaactttcccaaaaatttcgactccaaatttatttatttattttcttgacaatttgcaattgtgcgggccaaattgataaaaataaataagtcattttggaatttttatgtataaagttgaaggatttttccaatttttagcacctatttttgcaattattttggtggcgttttgggcatttttggaaacattattgcactttttagcacctattttagtaacctttcggcattttagcaactaaaaatcctgtctctaatcagtacgttttgctctgtcatttcttcagatcacaacttgtcatttgcactttcttctctctcaccctctctctccatctctctcgctccttctgtctcttttctttctcccgttttctctctctctccatctctctcgctccttctgtctcttttctttctcccgttttctctctctctccatctctctcgctccttctgtctcttttctttctcccgttttctctctctctccatctctctcgctccttctgtctcttttctttctcccgttttctctctctctccatctctctcgctccttctgtctcttttctttctcccgttttctctctctctccatctctctcgctccttctgtctcttttctttctcccgttttctctctctctccatctctctcgctccttctgtctcttttctttctcccgttttctctctctctccatctctctcgctccttctgtctcttttctttctcccgttttctctctctgtccatctctct

SEQ ID NO: 13171 - DNA, 3458 bp, Heterodera glycines
atacctgggtgagaaccgttttgatgttagtcgaagcacttacttataaatatttttgtccgctaacttcgccggggtgaccttgcaatgatttcgagcggacagtgagcaaaatgtgccatttcaattcggaaaagagaaagggcacagcgaatgggggaacagtccctataaaagcacaaaattggcatgtaatccaacttctgtggcagaactttgtgcctcttctgccttaagaagcaccaaaacggcggcttctcttcgtggttcgcttactgtaccaaattcatacggtgccgcgccaaatgccattgcctcgggcaataaaaaacaatcaaaagccctcaggcaaaattgggacaaattcatcaaaaatgaaaaacaaatgcttaagaaactaaaaagaagaaaataatcgggaaaataaatttataaattctttctgagaattaaatgagactcgaaaaaatgaaaattacaaaagccaacatattttacaatagcactgtgaaatgataagacaaattaacaaaacatgctcaaaaggagaggagagatggcacaattaggggagaaaggcaaatgaattaattaggagggaaaggcatttcacacaatcgaaaacaattaattaattaggcatttttaatttcctaaacttatctgccattagtagcagttttaccacaaaactcttcttcgagtctccgtttttttcacattttttggcacttccttcttcctttcctcctcctcccctcctccattaccgtgcctaatctgtgccgttttccaccgtttcaatgctcccctgggccacagtaacggcacattcagatgacttacagtacgaagtccagtggaaaagatggccaaatctgtggccataacccaatgatttgggggcggggagtgcaaatttacgttcgcgtggccagacaaaggccggggtgagcgatgttttggcaatacgaattggacacaatgcgacccaaacagtcgcagaaagtgttgtcacacagcgactgactgatgttccgctggtcgtagcacacgtcatgatgttcgcaacagaggtggactaaaaacggaagaatttccaagggatggccgagtgagtcccagccaatctaagcccttgagagattgattttactcttctcatgcttaataataataaaaaaagacaattaaaactgtgaaattggaaaatgcaattgaaagttgattttcaattgcaacgccaaaagacttttcattttaaaaaactcgcaaacatcaatgatttaacgccttccctccccccgttttgcattgatcagaccaattctgctgatcagataatctccccgtgtgccatgaaaggtggcagaattttttggtttggggaggagcttctgaggtgtcaaacataaaatgggaaaatatttcggtcagtcactttggtcccgatggcaactgatgctgatcagactggcagccatgaagctgaagggatccccgccgcagctgaactcctcctccgccggtattatttgtgaagaaacccacgcgtaagtcgaacttcgctgttccgccgcttcttttctttggctattccctccgtcagaaaaatgatcactttgaccgatgtaagtgactgctgttgatggcggattgtcgattagaaactcatcaggcattaaaaggaagagaatggtcgaaagtgccgtaagagtgacaaatggggagcagggagggggccaaagggaggagaagcggacggagggcggggagaagcccgagaggggggatggcatccgaccgaagcggaaatccctaaaatggaaagtgcggcaattaaataaaatattgatgaaaatggggacgcgtaaagagagggtgccggaaaaacgggaaagcagagacggcaaacaaaaaggaaagtggcaaatgcaaaatggggccggctcagccataaaatttgaagggccgaaggtcggatccttaagtgccgagactgatcagtcaattgaatcagttttcttttattgtaatggtgagaaatgaaaaaggaaccgaaaggaatgaccaaaaaagaacattcttacaattagtgattgtcagttcattttaaatttgcaggcgctgtcactctccccccatttgtgtgttgctcccattcaatcaaattaacttatcaccttcggtcccaacggggaaagaaagagccaattttgaatggctaccatcaaattaaaattacaaatgatttagggggggggaatgggaagataattaatgattttaatgatgaggaatggaatgaatgaaagaaagttggaagaatggggggactgaaaaatcagaagagagagagagaggaaggggggagagagagagagagagaaaggggaaagaagagggcagagagacaggagggagaaaaaggagagagggaagagagagagagagagaaaggggaaagagagagggcaaagagacaggagagagagagagagcggggagagagagagagagaaaaagcgacagccaaataatgaatgaatgaaagtgaatgaacggctctttcattttccttatgaaatttaaaaaaggccaaaaagcactccctccgtctgactttgaaagtattggcgattacaatggcgccgcttggaatgccaagacaatcatcggaggattaacacaatcatttgtttgttgggttgggggattattagcagccattcttcgaaagggaacaaagtccaaaagaacgaacgaatgaatggaacaagaaaaacgcagagtattgagctatgaactgattggagaattacgaatccttctcacataacagtcaaaccagagaaatgtttactttgttttttccgtcttgaccatttcttcagtttcttgggccatcttttttctcatttacaagggaatattccgaactctgtaactgctcagatcactttaaaaccatttttatcagatagagcagcaaagtcgatttgctattgcaaatttttggcttttttgtccttacccccagtgtcagaaaaaatcggtaaaatgaaaatactaccaaaaatatgtactacctatatttaatgttattttcttatggctatagtatgatttggaatttttgaatgtttttaaaaatttaaccatttatatcgatttttcgaaactctgatcgatttttccgatcagtttagggggccaggcaaaaaagtgtacaatttacaatactaaatcgactatgctctatagtgtctgagtagttacaattagaaatggtcccctatttgtcaatttgacgcgtaaaccgcagtagagtcactaggaccatcgcccttcgagtcacacccaactcatccatgtccaacgcatccaaacccaactcatctaacaagggaacattccgagctgtgactaggaaattgcatataaacgatataccacca

SEQ ID NO: 13172 - DNA, 4130 bp, Heterodera glycines
aaaacaaagccaacgactttttctcgggaaaaaactttgctgagattttcgttttgatgctctttaaaaacccaaattattaaatgattgtcaaatattatgccaatttatcaaaattaatcataaaatttaacaaattctgacgattttccccaaaagcatcaaaaatcatcaaaatttctcaaaaagccacaaaaagcctcaaagtatcttttgaaaatttagactcattgacctattaaaaaaaccacaaaatgaggctaaaccctcagacctggtggctaccctgattatatcatgttaagcttatattaaaaagaaaaatattcatttcttactattgaaaacatcaaatcaaaaactattttaaaaaagtcaatcaattttggattaataatcgaatactattcaatgttgcattttccggctccaaataaaaatatatgtaaaaatggagaaaaaaacaaatcaaaaaccgggatgtcggagattcctcggcttgatcggtctcaatactgatctttccagctctaatctattttcttgaaaatttctgactccattcctttatagtacttataatagggaattttttgaaaatcttcttattctaaaacaggaaaagagccaaattataatatgcggacatggaaatgagctcagacaaaccgaaccaaaaagtaagaaaaaatagaaattataaatttaatattgtatcttatacatattaaatagaataggaaaatttaaaaatggcagagaataaatccagttagtttttattcgtttttttgtcaacgccaataaattaacggcaaaattatgacgccataaaagaggtgaaaaacggcaaaattataaacggaataatatttgattaataaactgaataaatttgaatttaaaaaacggcaaaattatgacctaaaaaagaacaaatggaataaaatttataatttgaaaaacggcaaaattatgaccccagaaaggagatgaacaaatggcatcaaatttgaatttaaaatataaccagaacaaatcttttttataaataattctttttatccatgtattttgtttaatgtaaaaacttctaaaaacatttaattctcccattttgataattcatctaatctattcggattttttagggtagtgcggcctatctgaagcagaaattcattaatttgataattaaattggtggacaatggccgatcacaacaaccaaaaaaaaaattttaacccaattgagctttgccaagaagcagtaaaaatgagcgatcataaaggccctaccgcatttgtaaaaattgccaaaataaatttccaattttggaaactcgtcgacgaccatttgcggaataaaaaatggcttcttgattatttggagattgatgaagaagaacaaatggatggaacgacagaaatggttatttatgacggaaccggaaaaatattgccaattccgcaaaatccattgcccaccaaaattagcggcttccaaacgatttggatcacgtaaattaaccgattatagtaaatattatattttttgttaactttctagttacctggatgcaaatgtgatcgcttttctccacctttttcaacatcttttcacttcgtgtgaaattactttgaccattgaaatgaccaatggtcaatttttgttcagtttggcccaaaatatttggccactgatcaaaaacaacgttaaacgcttttcaatgccgaccaactttgaacattttcggcatcacttcccttcaattctcagcagcgaccaatggccatctcttcaattcttttattgtgaaaatgttttgccagatttcccagccgatgattgtgccaacgcgtcggatggacaagtgctgtccaagtggctgttttcggcacattttggtgatttgccaccgaaagtggctcaatgtgaatgttcaacggacctgcaagggatcacgtcaaaaatggcattggtcaaatcggtagtccaattttaacttatttaattgcagaaattaataaataaatttaattattaaaggaaaaagaatatttttgtatattaatattttatcttatatataaagaaaagatataaatattttaattcttatgtacgtttttatttatttttttacatttaggcatttgtcaatgcgtcttctcgtgccaattttatcgtgtacatttggtttaatgcctcttcttcggatcatgtgacagacattccgacttttaaattgtccaacaattcaactggcgagcacatgacattgaaacggattcgtgataagtatgctaatattacagttgggttggtgggactgcggcaggtcaaagaaatttaaatttgaactgttataattctctaaaactaatttgttttgtttttctatcaaaattgattttggattatcatttagcaatattgcttggttttaaaaataaattttccctatattttggaaaaatacatacattatttggggatttaagcttttttttggtatttttattttaccaatttttttgttgagtttatcggtcagagcagccaaaaaagccaaattaaattggctataataaatcgtttgtctttttgatttctaatttgctccctagtgataagcgtcgccttttgctgattcgttgtccaatttcgcgagatgagcacaaatgggccaagtgggaaaaggaagcgattgaatggacattcgatgatcaatggaacaaattaactttttacgaaaaagacgaaatcgatttttgaacccaatcaaatgaatttttattttgtcaactttttgattatttctgtgatgtatttgattctcttctgtgtctttttaaagatttttcggttgataaacttttattaaatgctcgaaaaattcattccagcggaaagaataaaacatttaataaatgcaattaatttacattgcacatgttaaaaattttaaattctaaattcgtcaaatttgactagtatttcacggactaaaaatcttcgaatttattggacttttcaggaatttcgtattaaacaattcaattggttgtttcgattgaaaatgatgaacaaaaattagtggcacaaaagcggcaaaaggctattgggccggatgttagcattgactgttttgaattactcttctcattggccatttgtttgtgcttgtaaattgtccaaaaggaagtggcgcaaaatatttgccaacatttgcattcacatggaattttatcgacaaaagggcgacgaaattttatgtttttttaaaattttttgcataatttttcatttgaacttttcgccctcataatagggcaaaagataaaatttatcttcttttataattaaaattgctgctgaataatacgctatttacagcaatttttatttattttcattgaaatttgcccatattttaccattttcgcgcctaaataattcgctccctatctataagtggtcttcggtctcagttgctaaagcttattcataaaaattaaacaattcctttttctaaatttagctatacaaaccccaatttctttgaatacaaaatcaatgctgcaaatgaaatggttcaaataaatttgccaaattagaatttgccttattttgtgtatttggacatgaaaaagaattttttatctttaaatatatttttattaaaggattcgctagattattgtattatttaaatgaaaatttttcaagaattgcaatttttgcgcctttttattcgctgttagctgctaatgataaattatttaacgaattttgcttttttgcttgatttgcataacaattcaccgtcaacctatgaaatttatttgatttttaatgtcatttgttaacagatttgtcaacaagaatggccaattttgtaattttgagcaaattaaaaaaaaaatttaggttccggcggtgccgatagccgccgccggcggggaaaaattgagaattttgaccatatttttagcaaactttcatttaaaaaaaattcataattttgtggattttcgaaaaaaattgtaattttcttgctaaatttgggtgagattttagtttgatactctattaaaaacgaattcaaattaaataattgtaaaaca

SEQ ID NO: 13173 - DNA, 3358 bp, Heterodera glycines
attactttatacgagttcaaccttagaaagtcttgttttatatttttcgtatgtttttaagtttgatcatcctcggtctagttagatttaaaaaattaaaaggttttaacaaaccataagaaaaacaactataattttaaattttagtaaaataaaaattgtgccaattttaatcaaaggattcagaaaattgtgaactttgtcaacttttataaatttcaatgtttgtacggataaacaacaacaaaagccattagcctcagtttattatgttttagggttccgatgccttgccaatgccaatcacaaaatgcgccattcattcgggtggaaacataatggcctatgcgatcggttatgattggagcaaggtaataattgaaggggcgcagagagcggacaaattgaaagagaattgccaagccaaaaagacaccataaaatgagaaatttggtttttagggcttcgaatacagcacggcgaataatgtgacgaaaatctttctgcacgggtgtgacgaggagatgaaaccaaagccgaagaagtgatctccgtgagtgaccgttttttaatgttctctcaattgtttttttataaattttttacacttcgttttgcattgctttaaaacggcctctcctccccttctcccctccgttattcactctcaaattcatttttacaaaattccctggccaacttaacaaaaaaagaaccctttgccgttcccaggctctttatttttattacatttctcactataattctcttcaatagcccggaaattggcttcggcggatggcagacaaaaattgagaaaggaaaagccgtgcccattggacagaggcaaagaaaagggggagggaatgttccgggaagggaagggaagccaattcaatgtttattcacttctccttttatgtccttagaaaatttggatgctttgacaaaaaaaggaaaagccttcgcacaaattctatttgccggaaattttacacgggaaggaaaaagtagaaaatgctttaattttaatattgatcaaaaatggagaataatcaaaaggaacataaaacaaaatacaaatcaataaacatagaaatcaatgagaaagggggacgaattgaacaaaaatggataaaatgtttttttgttgtgcggtgaacgaaaggacgggggaattgggagagatgcgatgcgtacaaaaaatgggggggggcaaagcgaattgcataaaaatctcgaactaatcatcacattatctaattgctataattgtcttaatgatggtctaaggagggggggggggagaatttatttagagacaaaaattaaaacataataagtgaagacggagggagcggagagtggcgaaagtgcccttaggggagagcacgaaaaatgtgatgcaaatggaaaaaagcaataataataatgcaaagttcagctcggaatgtgagaagagcggcgggggggggcaacggcacgggcggcgccggcactattatttcttcacttcgttggtcagaatctgaaaaaacgaggaaaggaaaaaagtgaggattttccggcaaaagtttgaattttttattttttatttctgagacaaaatttgcctggaaaagctccttgtccgcaaggcacccgtcaacaaattccttcagtgtcagctctttgtcattatttacgtccattttctcgaaaatcattttcgcccgttttcttggcgaatcgtccgccgatttggtcacttcggggcccaacatttcgtaaattgcctaaaaacggcaaaatgttggaaatgtcaagcccccatttgtgtgtacttcgatgattttgatcatctccttctcgtctatcgtcccattcccgtcgatgtcgtacatctgaacgggacaaaggcaatggcatcgttttgaattcgaaattcaaaaacccggaatgcccattcgagtttctgctcgggtgtgccggaggaagtgacgttgatggccagcaagaactccttgaagtcgatgaacccgctgttgtccgtgtcgaaggtccggaacacgtgttcgcagaagccttccgcggagccggaggggaaaaagtcctgaaaagaagcggggcatgagtagggctaaagtcagtccccgaccgattaaatcggcatggcactgaccttgtacactttgatgaactgctctttggtcagatggcccttgggacagtcttgctaaacggggacaaaaagcggtgaacggacggaggcctcgcaaagtgtacggactgaccacgaagcctttgtaccactctttgatctgttcctccgtgaagttggtgttcttcttcaggaactccaggtcctccttggacagtttcggcttggagcctttcaagcccatttcagtgttttatcggtgcttttcctcccagggaaaatttgttgggacgacagcgccgagagagaaaaatgatggccaaacgaagagaaggaattcaaagcgacggacggagaaataaacggagggaacgactgatcagaaatgacgttggctgaagagaatggagaccctttacaaaatcaggggtgattagaagaaaccgttaaggatgtcaaaggaatgatcgaaccgatgaacggaccaatgatcactctcaagtgtaaatggttaaaggatggatgatagtaatcaggcggaatgatcagtgctcatttaaatggctaatggatggtattttaaaaataatcggactgactgatcactgaaatgactaatggactagtcgtcacattacaactatttcgaagtcggcttaagattctttttcttttattaagcgtcgtaaacattgggaaaaagcgaatgaaaacgaaccttttaaaatttgtaaatgatcaaaaaatgggattattgctgagcgaacagagaataaacagaagaattagccaaattctgtttaggacaattctttgctaaaaaagcgaagaatttcgaaacgacactttcaaacacaaatttcgggcatgggatggcccgaaaatgggcaaatgaatggtaattgtattttggccattaaattgaatttgttccgaaaagggacgaattttattgaaaatttagaggatcgaatcggacggacaattttcaccgacacaatttactttttttctgattttttttgttctctgaaatgtttatgtgcccgagggatgaaaatacgaaattgtaaaacagctgtcgccgcaaatgcaaaaaggtgacaagcgaaaaatacgccacataaatcccttcggcggcgggggacggagggatcaaatgtcgccgcggggggcggggaataaatgttcttattaaagggggaggggggggggggg

SEQ ID NO: 13174 - DNA, 1358 bp, Heterodera glycines
ccccccccccctttttgttgtgtgtgcgttgttgggactgttaaaccaaattttgaatcggtggcgaaaggcgcggacgcccgaggcgctgtcgcttcccccgtcccaaccgccggtgggagcttcaaagcggcggacttcccttcgggcgcatgcggcgctcacgcctttgttgagggaaaggggggggggggggagagagggcttatttgatgagaaaacgagagagagagaaagagaagggggaaaagagagagagggggggggggaggggacgaagaaggaagttggtcctcatccgttagtgatgagtgagtggggcgggaagttcattcgagagcagttaataaacagagagggaaaatggggagagctgagaaaagggaaaaagggggaggagaaagaaaaagggagtgggtgagaaagagagagagagaatggggaatagagagagaccaatccaatggtaaaagaatgaaagagaggaaaaaagagatggggaaggaggaaggaaaaagaaagggagtagaagggaataaagagaaactggaagagagagagagagagaagagagagagaaagaagagttaaagaaaaagtgaaaatccgtgggagatactgaaaaatttgacgaggacggaatattgtgtgaagcggatgttaagtgtttgcgggagggggcggggcacagtgaatgaatgctctgtccgtcttccccctctactctttcccttctgtttttctctctggctctctccagtttagaccctattttcccagtgtgtagcctaaggcgatgacttcatcatcaactgcggagaaaagctacttgaggcgatggtcggaaaaggaagagaatgaggggaggggaaaaagagagaaaagaggaaaagtagggaaagggaaaaagagagaaaaaaagagaaaaaagagaaaatggaaaatggggcaaaataagggaggggaggaggaaaatggaaaaagaatgaaaggaaaaaagagaaataaagagggaaagaggaaaaatggtgaaaaatttggacgatgaaaagaattacaatagaaaacgaaaggaaagaaattatgaaggatttaaatgcttttgtcggttcatcaaaatgttttcgtttcgttcataattttatgggttccgagaaagggtcccttttggttgggcccgtgagttgtgctcgtccgtccgtcccattgaaatttcgttgtgctttcgcccgtgggacatatccaatttcggaagatgactttgccaatgggggcgggggatttcaacggcaattcggactggcggtgggaaaaagtgggccgaaaagaatgcggaaaagggcggggggggggggggg

SEQ ID NO: 13175 - DNA, 4918 bp, Heterodera glycines
  unsure (1)..(4918): unsure at all n locations
gatcgttncnaaatttaggtaatttccaaaatataattcgtaaaattctcgcgagattcatgaaagaaagaaatagagaaatgagagggcgaattaattggtaaataaaatgtaagaaaacgaaaaatgaaatcaggtgcgacatcgttttgaaaagtgtccgatttttccgcatctatagcacttcacatcgattcttcggttgctgttcgagtttgacggggcttgttgggcggcttcggcgtatgacggcaaatattgtggcggatacggcgccattcgcgtacttggaccagggcaatttgaaggcattggcattgtgtgaccggcgatcatgttaattggaggagggcgcacagaggtgtcaatgatcatcattccgtgtgagaaagccggcggttgagcatgacccgaactgatcggtggaaacacatttgcctgagctgtgaatggcctgaaaccacctgtgaaaaatggggaaggggaaaaattatttacgaaattatttattggtggctgatacgccaaactatcgtgtcttaaagtactgtccctttcggcataaaattcaaatgccatcggaattgtgccatccctttttgcaataaattttcccacccgggacggaaacggattggaaataaggtttaaatactccggggttaccgcaaccgtcatttttaatgtttcgtcaatgaaacgtctccacacagtccctttgtgccaaatcaacgacaaatctccgatgatgaccaatccaaatttgggacgggagagagccacggttgttctcgcgcaatccgcccagaattccttgccagtgtcagcttccaatgatcgtccagccgcggagcgagtcgtgatgacaaggacaagctcggcttcctgactttgaatcgaatcgactgtactcaccttgacatttggccaccttctccgttcgatttcacttaccatgtgtttcctctctgcttggtaaaaacacacaacttgaattaagcctggaaaggttccctggattattcccaaaaatccaagagctgtttcccgttgctcgggattgtgagaggaaaatgagatactttccatttgagccgatgatttttgatggattaaaatgatcggacaattttcggctacaatgcgtgggcccatacaatgctctttttcttttggtctgacgaccattctttacaataaaataggctaagttttgttctgttaatttcagagtactattacagctacgcactgtcgatttccctggtgcgtcagttaaagctaattgagtttcgtctgctagccaagtattgttaagaacacgcccattgaatgacccataaaaacgatattcacaattttttcccgattcaggttcccaaattaattgagttttatcactcattaagcaattgcctctttcgtaaggacagttaaaaagttcaccaataggagaatgaatggatttgtcgccaaagcgagaagttactagcgttttgaaaagataacaattatcgctaaagattcgttcccatgagaatgaaccgaaaagccaagagcgaggggtaaggtcaatctgattattggtatgataaagtccatcgaggtgaatgagtgaacccaaatagcatttcttatggttaatcatgagtttgcattcatctaatccaaccgtaagaagttcagattcgtgaaatttttcgattgggattcccgttagtgaggtaaattttgacacagattttcttactatcctacatgcccatgcctcagtactgaattcaaaaaaattaggggtatagattcgccttcgttgtgatttaggagtgtgagatagattaactgcaatagaggagcatccattgaatttgggaagaccccattctgatttgcccttcaagagaaaatttgagtcggcctaatttttctttttctgaccatgttgtgccagcataatccaaaaggtctctaaatttttgggcccagttatcgaaagaggtaagattttcatccttgcatgccggaagttgactagcaaatgggtccacagttgtcaaaacgtttaaaaattcgtcttcatcgtcctcttcctcaagtaaacccactcggctccttagtactacagtggcatccccgttttgtgataagttatcagtgttaggattatcccaattctccacttggctttccaaagtttcaactttatctaccacttggtcaagtcttgtggagagagtgtccatgttagcattaacagtaacagatacttggttaatggcgtctgtattttgtacagctctgcgattaatcactcttagactccgattagcggcatcctcaagacgtacagtgccttggtatactttttctaccaatgaaaagggagcaccggaattaggagggtgactgagattttgaaataatgtcctgtctacactcgttattgtaacttgttggtcttccattgtttcgtttctttctatccaaaggatagttcaattgaaaattggggtggacaatttgaaaagagaaaaaaaaaaaaaaaaaaatttggtctgctcttagtcttacgactattctattgattgaaatgagagcgcgagttaaaacaattcaaatatgagcgcaaataataagcaaaatgaaacggggaaacaaaattagaataattagatgtaacaattaaatttggaaacaaatgagggaataggcggtagggttcgcgcggttgcttgcttaagcttaaggctgtgaattgcagagtgtttgtcgattgagatgagagcactatgtgctttggatgaagaatgaattgatgaatgagtgggaaatgctttttagtgaaaagtggagattgttaatagcgacgcttttcccattagctgttgtaacatttaagagcccatccctatcgtggaaatcgaaaaatggaattgtccaggctcatcggcgattacagtaaaagataagtatgatattagcgttcaaagtgcaatgttctccgcatcgcgcattgttgtactgtattagtttcaatagggaattgaacttttggcggcaatgtttttttttgacgaaaaaaaatagagaagagaaaaaaaattgaccattattttgttgtttggtagcaaattgaattagttagtggaaaatcagcccaaaaacattgattaaattgataacagggaaaaaaaataaaaaaataaaaatttgaccgttttgtggttttgatagtaaattaaacaaattaggcggtaatgacagactgaatcaaagaaatgtttgaacgaaattgaatgcagaacagaaaaattcgcttactgcacacattgcaatgccacgagcagtttgggcagtgcccaatgtccattccgtcgccaagcgcgtcatttgcgccatttccagtgtccacagcatgagcaattttcgggtcgctgctgatgttcgcgccattgtttgcaccactatcattgtccacatttcgcctcatttcctctgtttttgttggtcaacggcactgagatgggaatgggaatcaattagaaatgaatcgattttgacccttcgtttttttttgtcgaatgccaaacttacgaaaaacttgcatccatataattactgccgatagtgaagagagaaaaaaaaaccaaatacgaaaacaaacacaaaaacgaaaacaaaaaaatttccgacgccctatttctcactctcgaaaacgaccaaaaaaaatctgtgtttttcttcatttttataattattttattcgttgtctgtctaattgcttttatttctttttttgatttatttttgccatttaacctattttacttatatgtaattcatttctaatggtggcatgtccacagtaacgaccactgaaccctgtctcggccgccccttggctgtttgttggggggttcacatatttgttagtgttaggtggcaggtggccttggtttagcaccgcaaagttcacagttgccgaaaatgcttctacgccaccagcaaagcgcttataaatttgttaaatctcataggaaaatggcaaaataaacttttatataaaaatagcgcacaacgaacaaaaacaattaaaaaaatagagaaaagagacaaatttaatggtcgatttcggcgatttttgaggagaaaaaatagctatataaattttaacttaacgtcaaacataaacttatttaaatcattaattaagtattaataccttttcgaactcggagaagtgattcgaaactcaaaaataaatttgtaaataaatttgtccttcgctaaattgttcttagagatgaaaacaaaatgaaaaaaaaatattaatgtcaacaaatgaaaagatttgtttctttgcactctgacgagtgttcaatggccaacgaataacgcccatcatccaattgcaaattctgcataaacagagggagggcagtatcaacacaattcaaaggagaaaatggggaaaaatgggaaaggggggggggcaaaatgtcgcgtctgttggagctgtggagattaaatcgttattatgagcaaaaatgctaattctccgctgagggcgcccaaattcaaatttttctgctctgtttagttaattcagtccccataaaattactgtatttctttcttactgtaagtaagttctggcggtttccttttggcactaatattcgccacatacatctgtattttagcccgtttcgcccttacattcaatttctgatcagtttgtctcattaatttgtgatctgtagggctcataatttctgatcacttgtgcttttcattttctgatcacttgtgcttttcattttctgatcacttgggcttttcatctctgatcactagcgcttctaatttgtttatagacgtgtcttctcttttttagaggtattccttctcaaanttt

SEQ ID NO: 13176 - DNA, 1209 bp, Heterodera glycines
  unsure (1)..(1209): unsure at all n locations
atgccttttttggcgtttttttccgaaaaattccattaaaaaggcaataaattcgggaaaatgcacctctaagaaatgacccgaaattttttttagaaaccctaagaattgaaacattttctcaaaaattgatcgtcaaaatgaatttatttttttttcttgataaaaaattttaggtttaaaaattttccttattcgaaaaaaatttataaaatatttattaatcatttaaataaccaaaagtaagttttttaattaagttttatggttttggctccatgaaaatcataaataaaaaattttaattgccttttttcatgcctttttgggacttttgtacctttttcatgcctttttctttgcaatattttggtgcctattatatgcctttttcgcgatttttggtgcctttttttatcgttctctataaataaaatacaaatgattattcagatgaatcccttttaacacaatatcaaaatgacaattctttgcttcaatttgttgaggaagaaattcgaaaagaattttttggagcagaaattgagggatttgcagaagatttgcaagaaataaaattcataggaaatgaaatgaaagaaaaaataatggtaaaatttatttattttattaatttaatttaatttttaaatttagttgtcatatttgaaaaagaataaatttacagaaaacaatgacaattttaataaagcactgaacgaattgcaacaaataattgaagaatgggtaaggcacaagaaaaaatgttttcaaaaaaagttaatttatttattattctaaattaaaaataaaaaaatattaataataattaactaaaaaataaaatgccgtaaaatatttgcagtcagatgaagctcgacttcaagtaacgggcgcgctcatgataaaatatgaaaatgaaagcttcagcccaatttgccttttgcctggcgaatttaatcgggcaaaaatttttggcaatttaatttgtgactttaaaaagagaacattgtgccaagatgaatcactttattgcattttttgtaaggtcagagattttgttgtattanatatgtacaaaaaaatgcccgaaatatgtaagaaaatatataaaaaaaattttaaatgtgttattttttaaaataaattctccgtanagggntgataggcacaaaatgctatagaaaattacctaaacaggcttaaaat

SEQ ID NO: 13177 - DNA, 3084 bp, Heterodera glycines
ttgccgaaattttgaatttttttgaggatttccaaaatttctgtaaaaaatccacaaaaaatataaaaaaaatgaaaatatataagaaaaaagttcaaaaatacaccaaatatgtaaaaaaatcccgaaatatgtaaatatgtataaaacaccgaaaagtgtaaaaatatataaataaaagttccgatttttaattggcagccatattaatcattgaaaaataaaacatttaatcatttcagaatttaaatgtttcattggtgcaaaagtttgagagagatccgcttttatctgtgccaacactgaaaataaatttaatgagtgtgcaaattaacatacaatttgttgccgtgccaaatttaaaacatttgccaattggaaatttcaatggcacacaatttagaagaatttcaaaaatatttgttgaaaatataaaaaatttattgaaaaatgataattttgatgagtgtcaacataattttgagctaaaaaagctaaacgaagaaaagtataaactgacgaaacaattgtcgaaagcatgtaatattttaaattttaaatcatttcaaacaaaaaaataataataatttatattttaagcggaagaaaaagcggacgaaattagggaaaaaattaaaaacacaaaaaaattagaagatttgttgacaaaattctgccaaaatgctttaaaggaccgagaaaaagtgaacgaaatgaaaacaatgcttgcaattttaatgggtaattaatagggctgacaattttatgtaaatacatattttttcctggcttctccatgctctaaatagtaggaaaaacactttttttgtttgtgttttcgaataaaagttgggacttttatttacatatttttacataatttagaggtttttatatatttttttttgttattttggactttttagcattttttctaatttttttttgagaatttttgaaatttataaaatttcttgatttaaatttttttgaaagtgtacccctaaaaaaccgggttttttcttaaaaggagataccaaaaattaattttaaatatacaaaaatgtgcttctaagactatataagttatttttatggtattttgtagagcccggaattttgaaagtaccgggaccgggcccgggaccgggcttagccatttgaccgggaccgggccgcccgttcaaaaaaagcccgttttaccgggcgtcccgggcccggtccaaaattttgaccgggcgcccgtacgggaccgggcttttttcaaaatttttggaattttgaattaaagacatttcgccaaaaataattattaaattttcaaattttgagcagtttcgctggtgaaatttaagcccgttttagcccggtcaaattgaccgggtccgggaacgggaccgggcttagccatttgaccgggaccgggccgcccggtaaaagcccgccgggcccccgggcccgtccgggctctagtattttgtgcctttcaccatttacgaagaattttttccaaaattagaatttggaaatgacattaaagtgttggaaaacatttggccatcaaatgaagaaatttataaagaaaaagttgtcgaaattaaaaaaagaagcgatttgaaagtgtttgtccaatcattggcttatttggaaaagtgggcaatcggtagggatttattatattttatgttttaaaataaatatttaaatttgcttttatttagacaactatattttcaattccgaattgggctatttggactcgaacattctgaaaataatgctatcaaaaataattgcaatttatccgaactcatcggcaccttttataatccacaaattctttttgactttctcactttggtatgtgaataggtgcagattgtgagccgttataaaagccatcaaatgaaaattatcaaaaaaaaaaactttaactataaaaacctggtccctggagtacttttggccataactttgttcaaacttgacgaaattcctttgaattttccaggttaatagagaattgttagggttatcggatgatattaagaattaaaaatttccgttgggcttgagcaaagttatagtcagttttttgttgagaattttcatttgatggttttttatagaacgatatagcaccagcgaaaacggaataaatttaaaactaaaattaatttatgcagcaacaataaaatattctttataaatattttatatattataaataatttttaaatttaattatgtttttttccaaattttaggcattggcctttgcccgtacagctcgaacagctcacttatgagcaaagtggcgaactgctgctgatgtggtcaccggggagagaatgggtgctcaaaaagcaaaatgtgaagtcgaaaagtctgagaaaacggcaccagcgaattctgacaatgccaatcattgggccaatgtttccgcaacaaaatttgggccacaaaatcaattcattgactgcaaaagtcattcagcgcaaaatgcaggaaggttaaatttgcattgtctgaaaaatttgtaaataatcattagaaggattacaataattacagtaaatttgattaataaaattataataataatagtaaatttgattaattaaatatcttgggataattataataattacagtaaaacttgaataattaataatcattaggaggattacaataattacagtaaatttgattaattatataatcttgggataattataataattacagtaaatttgaaaaattaaataatcattgggtaattacaacaataaaagtaaatttgaataattaaataatcattgggttaattacaataattacagtaactttgaataattaaataatcattgggttaattgcaatattacagtaactttgattttaattaaagaatcaattcgattaattacaataataactaaatttggataattaaataatcattgggataattacactaattacagcactggaacaaacgctgggcgaagaaaattcgggaacaataaccgaaccgttggggcccatcaaatttcgcgcaatggtaaaaaataattattaaat

SEQ ID NO: 13178 - DNA, 706 bp, Heterodera glycines
tcattcatgacggcaaggaaagggcagagaatactttggcattttgaactaattaaaattcaaaaattcaattttggcatttccttttggaacgagtcaatcaattaattgactttttattacttatccaacataaacaatgtcattcttggtagcattcagtgtgattctaagtgtacattataattataattcataaaaaataaattaatcaaatttcaaaaaaaaagttaaatgaaaaactaagccattaaaagattctctgttttgtttattgcctttttaattgattaaaattcaacaaataattttttggtagttaatttgaccaatgacaaaataaacaaatgggaaacagcagcagaaattggtgaggaggcattgttttcatcgggcattttgggaaagaaagcggcaaaaaacggcggaggaaaagcgaaaggccaaaagtggagcaaaaggggggggggaatttataatttgtcggaatgcgaaataaatgaaataattacccgcgggggaaaaggggaaaattcgatgacacaaaagcccacggcaaccaaattgaaattcttatcatatcaatcaaaaccaaagcggaggaaaaggaaaaagggaggcaatttaataaatgatgggaaaatgggggggtaattacggacagagagacaggaaaagagagaaacacaacggagaaaaggagagc

SEQ ID NO: 13179 - DNA, 927 bp, Heterodera glycines
ctatgttgggtgcgataatggtgagaagcttggatccgggacatggaccggtcagccctctttagggcctacaggtgaattgccatttagcgctcaacccaataacgtgccaactcctggactaagggagggaggagggccatgacgtgcaacgttagggcacttccggtttccattgcattatgcgatgtgtcaactccaattattggaggaaaccaagtgcatgtcggctgacacaaagaccctaacagcctaaaacgcgcctaggtagcgaagctcaagaagcgcgcagcgctttcccaagcgccaccctcgcatgcacacacccgctagttatatatatgttatattgacaaggagtttcgtctgcaaaaacaaaatctcccggccgaaggccgggagcgccctgaaagtagtgtacgtaccccccccaagacccccccgggtccaaaaatttttaaggaaaaataatattttggctgaaaattttaggttttccttgctgggctggtacccccccccccctttccaagaaatgtcgctaaatttttcaaaaaatccacaaatttttaatgaaaatctgctaaaaatggctcaaaatcacaaaatttggtcattttttggacaaaatctgttaacaaaccgcatttaaaaccgcaaaaattttcccggcggcgcctatcggcaccgccggaccccctgtcccccaaaaattttttttggaaaaaccgcgccacataaaaaacgggtgtgaaaagcaaaaaaaaaaaaaaaaggtcgtcgcccggggggaggtgccccccccaagccaaaatcctgggaccgtccctgggtgagtgaatgattaagggaatttgccatgcaaatttgggatggaatgaaaagtgttaatgggagggaaaagagtcgggggaagggaaaaaggaa

SEQ ID NO: 13180 - DNA, 468 bp, Heterodera glycines
ccccccccccctcctcttcctcggttcagtgttgtgtgatatttcccttcgctccccacatgacaatcactggcatattttgcttcatcatcattttgttgcagaaaaatgctgaagcactcgctgctggagtttctggccgcactgcagctgaacatgcagcaacagcaccgcggcgctgctgctgcaatggccggtggcagcacgcagcagcaacggatggaactgttgcaggcccaactggagcgaatgggatgaacggaagggaagggaaaggactgcttgacgaggacggacacggacggaccgacacacacaccaacaaacagacgatgaatgaatgaatggacgatgatgaaaacgaaacattttgaaaatattaatgttatatgatggtgggggcggaataatgatggtgaatacagtatatgaacaatgatattatatgatgatagtacagtatgacaa

SEQ ID NO: 13181 - DNA, 2500 bp, Heterodera glycines
tttctaatgcaaacgcatttcctgacgatctgacaaacaaaaaatttaaacattcggcttccataggttgacgttgaggctatcatcaatagggctgggatttttatgttttaacatattttttttgccgcttagttatggcgagagaagcccaaaaatagcattttctccgaacaatttttgatttagagcgacttataaaaacataaaaacacatattttggcgttttcgcacataaaaacatatcgcacatatttcggggtttggcacatattttggcatttttgaaaaaaaatatctaagaaaaacacaaaaaattcaaaaatgcacccctaaaaatccgcctcccctcgattcgtctactcaacgattcgtctattcaacgattcgtttactcgacgattcgtctactcagccaaaaagtgacgattcgtctactcagacaaaaagccatgattcgtctattcaacgattcgtctactcgacaattcgtctactcagccaaaaagtgacgattcgtctactcagcaaaaaagcaacgattcgtctacattattcgtctactccgccaaaaaaattctaaaacccgggttcgaactcgaaaaacttttaaagtcatttttatggagttttcacaaattgcctagtacaatacaacgtaaatgaatgtctgaaatcgaaaatttattataataaacatcaaaaataatagttcaaatcaaatgaaaatgttgaaaatcacggaaattgaggtttaaaaatccaatcacttgtgcggaataagacaagggtttttgccaatggtataaagcgatcaatcattcacggtcctcatgttcgtgttgagcccctcgtgcacgcaggccacccacatatccttgcatctgcagactcagcagtgaaaggatgttcatgacgtcttcgtcggtgttgtactccgcctcgtccaatgcatctccgatcaattgctccttcaaaatgtatttgatgcggcgtttgtgcgggaacactcgggcagatcttgcgatgtccacctgcttgtcaacatcatccagaatagctgctagaaagtctgacaaagatgggtgatggactagaccacgcttaagttttaaaaaccaaattaaactcgcactaaaaatcgcacaaccgaaaattggaggtgtgatgcctccatagcattgttcgttttctccactgctgacttcgcacggtcgtggacattccagaagtgcacagggtacagtggtggacgcacaattggcagctcccagcgcggcacgacggaaacaattgttgacgattgggttgttggcgttgatggaacaggtgaagggatgccaaattggatgaaattgttaccataaacatggtccaaattcactaaaataaagaaaataagaacgaattcaaaaaacaaaaatactcaccactaccaaatgaattccggcgactgtattcggcatcctcagtggcattggtgctgattgaactgcgtcggctttgatcagtgcccggaacaaacgccacggcgccggcttcttgttcgtgtgcggtcagtccaacatataccctcgcgaagtaaccgaaaaatgcagccaaaccttcgggtgcatggtttactatgacggcaaaaccacgacgaacatgttgtccggggatcaatgctagagcaagcagcttcctaggagtgaacttttttttgcctttttcactcactccaacactcacctgaaactgttccgcgcgacttctccttgttcttcgtcgttggcatacaattccgccaagcccatttcacgccattttctgaaaactgcctggctcatgtggaatagacatcccgtcaattgggccgccggaaacgtttctcgcatggcccgaatcgttgctgtttcaaagtcactgatgacttaaattttgggatgaaataaagttagaagaaatgatcacttactatgtgctggggtgttgggtgcaatcaccgctttgaccgcattgagtgcctcttcgtagtattttcgttgctttccaggcaacaaagcatgcacacataatgcgagccgccggttgacaaaagcgccgatcacgaaacactgcgtccatgcggctggtgccactttgaatgttccatcaaccgaaattttcctcgcccgcttcaaaacgtccaacagctgaaaataaaagcgaaaaattgaacatagaaattaatgaacttaactgtgggtgtgcaaagaccaagaccacatccgattctccttggcgacgcactcggctgtcatacaacaatgtgttttcgccatccttcataagcagggcatcgggtaggacaacattcagagggttgacacggtccatgttgccgtaaatctttcttttctgcctaaaaaactggaaataagagtgaaagaggaattcaagtatcaaaagagaatgaccttctcattactgccgccagtgcgaggtcagtgcccatggacacaaatgtttcatccttgg

SEQ ID NO: 13182 - DNA, 1682 bp, Heterodera glycines
  unsure (1)..(1682): unsure at all n locations
atgaatattttaaaattattcaatttattgttttaaatcctgtttattattttatttataattttgctttttaattgcttaaaagaattacataggtaattgctgtttgtttcaaatcatacagttttttagaaaaatcaataattgtttttatttttttatttaattttctcgaactaatttgccttttataccagattaattagatattcaatttcgaatacttttatccatttttcgattaatttttcttttatacataaattattataataaaaaatgattaattttgttttattatattttgttgaaataaaaataaattaattaatacagataagaatttttttgaaagttctttttggtctcaattaacgtatttaaatataaacattaaatactttttaaattttaaccgtcaacttaaataaatttcataatcctaaagaaatgactgctaaaattagtattattattattatatttttttgctatttcactgctttaatttaaatttttttagcctcggtgcatggtttatttaattaaattagaaatttatattatgctatgattttaatgtattagtcaagttgaaataatttaaaatgtttttataaattcttttttccttaattttggttaatatattttttatttcatacttattttagtatgtttttctcatttactgttgcttataatgctatattcataaaaatatttatttatttatatgataatcaccgtttcataattgattctaatgtataatatgacgcggagcaaatattgatattgttgcttatattgtaaaagatattgcaagtgatatttctttgtttgaaatttgtaattttttatttaaataaaactgttcaatgaaattttattttattatttaataggaaaataatatctttttaacatacattaaaatttgaaagtttctggaaattagcaagctcaacccaaattctttatttttatcagttgtcatggctgatcgactgcgctgatggctgtaacctaacgactgaagagcatatcgtcgccttctctggccttccgaaacaaatttttaagattcaattttagcaaatatatatttgtagttggcaaatttttatttaattcgctgagtttgatacattataaattctgcattttcgtagttcgatattataaatattaaaatcatatatagtattacaatctttaaattttatgatatttctagttttgttttacacttttatttattttctaaaaaagaaagatttaattaatataaatattattaaacttgggtttattttcttttttttattcagcaaaaatttattacaaaaataatttacaaagaaataatgatacttttaatttattttgtttaacgtaaatttatttaatatatttatttttatttttatgtcttaaatcactgtatttttattagttttgttgaatcttaatatttataatataaagttaataaattattttaaaaaatataatatttatttttttactttaaattatttgattttaatataataattaaaaaattaaataattaagaaaatttttgtgttttggactcgtntaatccccatcctgccaacataaaaattttttttattaatttttataaaaatttaaaaattttacgtcgacgtgcg

SEQ ID NO: 13183 - DNA, 3353 bp, Heterodera glycines
cgtcgacgtgcgacaacggaaaagctgtcgagtgcaaaaaaggcgcgggttcacgggccagaggagccaatggacgaggaatagtgggtggcgaggtggggagggagtgaaatttgaatgatgatggtaatgcatatgtaatagttatgccattttattttgggtctcttcaattttaaaaacgaaaagtaaattttagatgatttaaaaccacattttagcaaagaaataattggattttgcctgaaattgttaatacaaattggcaccttgacttacttttttgacccaacatttatgattacttttattttgagttttttgtcttaaatcaatttttttaagtattttaattcataaaatggcatccctagtattaaagtagtgatgaaattctttgtgataatataaactatcgcattagcgggaatgtatcaatatctcgccaatttgcaaaattttcagcatgtcccgcttttgtaatagttttttatacaatttttttgtgatattttactttaccattgtgatatttattttttttatttttctttaattttcgatttttttgtgatatttatcttttaatttgctttaattttcgattttgtgatatttgtcttttaatttgttttatttattttaaggtatactgtagcaattttttaaataaattacttcaattaaaatctcttttgaattttctttattttgcgtggcctttccgttttccactttctctttttttcatttctatttgagtgcaaatcaatttccctccacgcccgttcatccaaaatcaaaatttccagaattaagcaccaaagctccccttaacgtcataattatccccgccctatcccttcccggccgtcaataaaagtgagagtaattaccagtcctccatcacttcaaacaaattcatttttaaaaaagggtctcgttaatcctcctaaaaccaaaaacgtatttaataagttttttctttaaattattatttgaaattttacgttttccgttttcttttgttttccattctttcccattcaccctatgggtgtaacatttattcccttcattccgacactcattttcccccccccccgtctgattttaatattataactcttttttaattcctttttactataaacatttaattagttttgatggaattttgttattttaatgttaaaatattttatttttataattccttatttctcatccatctctctttttcaactgtaattagcctcacttcaaataacaactcgcccggggaagagggggaatccttggatcaatcatcgcggcggagaatcaattctgacgaacgataattcaccggggcaagggtctttggtttttgcttagttaatgtaaaaaaaaatgttttttaggccacgggggcaggggtccagggccaaatatttatctggaaatcttataatgagttacattattaacttcttagtctaataatcgaactcgtcatattaaggtcatcgttttttctatggaatttcattgacattgacatttaatcattattttatttttacatattttcatattgttatatttattttgacattatttattcgtaatttttttttgagccacataaaagcactaaggtagttaaatattaatttttattttctgtataaaatggtataaaatccatgaaacaaatattttaatcaataatatccggtgctttctaaattatcctaaacaaaatattacaaaatgaatttaaaataatttgaattttagacaggtaaattatgttttgttattttatctgatcaaattggtccaaaagacttttttgatcattatcaaaagtaagcttagcaggaattttttcagaattttatctcaacataaaattgaattttggtcgattaaacattttgaggcattacttttgcaccgtcagagggggggggggggggcgtgaccaatttctcgtcgacaaagagagttatatttttgagaaaaccagttttaaaaaaaaattttttttgaggcaatacttttgcacctgactgtagttgctattattttgattttctttttaataaaaaaccgaaaaccaaactcaccggaaataattggtggaagccgaatctctagctttgatgcttttataaatgatgaaaaagtaaaaaaattactgagtgcatataaaattcttattttccgtgtattaatttctttaaaagggtggttgaatttatttaaccaaataatttttaattaagagatggtttaaaggtggtgctgcaacatttacgcctctacattcttctttttttaatttggttagatttagagttattatcgcaatatagtgtaagtatagctaatctatttgatagaaaaaatgccgtgaaatttattatttatttaatgatttaaagaatttatttcaaaaaaatagtatcgtgcatgtcgctagttcattaattgctttgttagaaaccaatattttttaaattatttatcagcgttatttttcaccgaaaaaattgatgtggatattttatttaattatggaattttttaatgaattatgtttattaaaaaatcattaattcatttgtataattaatattataaacataaaaattgagtttaatgtacttatttagtctcttctcatatgaggtttgttaatttttgtaatttattccaatttaaatttttaaatatttttttactttttttaaaaaacaaagagttcttttttgttttttttaaattaaatgattttaatacaaagatttacgatatatttatacaacagattcatttagaaatttaatttttaaaatttacgtttgttcttgctttttaagactggtagtgcaaatatttttctcatgacgttagctgatctttcttgttacgttagaaacatcgtgttttggtaattatttgtatatttttaagtaagggtttggtatttgcctttttgatcgaataattaatttatattttttatggcaatgattttgatatttgtttcatgcaataatgtgtgatattttaggtgtttattttttatatttttaattaatttttagaaaaaaatttgttttatggaatttattattatataggtaaatttgttcttttttaaataaaatcattaatttatgaactgaaacgaatatagattttgagattttaaatttttgtcgtgcttgtaatttttcaattctttttttaaatattactttataaatgaatttaatcattattatttttaatgtatgccttattttatttcatgagcaaatgatagttcttttatcaatatttacattataaatttatag

SEQ ID NO: 13184 - DNA, 2355 bp, Heterodera glycines
ttctccgactggcaaaatccaaccgcaaatatttttctaggccataaaattccgagcaaataataataatacaatgggaacaaatatttttggccaaattcgtaactttatgttcctctcatggccattttttgtgaatcattcgcccatttttaaattattacaatttcaaatggtcattcatttgctgattaattaattaattaattaattatgtaatggttcattttcccattcaattacatagctgaaatgcttaaattccaagtgacttcctccgcttcttcttgctccaaccgtttttctccctcgccccaaagactcagtcaaatctcttcttcctcctcctcttcctcttcttcttcctctttctcctcttcacatccctcggcaattggggaacacaacgtggaccgatccatcgacgaattggaggaatttatcgtacaacaaatggccaccccagcaccgtacccaactgatggcaaatccttttacgatacggtaacactcctccggcggggaggctaaaccaaaaacaagcgccatttacagaacgaatgcgccgctgctgcaagtgccgtccctttgccccgtcgcttcgcttctctgtccgatttgtccccctctttttcctcctcctcctccccgtcgtcctcttctagcagttcgtcctcctctctcaactgcggcactttgggccggagaaagtcgcccgccccgcagccgccaaagccaaaaagaatggcccccggcgaatgggtgagaattagccgggggcatttttgaagtgctgttctgtaatttacttttaaggactatttgcgcgtgtacacggcacaaatcaaaacggacacggactacaaaacgttgcaagtgcccgcgggggtcagcacagaatgcgtcattcgccagttggtgttggacaaactgcgtctgtcgttgcgcgacctgaacctattccatttgttcatggaggttcgcttttcgaatttttgttttttggccctttgaaatgccaaattttccgttaggtgcgaactcggcgcatggacggaacggaggcacgcagcattttggagttggaccgaatggcacgaccgctggatctccaaaagtgccacccggtcggaatgtcgcgcttcatcctcggcatggactcaaacgcaattttggcccgaatttacgacggcgaagtgaatccggaggtgaattaatgcaaaaaagagaaaacaaaatgaacacagcttcaatcacttaaattcaaaaagaataatagtcatagttttaagccgtcagtcaaaatgatcggctgtggtcagtgagtggctctgttcagagtgatgagcagcgagtatttgatcagattgactagcaagaatattaattagagtgaccaacattgattatttgatcagagtgatcaacaataaatattgatcatgattagcagtaagctttatgatcccaatgatcagtacttagtattttgatcagagtaattggcagtgactgatcaatgtaaccaaaagcgagtgttttgacccgagtaatcagcagagtgattaatatcagtgtggtcagcagtgagtgactctgatcagagtaatgagctgagtcaatgtgatcagcagtgagttgataaatgatcagcaattttattagtaattagtgccggatgatcgttcataattgtctttctctttagagcaactacaaatcggtgctgatttctcggcgaacgtgctgtgccgaagtgctccaaatgctgtgccaaatgagtcgtccgtcgtttgtctccgccgactgccgccttcggcccgcgcgtgacgccccctcaaaagcgcagtactgccagcagcttggcctggatgccatctccgaactgcgactgttcgtggacagtcctcgcggcgccgagtcggcactgatccccgcgaaatgcccattggccggggtatacacggcactgatgccggggcaacgaattgcactccgccgagtgattgcgccgagggcggacagcttttcgtaagaggcgaaatgcggaaaagtggacaaaaaacatcggatgacctcactcttctgttgataataaatggcctagcatttaaattattcacttttcaattgctaattcatgaaatctgtggcatttgtttataaatcatttttcactttgacccgctgactgtaatattaaatagtttttcatttattttaaagtgatggaacattggcttatttgtttttcgaaattttttaactcatttctttaatggactttcaaatgaatgcaaatgtttttacaattttatgcaccttattccaatggaaaaaataggctcaaaaagt

SEQ ID NO: 13185 - DNA, 1799 bp, Heterodera glycines
tgctttgccaatccagatttgtctcgggaaaagaccatttttttgtgtaaacaattataaatatttgctatgctaaaaaatttttccttatgcaacgattttcttgaaattttgcataggcccatattttgaccccctctatcgaatccctgtttattttttggaagttgtgtttttaactcgagatcggctcttccatttttacaagggaaaatctcggcaaaatttttaaattagtggggttttttggcgttttgtccttaggcaatttttgtcaaaatgatgatatatgcccgctgactgtaatattaaatagtttttcatttattttaaagtgatggaacattggcttatttgtttttcgaaattttttaactcatttctttaatggactttcaaatgaatgcaaatgttttcacaattttatgcacatttattcaaatagaaaaaataggctcaaaaagtcgcaattttatacagcaaatggaatgaaaaaagaaatgtgagtttttagtcaaacaatattattgccaaaagtgtgaaggatccagcgaataaggacaaaatcggacggcataatagtgactcgatttgcgtgtacggcacatctgttagcggcttcaaaaaaggttgtgagaaaagtttcagcggcctgtaaattcaagaaacttcggtaatagtttcatttaagctatttttagacgaaaaaatgcgaaaatttttgttaaattcatgttcgggttctaaagaccaaaaaggatgtcttgtaaattgaccaataaataacccacctcctgaagagcagtggccgcttgggtctccaaccggtgagagttccatgttatttcgcttatcacttcccggatcaagcgacggaacggctgccggggcatcaaattgtctgtggatttttggtacctccgaatctctttaagtgccctaaaagattaagtttgattgatgtcgtgtttgtcctctcattttttttaaagatttaaatttaaaaaataagccaagtcattttgattgttatttcttttttattttttaaaaatgtctaaagggccgatgattttggctatttgtgatttttgtcaatccaaatgaaaagagctctccatttgtggtttaggaaaaaaaaagttaaggtacatgaaacccaaacattatttaatttaccataaataaaaaagaaaaacaaattacttctcccctggtcggtaccgctttcgccgttcttcttcctttttgttgattttttttttcatgatatgaatagccggccgagaaaaactaaaaaaaaatctatttttaatcatacgcaacgaattatttacaggcaaaaaaaaagtaaacataaatttgtattttattttgcataaaaaatatgttgatcattttggtgttcctttttatggatgttattttcatgatatggcgaggatttttagaagcgaaatcccccagaagagatgctttaactaagaatgaaaaaattcgacaaacccatgttgtttttccaaagataaaaaaactgagaaaatttaggactttcaaaaacaaaaatagggaaaaaatacaaaacgccaaacaaaggaacagttcgaaaaaaatttcttttcttctcaagatagacagaaaaaaaaatgaaaaaaagcatcctagaagcttcaaaataacctagactagaaaatgcaaaaaaggaagaaaatactgtaaaatatttttttatgtttttcatgaatccacaatatttttttggtgaaaatattaactcaagtatttttagagaattacat

SEQ ID NO: 13186 - DNA, 1893 bp, Heterodera glycines
  unsure (1)..(1893): unsure at all n locations
ccgtggggtgggccggagctattttcttctatagtcgacccccccccataggggagaatcccaccccgtgggtcctataggcgacccaccccgaaaagggagaatcccaccccgtgggtcgtttggcgacccaccccgaaaagggagaatcccacccggtggtcggcctttgtcatatggtttgcttgcgtgaaatacgttccatttgcgaatggtcaaaatgtaaggcaaaagtattgacaacgacccacggagtgggtcgcctggcgacccaccccccgttgaagcaacaaactaaaaaaatgctgaagaatgtacgctgaggcaaaattggcttgggaaaatatgatggggtgtaaattgaggtagagaagtcagagaaaagtgttatatttcttctttacttggcgacccaccccgtggggtgggccggagctagttcctcctataggcgacccacccccaaaagggagaatcccaccccgtgggtcgcctggcgacccaccccccgttgaagcaacaaactgaaaaatgctgaagaatgtacgctgaggcaaaattggcttgggaaaatatgatggggtgtaaattgaggtagagaagtcagagaaaagtgttatatttcttctttacttggcgacccaccccgtggggtgggccggagctagttcctcctataggcgacccacccccaaaagggagaatcccaccccgtgggtcgcctggcgacccaccccgaaaagggagaatcccacccggtggtcggcctttgtcatatggtttgcttgcgtgaaatacgttccatttgcgaattaacaaaaaatatttcattgtaaatatacataaaagtaaaaatagttaaataaaattctaatgcgcaagaaatttattcaaatgataaaacgaagcatgatcagatgattgaaataacaaaaatattcataagtaaggagtaatacaaaataccaatgattaacataaaacaatgctaactaaaattcatattaaaaacgtatttcccacactcaacgatgtctttcttcctaccccgcatttcattcatattgttgtttttaacatctttgagcattccttttttgttcgtcattgcctttgtttccgcacgcttttgtgggttggccttaagagatttgagttatattttattgacttcaacaatactgactcgagtgcgtttcttagccactttgcttttcttcttttgcttatccacccaaggcttcacagaaataacgtttccatcaattttatgaggatcaaatgacaaaacagcagatgactaaaagagatttattgctccaataatttagaaaataaatacctgattttgtgtctcgaactcgacaaaaccaaaaccacgagagctttttgtttttgcatcataaacgacaccacagttggtcactttaccaaatttggaaaagtatttgtttaaagaatcatcggttgtttgaccagataaactaaacacggtacaagtgatacaatgttacaactaatatatgaacgacaaacccaacaataaagattttgtggttggtattgttgttcccagacaactggccatcggatggagtcgaggttgcggagggatgactgctttgttcctcactcatcttgagatagaaaatgaccgtcggatggaatttagaatttaaattatttcaataaatatgaggctaaaattaaggaaatgaattggtaaattgaaattcaatacgcgcgaagttgngtcagatggaacagcaaactgaaaaatgctgaagaatggacgctgagccaaaattggcttggaaaaaatatgatggggtgtaaattaaggtagagaagtcagagaaaagtgtaatatttcttctttacttggcgacccac

SEQ ID NO: 13187 - DNA, 3052 bp, Heterodera glycines
gcttgccactataaaaaacattttggaagttggccactaaaatagttttttttgccactaatttagcattttgccacctatttttcactattccgacatttttttgaaaaatttctcaacaaaatgcaagaaaaaaatacacccctaagaatgggtccacctcgtttcggcgccagcccagtttttggactataactttttctttatcaaccaaatctaacttttggtatcattcgaaagccctaagtgttctctattagcatgcaaaattgccaaaaatttcattaggtttaaaaaaaagttatggtcagaagaattcaaaaaaccagatttccaacttttttggctataacttttttcaatcttaactaattttttcaaaaatttttgcaagctattcatccctcatttttttcttgtcaagaattttggatgtaaaaaatgtcaatattttctaaaatattagaaggaaatgtaacctcatttgcaacagcacccagtgaataaaaaaaattttgctcaatttttggctgaaaattatgtcattatggatttttcgccactatctttgccactattttggcatttgtagtacttttactgtcgattttgtttgttttttgaaaaaaattgacggcatataattttctgaaaattctatttatccccctgggggataaatggagactgggggattatttttcaaacccctcctagactgggggataattggagattgggggattaatggagattgggggataattagagcaaatacggtaaatgcctgtgccggacagcagcaggcgaaaagtgccgaaaatcacaatggaaacggggcaatggcaattaagcaggaacattttgacgaatgatttgtgtctttaaatattatatgttatttcttgcctttttaaaatttttaatttgacttttgtgatggccgagttgagacggataatttatcaaaaatcccatgtttttatttcaatagttttctttgttcttttctttttattgtcccatttattcttaaagcaaaatttaaactttacttaactccgattttttcagagagccttttaaaaatgccaaatgttttgattttggccccaattatgacgatattcacttttaaattttgtttcaaaaagttgagaccgattcattctcacgtttaataaacgctgttttatttacacaatgaaaatgatatgttcgatattgcagatcattatttttaatgggtgagaatttgctgggaaaacaaaaagcattttgagaggaaaagtaattgtcaaaaaatagtgaaacgaaatgaaaaattaaccggaaggctaattgctgagatcatttctggcaccattctagcctaatggccatgccattcctcgttcatcgctttcagggccaaggccaatacggcttggtcagcattaatcgactgccaccgccgctgcggcggtgctttcggccgcttgtgccgccgctggtcaatttgcggacggcgccggtgggcacgcgtttttcatgcgcggtcgctccgtcgatgacaccgtcggcgtttttcaaactgcgccggtgatgccgacgtcgttgggccgaatgtccgagcacaaaatggtcgtagtgagaacgatgacgacggtggtggtgccggtggtggtggacgtgctgcggactttgccgctgttctgttgtaccgtctgcgtcaagttggaacaactgaaagatgcttgagtataataccaaagggccaaaatattcagggggaaacagaaaacaaatagccgctgggatttggcaaaatgccaaaaacgacggtcggacggatggactggtcaaatttaaaaaatattaatgagagacaaaagaccgaattcgctagtcgaattggccaaatgccaaaaatatttattgggtttggcaaacttggcatatagaaaagaaagacaacttatgaaatataaaaagctctgtccaccctgacttgtacacttttccttaccttctcaaagtctgtcggaagtgccgctgatgtttttgtcgtttcgtcgttgatcagaatggcattttgtccgtcgtcgtcgccattttctttggcaaaagatggacggcattccgttgttggcaaaatgtgtaaaataattgtgctaattgtgaacaaatggagaaggaatagtttggcactgctggtgtccgtttggggcgtttgcttctgctcctttggcagcattttcatttttgggggattttcgctgatttaattctgtgaatggcggagagtgagtgaattaaattcggaggatacaaaattatttggggaaggatttgaccgccggggcggaaatgtcggtgaattggggaattgggtgaagatgcgcccaccggcaacagagagcgaccattcgccacccaataacctcattaattgaccctgcaattactcccccccccgcgccatcccaacggatgacccgaaaccaaattcacgcaaaacaatttcaaaattagttgaaaattgcgtttcactgttgcgcaatgtgcgcatttaataaaagggaaaaagggaaagataaatttatgtaaaatatcatcagtcaaccttttgaaatgaggctttatttcgctaattgtgctaattaagcgggcgctaaagcacaaggcaaggaatgttctggaagaataccattcgcacttgtggagcagcagagcatgtcatcattaacacatcactgttctctgtgctatgggaggtcacacaaaacaacaaaatttagaggaaaaggcggtgggagggagaagtgattagtgattgctgctgcttctttgctgttgctaatgataataatgctaatggtaatgatgatgatgaggtggtggtgatgaactttgagcagcattggccctgggggggggggcaaagcgtaaatattttgttgcctttttgtgctgccagcagatgaggaaggagaagaagaagcattcgttgcttatgatgtgttccaccgccccccccctaatttggcctaattattcgctctttgtccgt

SEQ ID NO: 13188 - DNA, 1519 bp, Heterodera glycines
accagtcgaaggctctcctctctcttggacgctttgaccataaaaaagctaactgtagccgaattctctgccgatttgttcaaaagccgcagaaaaaaattgttgagagaatttcaaagcggtgcggtgagtgccgagtttatcctttggacacagcgtccggaaacagctcctgtaccaaaaaagatttgcatgtgtggctcagtggtttttgtaggaaagtcaagggacaaagggcggaggttcgagtccgttgtgctacatgaatatttttatttatttttgtgcaaaaaattaaaaaatgacgatttttgggaattatttttggaggtttttaccaaccaaattggtccatcatggtatcattcgaaagctcctggtgaggagaagctttttctaagcggatgctaaccattttgaagcattagaaaaaagttatgggcgtttgatttttgttttttgaataacttttctaatcgacccattttcaaattaatctgacctatcattagatgcagaaaatttttctctatcgatatataaaatttggttggatttaacaagtagaaaaaattttaaacaggatgaagcaaattcggtttttctctattaatagagatgaagaaatagtacgccaaaaagagagatatctttttctctgcactctctatttattggtacacatctcgctttttcggacggtgtgtggaggaatcatatcattcttaaaaaatcaaaattcccaggtccgtgtgctgatcgcttgtgatgtcctttcacggggcatcgatgttttggacgtcgattgcgtgatcaattacgacctgccgataaacgaacgcattttcgttcaccgagctggtcgtactgccagagcaatgaaagaaggactactcgtttcactgacaacaaaagaagaagtgtgctaagtgactacattttcacattttactttcccacatttttttccctttagaaaatgaaacttaaaaagttgctgtctccgcacaacctttgggagagcattcaagaaacaaagtccaatgactcggactttaacgaagaatgcatacagttgtatgaaaacgcgctaagaaagttgaaaaaacgatttgaacaaaaataaatgatttacataatagcttttaccctgttgttttttagttccatattgttattttcattttttctgttattttgttacccacccatctcaatttccatcgaaaatctaaaagttgttctcgtggtggcggttgtggtattttgatcaaaaggaaataggatttttcataaaattttccggcacaaaatttaattgtgaaattttaattttccaattacaaaatttaaaatcaataaaatttgcattggtatatagaccaacaaaaacaacgtacaaacaaactatggaacttttcaaatttttggaaacattttcaagccaaaattacgttgttttaggtgattttaattatacaaaaatgagatcctggtatggaaggaagggcatccattt

SEQ ID NO: 13189 - DNA, 2539 bp, Heterodera glycines
ttttttccctttagaaaatgaaacttaaaaagttgctgtctccgcacaacctttgggagagcattcaagaaacaaagtccaatgactcggactttaacgaagaatgcatacagttgtatgaaaacgcgctaagaaagttgaaaaaacgatttgaaaaaaataaatgatttacatatatagcttttaccctgttgttttttagtttcatattgttcttttcatttctcctattattttgttacccacccatctcaatttccattttccattgtcttgttccttttttcagaaatattttggtgaataaatattgtttaaactaaataatacattattttggtaattaataataaacgattcctaatcgattttgagtcaattatttattgtcaaaggcaaactgtttcttctcattttgtagttcgggctgactttagtgatttatttatttatttttttgattttctgtcagatggatggccgtaaccataaccatgcccatcatcacgaatcccacgttcaaatttcgaccaattcgctgccgccggccaacccaatcgacggaattgtaaattctcttccggatttgaatggtaaaatttgtctggcgatagtcatgaaatatataacgtcgtttttggtgcattaaatcataatcactctactttaattccatggacggtaaaaaacgaaaaaaattgccaaaaaataattggcgtaaaacaaaacgccaacacacgcaaaaacaaagtatatgcacttacactggtaaatgccttttttgtattttttattttgatcagccataacacgcttcattcccaacaaaaatgaacaaatttggtatctaaaaaaagattttgaaaaggagaatctttttctaagtgaatgctaagcaatttgacatctcagaaaaaagttgtgagagtttcaaatgttcatcacgttataactcaagtcctaggcagctctttctaaccaaaatgctaaatttattcttttttctattgattctaaatgttcaaagtgattttgtacccttataaccaaaattattagaattttcgaatttggtgttttttgtgtgttagagatgtgaaaatagtacgccaacacgagaggaaaagaaatgcaaaaattttaatcactccataactttttagttaacccactttttattcataaaaaccctccaattatgttcgtaatttttttctctatcgatatgcaaaatttggtatggatttaacgtgcaggaaaaaagttaaacgtcacgaagtaaatgttgttctttacattattaagaatgaagagatagtacgtaaaagtgagagaaataaagataaaaagtaaatgtgacagaacgccaattttttcccataatcctatataataaagatgagtgtttgtatctgccatgctttgaattggcgtggcgttttgttattattttgcgttaaaaaatgatttgaaaatgaaaatatttttgttttgttttgcgttagaaaagcatttgaaaaataaatttgttttttgtaaacgaaaaaatttatcagtatattgtttgagtttgatttagtggttgttgtttgtttatttgtttattttgtttttgtgttctttacgtgaaataattatgcttatgcttaatgttatttgaactttaatgaaatataaatgcatatctttggtttgttctgtgactttagtgtgagacactaatgtgtgtcatgcttttgaaaagcattagtggtttgttctgtgactttagtgtgagacactaatgtgtgtcatgcttttgaaaaacattagtggtttgttctgtgactttagtgtgagacactaatgtgtgtcatgcttttgaaaaacattagtggtttgttctgtgactttcgtgtgagacactaatgtgtgtcatgcttttgaaaaacattagtggtttgttctgtgactttcgtgtgagacactaatgtgtgtcatgcttttgaaaaacattagtggtttgttctgtgactttcgtgtgagacactaatttgtgtcatgttgtgccataaggaaatgccaaaaaacaaggagatgatgaaaatgccaagaatgttgtgccataaggaaatgccacaagaaacaagaagagatgatgaaaatgccaagaatgcaggagaatagagtcccagtgattgaaatgcagaagaattgagtcccactgattgaaatgctggtggattgaatcccgttgattggaatgttggtgggttgagtcccattgattaaatgatggtggattgagtcctgttgattggaatgttggtgggttgagtcccagtgattgaatgctggagggttgagtcctgttgattggaatgttggtgggttgagtcccattgattaaatgatggtggattgagtcctgttgattggaatgttggtgggttgagtcccagtgattgaatgctggagggttgagtcctgttgattggaatgttggtgggttgagtcccactgattggaatgccggtggattgagtcccagtgattggaa

SEQ ID NO: 13190 - DNA, 1386 bp, Heterodera glycines
  unsure (1)..(1386): unsure at all n locations
cctaattcaaaaattgactatttntggtttaaaatctattaacaaatataagtaacatctcaatttcctaaattttcggcgccgacggacccattctcagcatattaaaaaatttgaaaaataatatcaccgagaaaatatgattggttttcattatttattttatgattttttattttcagtagtaaattttattttttgagaccaaaaactaataaatctgttaaaaagcacattttttaaaacaattaatttaacttctgaccttaaatttattttaaatttcaaaaatgcaagtctcgacaagcctggtttttcctgggcctgaattttcctgatttttgtcctggaaatgcagatcaagatccaacaaggaaccctggtccaggcacacgcttttttcaaaattttgaactctaattattgtattaccgttagaatattttacaaaaagaaataacaaataaaataagaaagaatttattctcacaatttaaaggaaaaatgagaatactaaaatgaagatacataaaatgctacattttacgatttaaaagaatatttaaatgatttttttaataattttgtaaagaagaaaaagagaggagccccagttggttactgtagcgatatggtaaagacagaatttggaattgctcttcctgctgcttgtgttctttttccagcgatctttctcaccgccgatcatgaactcgtggtaaatagtggtgaacactcctcacatcactactgtagttaaagcctggcaatctgttgctcgtgctggcacttgaagttggcgccatttcgatgtcattggcaccagccgaagccgaactggtcgaagagcggtgacaagctcggctcaagacgcagctgagcaaagctaaagcgatgattcccactacgacaatgatccaaatcatcatgttggtggtggcacgctttttgcgtcttcgtctgcgcgacgaaccgtcgccattggaatctgtgatgaattgaaaattaattaaaaaataaatgtttaaatgattaaattatactttttgccaaaatttccatcgtcccattgtttccgtcgccaatcgctgccaaaatcgttttcagagtttcgcgctgattttggtatgtattttcggtgtttttgctgttttccttttcatttttttcatttccgtttctttcccattcttttggttcccatttttcgccggtttttttagagtttcagttttgttttttttttcaaatttgtttgctttgtcttccgttttctcccgttggcttttcgtccgtttggctgcccgttcctctgctttttaaaaggtttttcttcgtctctcnnctgctgctncntcccttttagaggtataatactttaattat

SEQ ID NO: 13191 - DNA, 1491 bp, Heterodera glycines
ttgccaaatttccatcgtcccattgtttccgtcgccaatcgctgccaaaatcgttttcagagtttcgcgctgattttggtatgaattttcagagtttttgctgttttccttttcatttttttcatttccgtttctttcccaattattttggttccaatttttcgccaatttttttaaaatttcaattttattttcattttcatttttgtttgctttgtcttcaatttgctcccgttggattttcatacgtttggctaacagaaacactgcttcgaccgcattttttcttagtctctcaactgctgcttcatcacacacagattctaatactttaattataattaaatttttaaattaattacccaattaccattcttctcattaattacttatttacctcggtaattaatttaattgcccatttaaatcatccttaattaatttaattacccaattaccttctcctccttttatttctccgagttttgttcttaaacttaagtaaatttgggccaatttcgcgtcttcccgttcttcgattgcttcacatttttctatcactttggccatcgtttcgttttggtcctccaatttttggataaactcgcgcaattccccagtgccatcattttctgccaatttttgctcataaatttggcggtcgatcaataccaaattttggggctttgattttatcacggaaaaaattggttggggaaaagcaatggaacacacaaaaaagacaattgccagcaacattttaagcaactaaaagaatgggtttttaggctgtaatttcggcggtggcgatgggatttgctgggcaaaaaatttggaattttgaataaattatatttgaccaaatcgatgcataaacgattggaaaagtatatcaaataaaacttattctttttgaaagaaaattatggtgacattaaaacaaatgcattaataggtttaaacaacgaattaaagccttaattagagaattaataattcgtttgagcagctgaaatcaaatgatcaattgtgaataagaatgaacagaaacttgtttgaagatgcggaggtttgtgcaaaaaacgtcacagagatgatgatgtctgacaaattttaatgtcatagatccagggcatccggctttttcttcataaatattttgatagaagatatgttttataaaaatggagacacacatccgatctgagggaaaatgttatcagtatggatgagtaataaaaataatacatgtgcgatatggtgagcatttttttatgagataatatacaacagagtatgtatgtatgggtaaccgctcacttcttaggggcatgatgtcacatgtaatgggcgataatgtgagggaatcagtttgaaaatgacatcactatttttattaattttaatttaaattcatcttctcataaatatatattatattctaaatttaaaatttctaataaaaaaaataaatctaaaagggtcatcttc

SEQ ID NO: 13192 - DNA, 1393 bp, Heterodera glycines
aatactcaaaaaacttttcttaaaaacatataactttgattaaaagtaaaaaaatgtttataaacaaacataaaattaacaagatcgagttccggatcagaattccccggtttccagggtgaatggtaaaacttttaaatctattttttatatatattttattaaaattaacatagcaatacttaaatgctttttttaaacaaatttgatgattttttttcggtacgcatgcgtccgcaaggagcatcattttgtagtgtgccttgttgtttttttgtagcacgatttgcctttttgttaaaaactcaaaaacaaggcacatgagttaatatatccgaaaaaaccaggtaaaattaataaaaaaaaatcagcaactttttttaaaaaggttaagattgaagcagaaaatattaaaacagcacatttatcaaaactttgcatttatttttaaaagagagttcgcagcgggggtgagacagaatgccaatttcctttttatgattgccaattttcgacaatccatgacttgaaatgccgatttctttggatttaagaaagaattttttgttttacataagatttttttcttcttaatagggtagatttttaatgggtattttttaaatggaaatttgaacttcgttttttttagttttattacagggatatgatttgtttcgacaaaacaaaataaataattaattaagaaacttttagcatattttgtgctgatagtctttgtttgaacccacaaaattattggccattttattatttgagattttttgctcattaaaactcagttcagtttaattggacaattaaaacatgaacaaaaatgattaaagagttcaaatataaatatagttcatttggcaaatatttgcctctttttatgctcaatttcatcaaatcaccagttccaatttatcctaaatttatttttttttaattcgcaaaattcaattggaaatgcccaatcaaaattctaattaatttcaaatctttgattcttcgataattttttgctcatacataaatttcaatacgcggattgatatagtaattaattttaaataatataaaaaattaaaattactgaaaaacagttaaaatctgacaaataataataaaagtattgaaaaacgaataaaattacaaaaatatttaatataaaataatcagacattataaacattcaatttaaatatttttcaatgccataattgtgatctctgttggtcagaaaaagaccgagaaagttcttttattcacaaatgcatttataaacattatcaaattatttaaataaaaatatcgaggcaataaaaaataagagagacagattttctatatttaaaataaaattttcaaataaatctttattttaaat

SEQ ID NO: 13193 - DNA, 850 bp, Heterodera glycines
aattaacatatgcaaagattagcatttttaatcgttcagtgtaaatcacccaatcgagaagcgttggccaaattttaattttacaattagtaactgaattaaacaaagagaaagtccatagcaaatgctttaataagcaattacaaacagattttttatctattacgtcagcacctataatcttaatattcatatgggacaaattatttaaataattaggcacttttatagcacaggttgctaattgaaaccaaggacctttttgtatgcaattaatgccttaagtgcaatagaacgatgagcacctggacgaagagttcctccagcagcttttcggttacttgtccatccaagtttcgcaaatacactgtgcattcctgctgcatattaacgtgtccagacatattcaaatagaatttgcgcgtttgtctgcttaaaaatagtctaatttctttataaaattatgaaaaaccaaagggttttttttatcttaaaaattgcgaaaacgtgtttctaggggctagcgttatggagtcgcagatcacaaatcataaaaccattttggactactaattcggcattcgggttagagatcgcgaatagtcaatgagtgttagattcgttattttcgggtacggtttcgaaagtttcgggttttgcgttccggataaatttttcgtttcgactttttgtttgtatttttttagattttccaaagataaaaaaagtcaataaaaacgagttgtctagttgaatgtcgttcattctcggacggacaatacagtacccactggattttagatccactccatagaagataaagataaaaaatcaaatcataattatcagg

SEQ ID NO: 13194 - DNA, 2637 bp, Heterodera glycines
aaaaataaatcataaatttgaatgggtgctttagtgggtcaacagtgagcttcactgctgaaaatcttgagaaatttttgacttgaaattgcaaaaataatcgataaaatttatgagaaataaaaatttttaaattaatttgcacccctaattttcaagttttttgtgcatatttggtgcatatttcacgactttatttgcatatttatgcgcatattttggctacttttcgtgcatatttttacagccctgataattatacacatgcggaaaattaaattcaagtcgtctgacagtattctcaattgacattctttcttttgtatttaatacaaatttttaaattttacatttacaataatccccgaattgtattcccaaatttccctcccgttcttcatcaactgttgatcgtgctcttcttgttattttccaaccgttgatcatcctcggaagctgttcattcttcacaattaatgtttctgaaactgtcgttctatttccaaaaaaacaccaaaattcttacgcaaattcaaattttctcacctcggcagtcgtggcgtgcacacctcaatccaagcacaattttgtcccaccatgtcagctctgtcttccctttctcatctgtctcttttttctgttcctcctcttcgtttgcttcctccgctgctatgccaccgacgtcaatgatcggtgggagagatcgcgcgccattccctccttttcgaatcgctgcaattgtgcggcccttcgcttcttctctctgctgctctgccttttctgccacattttgcccaatttcttcctccgtcgttccattctccgttttcccattgctttcattcgctttttcctccactttttcacttttactttttgcctcttttctattgcttttgtcctccttttcgtcgtttgcatcactttcactgatcgacaatgcttcttcattcgcagcagcgggcggtggactaaaagtgagtttggcttgctccaacttttccgttcctttttccgtgccgggttctccctgttgatggagctccatttgaacgtggaaatcgtttgcgtcgtcttcaatttgcgtgattactgtatccagcggaaagcggagctccgtcacatcttcgacggaatggtcaaatcttagagagagaggagagaattgcaactgatgggtctttgaagctgtgccgtttcaaaaatgaaccaatccgaaaacccatcaaattattattctttgcttcttcctctcactttgtctctttttcggtcacttcttccgatgccaacttttcttctcccttctgctgaatgtgcggttgtttatcagcgtcaccttcaaatgcctcttttagtacggcattttccggttgatttgtcttttgttggttttgttgttgttttgggatttgttggcgaagggattccgagggttcgaggtaaggaaaagggacgcaaaaagaaaggtgtagtaagagaaagcaagagaacacgtaaattcgatgtaaatgcatctgaaatatattcaagcccaaaaaatgttgaccaatttgggcgggctttacaactacagtcgaaaatcgtttaagatttaagctggtcacctaactcaatgtgatcaaacaaagccaaaaagaggtgggagcccccgcttgacgctcattggcataatacccttgggcttctcatttatcaaaatgaagtttgtatcgatttatcatttaattaagtagtaaatgcatacatacaaagacaactaagttaagagggacaaacggcggcggatgatggatgggcgagagtcacaagaaaggccaatgagagggagggggaggggggggggagaagcatcggctgagagaagggttggatcgacgggagggagaaaaatcagcaactaattgacagcaaaggccaatcattggaataaagcaatgaccaaaaaatacacgagaacgtcagagaattcaaaaatttggcaaatatcctttttcaggctcatcattttgttggccatagcagcagctggtgcattgatcctcatcgtgtcgtttcatgtaaatacttttttttgcagctttattttgatgagaattgcggtccagacaaatgtggcaaatttattatttcactatggcctgaaaggcacgaaaacatgtttttttcggttgttgttaagctggtttttgattattagcaacattttctagtttttatttttatcaccctaaaaatgttctgaaaaaactattcaattattttggcgttttgccacttattaacaaaaatgggctcttatacacggcgggtggctggacatttcgacaatgaccgtttcgccaatgaccgtttcgacaataccttttcgacaatgccgtttcgacaatgaccatttacgactatatcatatcgccaaaatttaaaatatcaaattaaatataataaaatgaatataaaaaataataaataaatttaaaaaaatatcaatgaaatttaaagagaaaaaggtagttatattttttaaatttaatgaatgcattatctatcgcctattgtgtatgattattaatagtgaagaaacaagacaaaatgagacggacctataatataaatccaaaatgaaacccatttatt

SEQ ID NO: 13195 - DNA, 3511 bp, Heterodera glycines
cgaatggaagattgattattttttaaatttgtttatgaatgatgtgagttctttgatcgagtttaaccaattatttttgtctgggcctttctaattaaagtactccgccaagtggagattataaattcgttcttctgttttaaaagtgataaaagtgaattttattgggtataaataaggtagagagagattttttttgaatattttactcaaaatatgttattcgtatttctcttctttgccactttgtttttcgaactatcaatcggaaacttcatatcttccgaatcgtgcaatggttcttatattgtttagtttgattaccgaaatgtgcataagcaactaacagtcctgcagatggcttttgattcaaaatgggaggagtgcgcaatcacctgctcagcattcgatcgacatttcgcctggactaaaacatgtcgcccaggcccagctggacaaccttgatgcctgattgagtttagtcgtggccgattaactgctgagggtgcctgcccttcactttacgtgggattacaaaacggcctaagcacaccgaatgatgccaacataaatggataattggttgtcttctttgccatggaatcatgttgagctgttgcagaacgaaagtgttgcggtgatcaaggaaaagaattactgcgtataggccagtcaaactttgttggatgtattcttaatttatgtttaccggaacaaaatagtcttctccaacggattaacaaccgagccgatcatcatgatcaccaccaaaatctctaggtgtgccacggcaatggtttaccattctgcaagcaaatgatcagaacccggagggcttaacagtaaaacagggaatttaaatttaaaaaaattgattttaagtggcgatgcagtcattgtcgaaacgcaattccaaacagcgaaagttcataacgattttcacccagatttggttcttttttcaaccatatgcatttgtcactaaatacttctgcctattattgccgaaaacaccattattagtgatgggtgggacaggatatggtggaataaataacatgcagcagcagtacaaccatcgttttgtaaatcaccaattatacttcgtagacccagcttactctcaaatacacacccagggaattgaagcgacctgaagggctctaaatcaaagcttaaaacaaacaccttcataggactaaccctgaattgttgcgaacctatttgtaccagaacgcatttcgtggttaccacataagcataaaaatattttagagaaaatacgtacaactatactgtttaaaatattttttcctattttttaatgtttatttgaaataaaccaatttggatgggaaaattgggtgggacgcgtaaaatgtcaggggacgcgtaaaatgtcatgggacgcgtaaaatgtcatgggacgcgtaaagtatcatgggaccgtaaaaccgactagaaccggctttttttgcttcacttataatacccatttattttttatttctgatatcgtttcttatttcagttttttaattcgttttttaattacataattcttgaatttatttccatgaggcaaattctgtatcaaaaaaaaaaaaaaaattgaccaaaaaaagtgaaaaagttttcaaaatcgaccacttttacagtagcgccaacattttcattgtaaaaataatcagattcttttgcatttggtttaaattttaaaaatgaatttaaaggtttgacatcaatcgacagctcaaaatttttgaaacaaataagctattgctaagcgctgtaacaatttttaaatctttgccgccatatttaaaccgcgaaaatttttttatgaatttatctttttcacattttaattttcttcaattttttaataatctaagagcttgtttcgatattttgggttgattttctaattaaaaaatatataaattttcagttttcacaaatttccatttacccgggcagcacagtgattgtctgcaaaaatatgacggctgaacatagggtcaacatttgccaaacatggagcacaagcggcggatgctgctcaaaaagcagttggaccgaaaaactgacgggcccaatcattgaggacaaaagaattggccaaaaagtgcactgaattaaattttttgaaattattgaattaaatttaaaaaatattttttaattaaataattattatcagaaagttaatttcttttaattgaattttctaaaaaggttaattaaattctgtgcaatattttaaaattaaatggaaaaagaataaaaaattattgaaataattttaatttatttatattattattaaataatttaatttttgtttattattatttacctgaaatgcatattgtactcgctgagtgctttcacggtgacggagcccggaattgaaaaaatgataagcaaaatggagaacagtggcagaattgaacagaattccttaaacaataaatgaaacaatgttttttaaatagctaattattgacagaaatattttgaaggggcttaatgaacttgaaaataatgcttataatatgaatattgttagtccggaacgggatcccgaccgagattggtcccggaacaccggctattcgtgtcccgttccaaattaaatccattatcccatcccgacccagaatttttgatcacgcttccagttttcctcctaaattccggaaccgtctaaaacctatttaaagttttaatgcggcataattaaggacatttttcatcttatttaattaaaaaaatttattaatattattaatttctaaatttaaaatcaaatctattaaaaaaattttaattgagcgaagaatttgatttaaggacgctgcttttaaatcaaggacaaattgccgtcctggaaattaatttaaaaaatataattgcacaccaaataaaagtgtgctcaacgtgacaatgttcaacggaatgtggaccaattgttggccaattgtgcgtactgttgtccacaaaagcatgttggtcagcaataagcacacagcagttgccggttggagaacattgagcagagcggacagtaccgataaggtaattaaagcggagttaagatggggaataacctgtaaaaaataagcgaaattaaatttaaaaaacaaatgtaaataaaaaataatataaataagaaaagggatctattaatattaacctaatttaaaaaagggacccaactttaattagccaattaaatttaattaatatattaagaaaatagacttattaacacaacttaaaaaggagaaaaaattagccaattagtataatcacaaatggacttattaacgtaactaaaaagggacaaaaaattaattagccaattaaattaatgtaattaagaaaagggacgtaaaaatttgtttaaaaaattaatcttaaatgtaagcaacaaagaggtatataatagatttatttaattaaaaatttatcataaataatgtatttatatgtaataaaaaaagac

SEQ ID NO: 13196 - DNA, 3369 bp, Heterodera glycines
cagagcagcagctgatcggaccgcgatcagtctaaccattttgtccaattgtcatcaaatttgtccctccgtctgtcctcccaattttatgcgctatttcgtcccccctcgtctctctctcagtctgtctgtctctctctgttttgcatattattttctttgccgtttatctctgctgtgttccctcctcactgatcagtgatcaaacccatgggacagatcaccaccaccgcatgcatatttagcaaataaaattattgtggaccaattgagttaacaaatgaacagctttttaatgtacaaaatggggaccttttggcactgcctttttggcacaaaaaatcgttttggtcaaccattcaaaactccgatcattgaaaaaaaaaatctcgggaaatttttttgtcttgatcagcactaccggaagcgcctttccatgtttagggcgttgaggcccaacagggcgaaggaaatgtgggcaaagggggaaacggcgccggagggaccgacaaaaagggcagcagaaagaggcgccacggtgatcagacgacgcattagagacggataaattacttcagtatctctgtccatttatttaattttcttcgctaattaatccgtattttttttaccatttttttattgtttttttaaattgttttcccatttttgatggcatcaaaaattgttccaattgccgtttcgccctctttcaactttctgcgccgtccgttgccttcgttggtctttcgtcgttctcttttcaagccgccattggacgcgccgttctgtggcattaaacacggcgatggcaacggtcgaaagggcggcggacgcgcgggcaattgatgacaccgtttttagaagaattcccaatggattggcttaataaattgggatgatcatttcgcgtcgattagtgttaattgtctgctaatggtgtcatcatttcattcgcaccaaatgactaattatttttttggcatttccccccattcccccatatttttccatttgttattcattcctttttgttttttcctcgtccgttgtgaaaaaattgatcggaccaaaatgaagtcaaatggccggccggccacccatcactttcattcattcattcgttcgttattcattccctcatttttcattgggatgaacaaaataaaatctgtaaatggttgtcaaatatttgtaaaatttaaccaaaaaaaaattattttcattcaaattccaatttttacggtaaaatgaaaaagattattttaaaatgccaatcccggcgggagtgtcgactttgcttttgcacgagaaaactttcgggtttttttgggttttcggtctcgagaaattgggggttttgggcctaacaaataagaaaatgagaataaatggcttctgtatagagggtgatccgcagtttgacaaattaatttgcgagctgatcaaaggatgagtgatcaattagttaagccgatattttcattttaaatttaattttgagcgattttctccaaagtccgccgccgaaagtgcccacaatgaagaagctcttcagcgaggtgttcatcatcgcactgctccaactgctgctaatgatggccaactttggccatggcgcagaaaacggcgcgtcaaaaattgaaaatatttaaaataattaaatataaatttacaaattaagcgacgcaaggaaaagctgaaaaggaagaaaagccgaagaacgacactgtggaggagaagggagtggtgtgcttcacggaaggggacactatgaaatggggtcggcatttgggaactctccccacgcataaaattttatttgcatcgggattagcgggattggcacgaaaaagctcgagaattgagcaaagatccgggagcggaccgaaaaagtcagagaaatggcccaacaggggtcgagatctgaattgacattcgagatttagccaaatcggaaggccgggagacttaattggcgagtttttattggtcgagattcttcttagcaaaatacagtagtaaacgtcagactaatcgaattttgaccctagcaaagagaacaaacaaatggccaatgctttaaatgctttcaaattatacaggaagatgccctccgggcacggaatgcatggaatcgaaatgctttaacggtaagcaaatatctcactgggtttaaaaagtgttaattagccctaattgcaattaattaggcattggctacgaagtaacgaagggctgtaccacgaatgggaaccgcacgtgcgaaatggagaaaacgaagtgcgaagcggcggccaagggaggcaaaggcagacacgagaaatgcgcagtttgcgcaacgcatttctgcaacgataaaatcagaaaaggaggtgaaagagagagaaagagagagagcacaccgatcagagcagacagttagagcaagaaaaacaacaaaaaatgcatatttgatcactcactgatcaggcggaattgccgaaattgggtgatcattttgaaatgagacgagtctgatcaatagttaatgatgtgattgaactattttatgccaacgaatttcgttaaaacttaggcttcttcggctgatcaggcataggccacgtcttcggctttagatggcttcgacttcgccttatactatgactatggcttaggcttatgccaggctcaggctaggctaaggcctaggcttaagctaaggttttggcttaggctaagccctaggcttaagctaaggttttggcttaggcttaggcttatgccatgaccaaggctttggtttgtaagtcgtgtcggtcgaccccgtgggcgcttatcacgtatgctttcagataaactgaaatgctacgaagagcagttggtcagctacaactacgacgattcttccctgcgcacctgcttcggcgaccagtgcacctcactgttgtgcatttacggtgtgtaccatagagagtgtgtcggaatgccggtttccgattgccgacatttttttagcttttggaatgccgtttctgataggcacaaatccttagcatgaaccccgcctccctccatgggatgggttggaaaatgggggcctttctctttctttgtccgagcctcgagagtcgagaatttacattttccaactttgtatcggccccggaacaagtgttgctttcccggttgcaattagcggatgcaattattgctaattaagtgcgcgccaacaacaacaccgccttcaacatcacgcgcacctgtgccacgggcggaaatccgtcgtgcgaatggatcgccggcgaatgtgtggggcagcggtggcaaccgtccagtgcagccgtgcactgagttcatgtgcaacacatgcacaaccgccgagca

SEQ ID NO: 13197 - DNA, 1110 bp, Heterodera glycines
atttcgtcactacctaacacttcgtctaattcttgggctaattttcaaggaggaagattcgctgatgtgacaatggcaattttgacattttcatttatcgacaagagaatcgccgccacaattgatgcaacataagtcttaccaactcctggtggcgcattttgatagatcaaacaacactcattccctaacaacagtttggccgacactttttgcctctcatttaactttctcatcaacgggtgaaactcttgaactgccggcgcatgacccaaaatctctccctgttcaccaaccagctgttctcgtggacgacccattaatgccgtcatcagctttcggtggagagtttgatggaaaaatgccagaaactgggcagcggggagagaaatgccaaaaattgagggagtgccggtaggaagattacggaaacggaggtgacaaaaattgggcgaactatgcctgaaatctcaaaaaaaaattaaacgaaaatgccgggggcacaaaatgacggaagggattatatgtttgccatttttaagcatgtttcctcgtccgccaaggtcgacattggcactgtgccatcgtcggaaaccacggcggcagtgtctgccaatggtacggtggccactaccggtgccaacggcacatcggcggacaatgcgacggcggaaagttgggtcggcaagggatgtgtgagttaacaaaacgctaattgattgatccgagtttcgcactttggcacagccaacagaagagtcgcttctccaattgtacattaatgcaattagggagataattaactaattgcctccttggcttgtgattagttattgattgccatttccgactgtaatcaattaattaattaatttcctgcccattttcagggcgcatttgacgtcgctgtgccgccattggtgcccattgtggcggccacttttggttagctttttccactaattagccgattataatgattattctaattgtaattaattttaaaggttgttttgcggcgcttcagcaacttttgctgctgtaagaagtgcgacttggggacgaaaaggagcattaaaaaagaaaggattccaaaattgccattttaaa

SEQ ID NO: 13198 - DNA, 2790 bp, Heterodera glycines
  unsure (1)..(2790): unsure at all n locations
atttaagaagtgggaccgggtgaaacagcgcattcggtcggcactgtcctcacaaaaactgctcgccgcttccgtgcacatcgaaggcgggatggtcgagggccaaatgctgcagcaaaacaccatggccatttgcgcacacttttgggacacgtcggcccaaagtgcggagtgtgtcgggctcagtttgggccctgtcggttactccaacgacgacattgcggacgcggtcagggaaaggctggcggagatggaactgacgatggaacgcggaaaattcatacgattcactgtggacaagtcgagtagcttctccagctacaacgcgagaccatcatttttgtaaggcacagctcacaccaataagaaaaattcagtcggaaattgctttgtcactctttttaatcagcaacgatccctctgatcagccttccctttccttctgatcagcccttcctttcgctctgatcagccctttcccttccctctgatcagtccctcccttccctctgatcagtcctttccctctgatcagtccttcctatacctctttttgttcagcaatcctttcccattcgtcggtggcggttcatttgcctctgccatggctttgccattcgattggcaattggtcgactgttcgccggaagtgttggaagcgttttttaataacgacgccgaagaggacgacgccggcggagaagaggctgaaattggacttggcgaaggcatcgaagtgaccgtttgcgcagcacggcgattggagacggtgctgaggacagtgctggagagggaccagcaaatggtacagctgcgtaaggtaatgccgacactttgtctcactttggcttcattttccccaattccgcgcgcagcgtttgttccttctgttcggccaattcgccttctcccactccgcttgcaccgctctctctgcgcgcaatggcggcgtttcccttctctttcccgccaatgtccgttggcattcgcttgagcccgcttacgcgcgactgttcactctttgcgacacaattggcgccgtttgcgacgaattcaaaatcgaacgaatttgtgaaagggattggcgaactgtcgaaacggctttggaagtaaatgaaaaagcaattggcactcattcattcatcccatcccttcatcacagatatccgacacttttcacaaatttgtggccaaattggagcagcacggacagccgaccatttctctgctgtttcccggtctcaaccttttgctcagcacttttcaggtgattggtcacttctcattagacttttaaacattttgaaagtccgtttttcttcattttatcataagttcgtcaatttatctttcccccaccccccaattcagcaaaacttttccgcccaaatgccctcactaatcgatgtcttttctgatcaaattcgccgctctttctccgatgttttgagtttcgatcgcaattcgctgtttctttgcgcttcgatgttggacccaaaagtggcttatttgttggtgcaggaacagaagcaggagggcgtaagggcaattcggaaaatggtaagtcaaaaaagtaaaagcaaaaataataataataaataaaatggcatcgagcaacccatcaaaatcaaaacaatgccatcatcactcccctaaataatgccagttccatcttctaccgtggcagtgccgatgacttcccatgacaattattccatctttttccatggcagtgccatcgcccttttccgtgccattcctttccaacttttccaaaatccttttcgcttcttccaattttattcttttaccatttttccgtttaggtagaacataaaatctccgacccatcaacacttctccgcgttcgttcaaacatcgaaaggtttttggacgtcgtcgagtcgccctttggcttcggcactattcgccgggtgcgtgcgccgataattggcacggcaaaagagcaaaacgcaatgggcgaagaaagggatcaaattgacatggaaatcatggagtatttggacattgtacagttggattcgtccgaaagttgcgcacaattttggacaaagcatggacaagtgagaaaggaaagggaaagagagacgataaaggatggagagagaggagagaaatggggagagataaagaaagaagtgagagatgcagaaatggggagagtgaaaagaggagagctgaggaaagagggagaaagattaagggaagagaaagagagagtgaaaagaaaggggaagagagagggggagagaaatagggaagaggagaacgaaagagggtgagaaagagagaatggtgggaggaagtgagaaagggaaaaagaaagaaactgaaagtgaaggaaaagcttggaaaagcatcttttaaacattttgctggccttggtttttcattcgctttgcttccctttcagcgctttcctttgctctccgaaacggcaaagtccgttttggccgttccggcgaccgctgcgacggcgaagcgattgctaaggcaaatttgggaaggcgttgagagggacgcggaggtgggcgtgcggaaagcgcttctccgcttcaatcgccgcttcgtcgacctcgcggaatgaatccctatttgaagcacctccntccattgatatttttgactcattctctcccactttgtttttgttttttcttacaaaccattacaatccatttaaaattgctagaataaattttatcaatttgtgccattttccccataaattcctttttttcttttgttttttatccaatcggatttttc

SEQ ID NO: 13199 - DNA, 737 bp, Heterodera glycines
gttgcacaccggacagtcgtccttgttacagttcttccaatgcgcaatgatttgccgggaggaggcgcagtgcgcgtactgacactgccggccggccgaacagccgaccatatgctccaaaacgcccttcatcaccgagcagtagggcaatgtgcagggcgcacggttttgtagcggttcagactaaaaaaagagatttacggggaaataataaccaattgtaaaaatgaaatcccatggaaattgaaccaccgacccgttcgatctgctgacacgtgcgtgcgtgcagcagcagcaccaactgttgttggatcaacttgcgcgtcttcgggtcctgtggctgtccggcgcagcctagcatttgctgctgtggatgattgccagccgtttgttgctgctgcgcaatgccacccccgcgcatttgcggtggtcctccactgtttgcattgttcatcgattgctgctgttaaaatgagaaagagaataaaagctgataaaattttaagtgcataattttatgcattaagcgtttaggcgacacgaaacggcgcctaaacggtcgtaaataggatattttcatccatggaatttgaatgttaaagttttaatgaaaatggttgtgttcaaaggtcacatcggtgaggaaatgatgagtcattattattcattttccccatttcttcacatcattaagaaaaggaacaaatattacttttaccgtttaattttcttttagt

SEQ ID NO: 13200 - DNA, 2233 bp, Heterodera glycines
  unsure (1)..(2233): unsure at all n locations
tcataaaaatttattctctggggtttttggggtccccgatcacgaatccttcaattattttgatcaattccgatttcctaatctaaatttgaacaaaaaatcataatttgaaaaattcaaaatttcgatttttattcgagttcgggttagggattagaaattagtcaaaatacatgtcagattcgtgattagcgacctttaaaaccccggataaaaaattttatggttttttatcttaaaaaaattttgcaaaacaaaagggtccccccttttgtttcaaaaactgtcactttccatatacctagtgccgactttttcctgttgtattttccacttttttgatcaaaacaaatttctgcttcttcttctttactgtttgttatgagtgcgttggacaatcgtatgttttaacttttttaaagaattgtttatttgctttttttaaccaaaatttgagttcgttaatctcccttattaacacgtgaatgcttaattcaattccaaatttttaagaccttttcaatttgcgcttcgcctccaaagaattgagcagaaatgccaaaaaatgtgacaagcaggaaaaggaggaaaaggtgaagctgaccaatgcgctgaaggtttgctttttgatttgcgtttggtcagattttgttaaagtctccgacaaatttctaaattttgtattttttcattttggggtgtcgtctttaatgccaatgcattttttcgcagaaaggcaatcgcgaggtggcgcaagtgcacgcggagaattccattcggaagaaaaacgaggcgctcaattatttgcggatgagtgcgcgcattgacgcggtggcggcacgcgtgcagacggacgcgacacaaaagcgggtgtccagcagcatgcaggggggtaagacggggagagggggcggggaaggaaaatggaaaaagagggggggacggaaatgggatgaaatgcgtacagaattcggcctatcaccaaagacatgccaactttctcatatttgacggactttgtgctgctgtttacactgctatatctgagatggaataaataaatgaatgaaactggtttttgggacttcacaaaagaaaatggggagggtaacccgaaaactgactaattcatcgttgcctctccttttccccattttggaaaactaaggaattggctaactggcggaaacgcatcggagaaacaaaaaaagggacggagtaaacatttttgtttagcattttttgcactttaattttattttttcatctgcacttttcagttgttaaagcgatggagtcggcaatgaaatccatgaacttggagaaagtgcagaatctgatggaccgattcgagaaggactttgaggaccttggttggtccattctcgttaattgaattgtgttcatcttcacaaagcacttttttgcagatgtccaatcggcgacgatggagggatcggtgagtgggcagagagtaattcattcaaacacaaataatggagtttttataaatacatgaagtcgcgaatttccttaaactaacccaaattccttcaaaattccacatttataaaaacgtttcattttttggccccccctttgcctgttcatgttccctttgaggagatgttttgatttattgcttaaaatccatctttgccatcttacagatgaatgccaccaccacactgaacgcaccgcgaagcgaagttgacgcactgattcaggaagcggcggacaaagccgggctcgaactcggtgagaaaacacacatacttttaaatataaaaccttgtttgattttaatttttattaattgatgaattggaaaacaaacaattaaaatcggaactctcaccgaatgcacactttaaaaatttgtcatttttctcgttttcctttttaggcatggaaatgccggcggcgcaaactggccaattggacacggtcagctcaaaggcatccgttgcggacaacgacgacctgtccaaggtggacaattggagttgttagaaagacaaataacaaaaattttgcccatttattatctctttgttgtaattttcaaaatttcagcgtttggccgccctgaggcaaacttaacaagcgaatggaccgacagaatgacgccatttgctaaatcattatgagtgatgatgattcttattttatgtatatcaattcatttctacantttgggtattaataaatgcgnnaagttgtccaatccccc

SEQ ID NO: 13201 - DNA, 3248 bp, Heterodera glycines
aaacggtaatagtgcagtttgccccccccccatttttcgaaaaaattaaaatttttaaaaagtcgtgtaaaccgcttttccttgtggttttcagggcgctgatcacgaatctgacattcattttgaccaatttcgaatccgggacccgaattcgaacaaaaagtcgaaaattcaaatttttcaaaatttacttttgtggtagaatttatacaaaatgacatttcctggtgttttaatgatttgtgactaattttagcttgttttaatcaattttcgagcaaaagtgtgaattttgaaaaatttgaattttcgactttttgtttcgaatttggttccgggattcaaaattggtcaaaatgaatgtcagattcgtgatcagcgccccagaaaaccacaaggaaaagcggtttacacgactttttaaaaatttttattttttcgaaaaatgtgggggacaaactgcactattaccgtttattcttgaccacttttcactgtgaatttaagtttctgatatttgtccaaaaaatccaatttcagctgacttatggtgaagcaacaggaacgcatatcttttcccttctcagttgactcaaagcgttttttacttttgcccaccgattttgtggatgaaaaaagcaaatttttcaaccgtcagtttctcaccatttatcgggcacggattaattgtcttaaagacttaattaaaaaaaatgcgcgaaatattcttggtatgtgttgtctttttgttattctcatcaattatttaaaattaagcttctacctccaataattctgttcaaatcgatgatttatcaaatttttctgccggcaatgatattttgctgatcggtgttgttttcaagaaaatgaaattccgtcaaagcattctttacgagttttcggatgattcgaatgttcccattaaaatggggagaaaagcgggcgacaacctttgcgatgacgaggacatactccaattggaggacgaccagcaggtaaatgaggaatgttctctccgtttaaataagttccctattttattgtcaaaaaccattccccaataaaaatccttgtccttaagactgttaaattgcttggaaacattgacaaacattgttttgtcactggcgatgtcattggagtgatcggctgtcaggaggatgtatcagacaattttgaagtgcgaaggattatttacccggaaatgagccctcaattggaatggcctttggttgagcatgattggtgatgatgtttcaaggttttttcattaacaattccccttgttatgtttagttatattgtttttatgtccggcatttcattagttggcaattttgacaacgatgtccaaacgttttcggcactgatgcagtttcagcggtggataaacggggaggtggaggtgtcaaaggacggcactgatttgagtgatgagggcgaggacgagtcggacactttgcgcaacatcgccagacttgtcattgctggtgattttgcgcgttttgcacagaatgtgcggtgtttacgaataattacaatattcccagaaaatttcacaggacattgaaactcagcgagtttcgatgattggcgccgaacttgactcggacatggactctttttcgcaatttgacaaatttttggccactcttttggtaataattcttctctagcattttaaaattaaaaggtttagcaaaatttgagagttgacttaatgccaggagccagtgatcccgtccagtgcatgatcccccaacagccaattccccccgcggtgttcactttggcggcgccgttccaaccaatgcttaacacagtgaccaatccctacagtttcgagctcaacggagtccgttttttggggacatcaggtaatttggcaaataccttcacaaaccatttttaaaataaaggtcaaaacatcaatgatttgcggcggttgacacgcggaaaggacacattagcattgatggaacgcacgttggaaatgggctatattttcccgacagtccccgacactcttcccggatttcctttttctggacgcgacccgcttgttttggaccaaattccgcacatttatttcgtcgggaatcagccaacctttgaaaaacgaatcgttgaatttggcggaaaaccaacgaaaaggtagccaatgaagcaccaatcattttcatgtttaatggtcaatttaagatgttgccttttggctgttcctaagttttgcaagacaaaatcagttattctgctgaatttacggactcttgaatccaatgaatactgttttggtgcaaatttcaatgaatcgggtcaatagaagttcgagaagggtcatttgatctcaattttatgtttgcatttatttaaaaacgattggccaattactccaaacgtgactttcattgataaacacataaaattgcattattattattattaataataacgacatggattttccatttattatattttcattttcaaaaatgactgattttatcaactttatttttcagtcagaaaatgccatttgttaagtttaagcccggaaagcagtttggtcgctacaacaccaggctgttcaaggagattgtcaagagcaagaacaaagagccaattcctcgcatagttcccactgattcaatagaatcgatgggatttgacgtgttggacccacaggatgcggggtttctccaaaaaatggctggtggtccaaaacagccgaattttcaattgccgccgcatttgcgaaaaccggaaaaaatggttattttggttgaaaatttattaggagcgtttggctggttcttgataattaattatgttttgttagctccgagtgtttgactattagttgtaagtccttttcttttcaggagcatccgttgttcaaatcggaggaatgtttcgccttcgagggcattaccggaatgactgatgggattgacgaggcttgtgctcttatccgggcgacgaaggcacagcccgtgccggaccgtgtttggaattcgcttcctcgggattttttaccggctgatttcgagcatagcgttgaggatgctatttgggcaggcgaacgttttgacccgacattggagaaattgccgaggaaattcgaccccattcttttttggatcaaatacaaaatgtgttatggaacgccagtgacaaaaagatggttggtcaattcattaatggacacactcactcgttcagttggaagacctcaggcatcaagc

SEQ ID NO: 13202 - DNA, 2973 bp, Heterodera glycines
  unsure (1)..(2973): unsure at all n locations
tcattatganaatgtcacaagcnnnaccggtgatcatcacatcacgtgcnaagtttccatcattaaacagatcaaaacagataaagcagccatagaacacagaaacaattgtaaccattaacaaatacaaacgaattttgcatttgttatgcctataaattataattgaataaactaattaaggataatacagtacatttcaccaaaaattaatacgatcagtcggtcaataccggtgaaaagcatcgcagtgtaaatagcacctaacaaattatttaataattataaaaattcatacatatataaataaattaccaaaaccaaatgcagggataaatacaatctttgtgggtaaacgaaaatcaattaaattttgtccagaaaatgcgatgtaaacaaacaaaaaatgaccagattggtgaataatttcaaaaaaggagcaaagtgccaaaaggtaattaatggtgccattgagtgacctaaaataataaaaataattaattaaaattatatttgactactttgtcttgatggtgacataaatgactgaaaaattaagggcaattcccaatgtggcgatgatacccaatatggcagcacagctgatcaatttccatttggagtttcatttgcgaattccaaaaagaacttaaattcatttaaaaatagtaattatataaattagtttgttaattaccgttaaattgtttatatcagacattatttcaacagttttagtaataacaaacaattaacagaaaattaatatttggttgggttacaacttttcttccctttatttccaaaattttctcaatgggcttggggcttcgttttccaatttggggtgtgatttaagagtgccaaagtgaagagtgggcgaatggcaccatactttataattttttgttttgttttgtttaaagtgttgtgaacaattgagcccatgacaactatggcgtgataaactcataaacttgttgaattgttcacacgaaatattttcagacattttctcgttatatgttgaaccggattttagaattttggtcgagttcgtgttagggaataaaaattggtcaaaatagttgtctgattcgtgatcagggagggacccccaaaatcatcggagtcgggaaacagttttcacaaattcaacaaaagaatccctcccccctatggcttttgataaaattcaaaaactatcactttagtaaaagcgccgtaatttttcatttaataacaaattaaccaataaccattgtaaaaatatcgattcaataatgtataggcaaatctgtggttaaacattgataaaatcatatttattttttaaattatttaattttcttatttatttagcaaaaaaaaaactaaaatagaaacattcaaccagtcaaaatttttaaaattaaatttcgccttcaatttttgaaataatccagtcaattttttaaaaagattttgctgacaatgacaaccgcgaatttttcagattggattgatcttcagctttttcattgaaaattcattgccctttattttattaataatttttggctttttatcacaaattaaatgatttgatttagcaaatttaaacattaaaaattcttttttactgatggcaattaaaattttattttcttttgtgatatttttcattttgtctgaacaaatttgtggcgtaaatccgcgtcagtcaaaaggaaaaagcaaatccttgaataaagttgaccaaacagaagaagaaggtaatgttattcggcatttaaaaaatttttaaaatttaatatttcactcatggataaaaaaaaatctaataatgctaaatatttttgaaaaaaatgaaattcatccgggatttagaggttgctgatcacacgaatctgacatctaattcgaggtcatggaccccaaaaaacccagggaataaattttcatgactatatattaaaaaattttgcaaaccaaaagggtcccccttattgtttttaatttttgataaaattcaaaaatggtgactttgcatatagcgcctaaaaatattataatgtattcctcagatcaaagcaatgtgcctgatgactgtatgaaatgcccgatttgtattgagaatgtaaactatgatcagctctgtttctgtgatcagataatggcggaaagaatttttggaagcaattcaaataatcaacaaaaaggcacgacaaataaaattattaattcaattttaaatataaatttaaagagtcccacgccttctgcattgaatgcctccggaaatacacagaagcggcacatgaagaaatgccattcgcacgcggtggtttaggactgaagtgtatggcactgaattgcggaaaccctctctcttggcgtttcgtctatctatttttaaatatattttgaataaaattaatttaatttaagaagaaataaagtaccggctcccggatcagctcaactcaattcaagcattggaaaatcattgtgcagaattctgtgtgttgtcagtggaaggtctatgcttggttaagtaagaaattttatttttaattaattatataattaataaacattaatttatctgattgtccattaagatgccctaattgtgattgtgccattgggatagaaacatcggacactgataatggcacaaattctgcaattctaaagttccaatgtcccaaatgtcaattcgaaatgtgccgcaaatgcaaagcgaaatgagatgaacagcacaaagatttaacttgtgaacagttcgacaaactgaaaaattacaaggatgacgaaatattgtaattattgcgaataaatgctaatatagtaattaaaaatggggtgaaaaaaattaaaaaaagttttcaaactagttataataatttaaaaataatattaaaatttaacattaatttaaattttattaatttattgaaattattnaattttttttaaattaaatgaact

SEQ ID NO: 13203 - DNA, 935 bp, Heterodera glycines
aaattaatttataaaaatttgttaattaagctgtggaggcacatcggggcggagcaagttattaacgaaatgtccaaagtgcaaaaaatgtcgtaagttttcggatgtaagcaaatcagaagaggaatatgcggaacgaatgcaaagcgtaatttaaaaaaaataaattgaaaaatcgaaaattttcattttcaaaacgaatttttacggggattttgggggataattaaaagctgtgattttatgggccctttttcattttggattattatttaagtgagttttgtaatattcacttttttgcaaaaagcattctttggtataaaattttgtattatttgcaaaatgaaattgctgtcattggttttctttaaaaatttttaaataaatatttacaaaaataaaaagtttcatgctaatattgtataaataatttccgcattttaataagtttattatattattatggacaaaatgaattttgatgtcattattttacttaaaattttttaaataaatatttaaaaataaaaagttttatattaatattaaataaataatttccgcattttactgaatttatattcttaatttatttcggtaggttcaagtatactctaatagcatatatattttaataaagtttcaccaacttttaagaaaattataacaaaaataataaatgtcgaaaatatattttggcaaaagatttgtagaaaaacaattcggatcaattaacaccattttttcgcttaattgcaattaattatctcaattagggatcagagtttcccttttttttccaaaaataatttaaaaaagaaaattatttaaaatgctcaagcttcgcacaaattttccaaaacatttgagacacagtgaagtgattttgcacgcattcatatgccctctttttttcattatctctcccattt

SEQ ID NO: 13204 - DNA, 1999 bp, Heterodera glycines
  unsure (1)..(1999): unsure at all n locations
attttgttgctgattttcttatgtattttctctgccctacccggtnctttttgctgaccatgatgggcttgctcatacttaaaattcttcgacaaatcaattttaaaataatatttttgttttctttttgtgttctcacatcatttattaaaaattattttaaattaattaattttagatatgtaccagggatgggccaaattgaaaaataaaaagcgaaatgcgaaaagcgaaatttgcgaaactgaaaaatgcgaaatgaaaaaaaagcgaaatgcgaaaagataaaatatgcgaaaaggcgaaaatgaaagcgaaattttttctacaactttttaatagttaaaagcataaagcaaaaatcatttttaaaaattttattccaaatttaaaaatcaataaaaattagggggtatgattttacaaaatttttagccgtttttcgccaaaaaattactatttttgttattttgttctctatttttcaaaatatggtaaaataggggtccggcagtgccgataggcgccgacggaaaaatttttgaaaatttgattaaaatttgttgacagattttcactaaaaaatgatcaaattttgtgatttttatcattttctaatgagaaataagagttttggggcgccgctgagaacagtttttcatcaaattaccaaattttgcgattttgggccattttctaaaaaaataggagttttgggggcgcggcggtgccgataggcgccgccgggaaaaaaaattggaaattttgatcatttataaacaggttttcactgaaaattagccaatttataggtaaaattttgaaaaattttatgggaatttaatccaattcttaggggtgtaaaagtcgcgtttcgcgccaaaaagcgaaatgcgaaaagcgaaacctaggcacatgcctgattgtacccaagcaataacaaattttttaagcttttgttgtttctaaacaaatttctaaaaaatttaggtccattaatgcagagctgaatttcctcgccctgaattttcttgggttttgttcagaaaatccagattaaagacggaattcctgtccccaggtccaggctttttccaaaaactgagcaataatggtttgtattaaaaaaaactcattaaaacatatccctctattaaataacaagttaattttgaatccttgatatgtttctgaaaatccaataaattaatccaataattaatctttaattatatgcctttttgaaattaatctcatccttttttcaaataaatatttctctcatttttctttgttgcggattttcatttgtatttgcccatcacccttctcttcttttactgaccatgatgagcttgttcaacattgagttttagttgtgctgctcattcagaatataatcaaaactaagtttttcatcatattatgtcgacttttaggaattttctttttaattttcatggacagataaattgataccaatgtttttttaatcactcgatcttaatttttattaattggaaattatttaacgctcacaatatttaaaaacaacaacatgggttcatcggttttcctgagttttgtccagaaaatccagaaccagcttaaagatgaatacaggtctccaggtccaggattttttcaaaaaattcagctatcatatttattattgggaaaaaatacttattaaaagttatccctctattaaaatagccactttaattatgaacccttggttcctgaaaattttcaagaaatcatttttaggaaaaaataacatacaattttgcctttgtgaatttaatctcatctttttttcaaataaatatgtctctcatttttcattgttacggattttcttatgtatttgcccttcttccttttctcttcttttgctttccatgatgagtttgttcatcatgttgagttcgttgtgctactcagccggcacatttcattttaaataaaattgggctgttcattagaatgtaattaa

SEQ ID NO: 13205 - DNA, 1250 bp, Heterodera glycines
  unsure (1)..(1250): unsure at all n locations
tttgcccctaatttaatatactaattggtcacttttgatgaatccaaagcccacaaaaaaattccaccggaactcctttttgaaatgtgcaaatttgcccccggctcattttgtaaaaaagcactaatcaacaacaattttcttttttaccgcttattacacaaaacaaagcgtgcggatttttggagacgaattgttagtaaataaaataaatgatcaattaattaactgtcataaattaatccctattgataatttgatgtttgttcagaatgaagccgagcgagaagaacatgccttttacacgtatcaagagcgaaattaccatgcacttttaccaagaattccaacccaccggtgcctgggcacaatgttttgtcggctcgacccactggcttaccttgtgcacgaagcagatgatgaacaaatggccgaacggaccatgtacatttcgcttcgtgtcggaacagttgcgcaagtattatattattaatgtgtttggtgccgagggcctttaccgggccgcctgggcattggctctgtaaactctaaaaaaaaccgatgccacgatgtttagcgaaactgattttatcgggcggcctgggccaggcaaatttgtctaaatccgctcgagccggttaaccaaaaataatacctaatttaatacaaaattaccaacaattaatgattaatataagcatctaattttgccctgatctgtttgttacagagattggtcttacaaaatcactttcaaaaccaagaagaccaaatacaggaggcgttaaatctggtagcatttacttttatggaactcccagctcaggaaggagttgtaagaaatttaatttaatttacattttaatttaattaatcaaattatgtaaaattttttaatatttaaaatagttttgaatttattgtttggtttaaatacaaggtatgggaccttgctgaggtcaactttaatgaggatttaatggcttaattttggacgccgttgatgaattatttgcatgaaacccttgttgaggtgtgttttaaatataaataaaaaattaattggaaaaagtgtttttaattttgaagaaacaattttaattgattattattttttatttagaaatttttaattttgaaaaattttttgagaatataattccatgtatannatctttttttaagtaagtaataatttttgattattttaaggaaaaatttcaaagatttagcaaatgattgtcataatt

SEQ ID NO: 13206 - DNA, 1209 bp, Heterodera glycines
attggtgttataaaattttggaaggtgcgaatacggacttttatgaacaaaaacttcaattttatgaataataagaatatctaaaaatatgaaacataaataaaattgatcaaatatggacaaaattaaaaaaaattgattttaaatcttttaaaaattaaaaaatgtattaaaaaatttatttttagtgtcttaaattgttaacatgagaaaaaattttgttccgtactttccgtactattttttacaatgcaccatcgggcattattaggaggaaatacaaatgtaaaccaacctttcttattgagaaaaatattttcaaccaaatatatttaaatagaatttgaacataaaaaaactttaacagtgttcaattttgggtttccttgaaatttttaataataatatcgaaatatagatgatatattgaaaaatatgaaataaaaatgcattctagaagcttaaaaaataaaattaaaatagtatttatttggttttagggtaaaataatatgttaaaaataatgaaatcctgataattgtgattaagaccaaattagccctggaaaacagtgccgaaaaggacattggcattgtcatcaacgataaatgaaaagaaaggacgatcagagcgattaagtgaaccaatggacaatgaatggataagtcggcagctatcataataatgccagtggcagcggccacttcggtgccctgctcactgacctaagcaagcagaatgactttgatttaagcaacaactgatgctgatcagctagctgaccatgatcacagtgatcagtcagacacataaggggaaatgaaaatggatgagagagaaacaaaaagtcaattaccacaattaaagaaagtgaaagaaaggataactgtggaatagccccaataaaataaaaaaaaattaaaaaaaaaaataattttaaaaatgcgcgcacttccttttctaaatattacgctaattttaataaaattttttcatttttgaaaagaataacaaaaatggtccaaaaatttgtcttttatggcaaaaaaatgtccttaaaaaagtccaaaaaaaccaatttttttttttcccccaaattttttttatttttaaaattaaaaccaaaaaaaaaaaaaaaaacctcccaaatcccctaaaaaaaaaatcccccaaaaacacctttttttttttttaaaaaaatttgaaaaa

SEQ ID NO: 13207 - DNA, 903 bp, Heterodera glycines
acataaaaataatccccaagaacactttttttttctagaaaatttgaaaaggaattttatcggcaaagaaaaaatattcaacaaaattaaatggcaaataatttagagcacaaaaaaagattgttatggttattagccgcgaaaggtcacgccaaacagtggcacttcgccataattattggacatcagaaaaatggcaaacggatggtcagcggagaagacgggcgcagggggcggcatggatttaaattgaattgtgaggtaagtggccgccgccgcttcggtgccctcctcattaacctaattagggaggcggcacaatgagaaaaatgaatggttcaaaaaagaaaaagacaaaagtggacaggggaaacgaagcacaagttgaagcataagagatggaaaaacagagccctaatggaatcactagccgttgctcgccggcgtttttcttcaaaataaattgtaaggccagattcggaaaaatttgcgaattttttccaaaattttcattgagatctttttgagttatagaaaaaagcatgtttcagtaccagtgagcctgttcgggttctataaataaatcatcaatgctaggagttctagcttcttacttttatttgtgggtattattttacgagaagaaataccaaatttctgcgcccgattttcgaaatacctacttttggggttgacaccgagaaaacctattctgggtttcagcttttttccgctgaagaatttttttggataatttataaaaaagttttttaatttttgactatttttacccaatttaggccaccaaaacgggattttaatatatatttttttgccatttaagcacttaaaaaacccagcactgaaaatcacatacatatgtattattgcaatgattgctaa

SEQ ID NO: 13208 - DNA, 2415 bp, Heterodera glycines
agggacggaatttggcattcaaatgcctactaattcgaaacccgacttcataagggtttgaaataaaatttttgaatcaacagaaattcagaggcttaaaagattcactcgtacgcaacggaaatgccttttaatacatgggaagatttgaaaaatgggcatgcaacgcaatcaaagtgccaaaaacgaaaaatgagtctcttcaattgactcccaccattaatgccaaaaacagttcatttgcaaatgcatttttgcaaaatgattaagtgcaagtgaatgccgtgctgcacaaaagtaaaaaataaaccaccgcacctcaatgaacgccttctgcaccacttcgctgattttcaacggcccattggcaatgccctcaaaattggcactgtcggagaaagcggtggccatgcccatgttggccaacggtttgttcaattggtgcgtggactccaacttgaacttgggcaacaccacctgagaattggggaggaggggacaatgggcgaaaggaaggaaaagcaactaaggtcattcgagagtctcgagaacgaatccaaaaagggatttgctaatcgggaaacgaaaccccttccgaatattattggcacaataaataagtaacctgcacttcgcgttttccccgctttttggtcagttccagcaactttttgccgtccaattcggccaacagtttggccaacccgaagcgttccttgggcagcatcacgaacatgaacacattttcgccctggtaaggcatgccgagcagttgaagctgtacacacattcagaaaaacgaagtataaaaggatgtgtgagaaaatatgcgacctgatcgtcctcaaaatagatgaaatcgtccttcttgtgcatcatgtccagctaaatggggaaaaggtaagtaaagcgaccgtttaacggaattcatatttttaatttaggtatttgaattaattctttaacgaatcgcttataagtaaaccattttaattgttaaaataattaaatctaatgggaaaaaaaattaaataattctttcattaaattatttgctaaaatagaaattaaaacaaaatttaaataaatgtttgtgattcattcacctctttgctgttcttttcgtccacataaaatgttctctttttggtgaatttcgagtcgaatttgtccgcccaattgcccttgaaatagacagcgttgatcagcaccaaactgaagaaattcggaaacatttatttatcaatttaatttctgataatcaaattcggttaaattatccattgtttattttgaatggaaccgcgtcagttcgcccagagagtcggacgagatcagatcatggatcttctcgtgggtcgcttcttccacaaatgtgttgattttctgatgaggatgcaaaatgtagcaaaaaaaaacaatttaattattcccattcacatttagcaaaatttgaacaagatttaagtgccaaagaaagcgagagtatccttttcaccgagccaatgttagaattttagtttggggttgaattattagtgtggatggcactttttcttcccgacaatttccaaattggcatatgccaacaatttctcctccgccccgccaccttcgctgcccccacactgtccgcaaaatcaaccgcctcgaactgtcccccgtaatgctccgcaatttgcgctttgaacgtgtccagcacttcgaagccgtccttcacgtaaactttgttagccacctccaatgtgtaattgttctgcccatttttgatggcgttgagcaaagctccaaaatatttgtgcacttccgcctcgggcgcgcctaaacgcaacggggatggaggtcattaagaatggggtggggtcattaagagtatgtcgctcaattatcattcataaatagaggacaaaatatctgcccgtgacatttttaaagacactgatcaaaaaaataatcgtttagaaaaacactgatgaaaaaaacgaaaaaatgataagggatttcgttggcactttcccttggttcattagtgtcttctaattaatgtgtttatcattttcacacattttggacacggagtgttgttaagcggcacgattaggaagtagaacattaagccaaaaactcggctacttcgccttccatgctatttccatctaaggaataaaggagagctttggttatcataatttggtaaatcatcaactaattggcatcatttcgtgatcagtgcccttggaaatttcattaaaacatttttagacccataattattaataataggtggtattaataattaatataaatttacaaaagaaatggtattaataattaataaaaatttacaaagaaatctctcttttttttaacttttcaccttttgccagcagttggcccatttctttgcccgtcttt

SEQ ID NO: 13209 - DNA, 1524 bp, Heterodera glycines
aaaaatcctcaaagtttcccaaaaaaaccacaaaaaacctcaaagcctcattttgacaaattttagcctcacagcccccccccccccccggggcatttgtgtgaccgcttttgctcagcttcgcttctcccctatgccatcttcctttctgtggtgccgtaggctgtgctgtgtgccctctccgtccggcggggcacggcaattttttgtgcttcgagtgccatcccccgtcccctcccctttctcagggggttgtcctcctctcccgtctcatctctcccccattttttttggtctcgttattgccctttgtgctttcctcactggtttgtttcgctcaacacttagtttttttttagttttcggcatggcacaaatttatgggggggggggggggaggaagcccgggaagtataaccctgaacacgagaattgccggttttttcgaatttgccgaacactacccaatatacgagcagcatcgacgggagtcttggaacgcgactctcgggagtgaattaattgctcggttctcgagtctcgaatttgcttcagctcttgagtagacgacctgtttgctatactgccctccccccgcccctcccccctccctctttttttggcatttttcgatggatttccccccgccaagtggcacaaatgacaaattggattaggtactttactttgcccgacctactttttcttgtgcgtctgcgtcttcccgaatttaatttgcccggctttcacgggccgccgtcatcgcttctcaaaaaaaacatatttttttcagtattggcattttgtttccttgtcagaaattcttttccaactttttttttacaaattcacaaataaattggaaaaaaaagaatttatattgttttttaatattttctgattaaaaaaaataaattttatttattttttgaatttgaattatgaaaatgacaaaaacatttttttaaattaaataatattttccttcttttacaaattcacaaataaattgaaaaatgaatgaattcatggggacattggttaattttcaacatattgagttctttttaaacattttctgattttaattttatttattttttgatttgaattaaaaaaaatttcaaaaaaatatattttaaatttaaaatatttttttgtatggcacaaataattatttaacattaaaaaaataaatcattaatatattaactcgaactattctgacagcgctttttctattaaataaaaactaaaggcacatagataataaatttcgtataaaattcagtttttttttcccgtaatttttcccaaaatgccaattttttttcatttatttaaatacatacataataaaatagggaaggggatttatagtttttattaaccactatttttatagttttttatttttaacaactaaaaaactattaaatttttgaaaaacaactattttcacctatttttggcggttttgcccacaattttggttaacaaaaaatggcaataaaaaaggaaaaa

SEQ ID NO: 13210 - DNA, 1773 bp, Heterodera glycines
attgatctgtttgctgcttttgccgctttctgatgttttccagttttttggtgcaacgaaaatgcacttttcccgatggacagcagattgatatcatcgttgcagacgacacagagggcaaattcttcgccttttcggcttttctttatgtgccggaattccttttcgtagctctccaaatagatatttttacgttttgggggcatcttgggcattcacactcaagaaaacgaagtaaaatataatttatttgaaaatcgaattaattaaaaatattcgcttcaataaaaaaataagtaaagttattcaattttgtagatttttatttgcaaatccaaaataagaacgaaatatgcacgtcgagtcaaaaataagataaatcttagaaataaggacattttcattttctaagatccggcccctccaaataaggacaaatcttagaaataaggacacttgggaactctgacataaaatcataaaatatgtaccaaaaattgcaaaatatgcacataaaaagtgaaaaatatgcacttaaatttgttcatgtcgaaggcaaaatttcgaaaattcttcaaattcgttaaaatttaagctaaaaatattgaaaatagttaaatatgctatttaaaataattttagaagaaaaaaatacaaataaaaacgatttattaatagggctcggatttatagttttttcactatttttttcctgagctccccgtagcctgaaatgcacgaaaaacatgttttttcggctgttgttaagctacttttcgagttattagcaactattttatagttttttatttttagcaactaaaaaactataaaattttgaaaacaactatttcaactattttggcgttttgcccaaaatttgttaacaaaaatgcaataaaaaggaaaaacacacccctaaggatcaactttttgaaaattttcaaaaatgcaccacaaagaaatgaaaaatttctcaaaaatgcatctccaaatttatttatttattttcttgacaagaatttctatttaaaaaatttttatctcaatactgatttggcttaatattgttaccttttttttgttttgttaaaattttacgattttacacccctaaatttgaaatttttagcaactatttacccatttttagtaactatttttggggttttttagaaactaaaaactaattattttggcagtttttagcaaccataaatcccatccctaataataaatggatgaatatgcttttcctcatttattttctcatttatccaattttttgtgtccttttggccagagaagcacttcaaaaagcatttacctcccccaattttttccgtttttttcctccgctttttctcccctcaaaaaatgtgtttgctaaacgaacaaatttttttttttttgttcaccctttggcccatctgaaagcagcagcaattttatgaaaacaaaggtcgcccgtcgtcttttttccatttggccccaaaaattcaaacattttttttttgttttttaaaaattctttcaaaaaatgattatttgtatttttttaaattacttattatttcttcacaaaataataatttttaattttttcttacgcattttttccaaattttatttgttgtttttgtttttgtttttttattcttttttcgtttggattttgttgtcttaaaaattttcattttttaaaaattatttaaaaaatgatataaatttaatggatacttatttttgttttattaatttcttctccttttc

SEQ ID NO: 13211 - DNA, 5543 bp, Heterodera glycines
tgaaggacaacaaaagaatggcatttattgacccaagaacaatgattttgagctctgatgcgagactggcaccatgctcagaataccgcaaacagctcatttttttgcgtggttctcttcatgaagttgatcaaattgatgctcaggtcaagcaggtgaatgccaatcgcattgacggtttcagcctaaatctatcattggcaccgacttatgctcgccattcttttcttcatcttgcccttgtgaatgtgtctgactttattggccagttttacgacgccaatttcgcaagagaaagtgaactcacattccaacttaaaagtgaggacacggttataacaaagactctgtctgaacaatgggagcaggtgagtgagtccattcgcagcaaaatgtttgggaattgggaacaaattggcaaaatcgtcctgtctataatgataattattgtttttacagactttttgatccggtttggattaatgattagagatgaatacgttggcagaggaacaacacgacgcatgacttttggtggaaataaaacgcagaaaattgtgaaatctccagcacacctcaacatgatgaatctgaatgcatctgtagaatttggtaacgaaattgagctcagtcccgttaagctcattgaacccgcccaaacccaggcatacaaatttgcaggaaaacgaaagagaccagtaaaaaggactcgcttcagttttcgggcgccaaaagtactcattggacttttagtaatttttcttcccaatgcttttgcaaatcccgatgtgaataatcaaatctcaattcaattcacttctccttcaatgatttatctgcttatcattccatttctgatttttatcactatttcagtactgcttcgctcaaaacggaattcagaccttccaatgctcccaaatctgaatgcaatttctccgcatcacgccgtggtgcagacattgattaactccacacccgtccgctgtttaatggacactggcgcaagtttgactgttgcaccacgatcaattgcggatgaactcaattgtcgaacattttcatctgatctggaggcaatgagtgcctcaggccatgtcattcgcctcaaggaatatgctcaggtgaatttgaacattgctgggtacacagtccgttcattaatttattttgtggatgattccgaatttactgtggcccgggattacagtgtaattgtcggttgggatgtctttgaaaaattgcccccaataaaattcgatcatttaaacgggaaattttttgttgggaacaacgaatccaaattgtgctatcgttcaattcttttactgaacgatttgcgcgtgtcggcagagaaaaacacactcattccggccgactcccaaatattggtcgatgcttcaatcgaatcatccccaaacccaaaaaattcattttgcattgatcgacctgacataagtcttattaagaagggactgtcagtcattaatagtgtctcgcctgcgggccagaaacaaattaaagtggcagtggtcaacccaaccatggaaccaaaatggatttggaaaggaacacatttggcatttgccaatgaattgttatgtgaccgaaatggacttttgaaggaaaatagcacaaaagaaattcttacgttaaattctgaacgaaagaaaatggaaattgacccaacatttgtagttgacttttctaaggcaatggttgaaggcaaagatttggaaaagctgaaggcattaattgaagaattttcagacgtttttagtaagtttaggtatgatcttgggcttttcacagctgctgaacatcacattacaaccacaactgaggaaccaatcgcatctgcgccaagacgaatgccgtacaaatacaaagaggaattgaagaagcacattaatcagcttttagaagccggagtcatggttgagtccgataccccatgggtaaccccaattgtcattgtgcaaaagaaggacggtggaattcgtccctgtttagactttcgcaaacttaacgaagttacagtgcccgacaagtaccctctcccacgccttgacagcatcatggaaagggtcggaaactgtcaattttacagctctctcgacttggccagtggctattttcaaattaaattgagtgaagagacgtcaaggaaatgtggcattataactgaagacaaagtgtaccaaatgattacgatgccatttgggctgaaaaatgcaactgcagcattttcaagggccatggctatcgttttgtctggattggaggatacttccttggcctacgttgatgatgtgcttattttcacgaaaagcccaaacttttcagaacacctgacggcggttaggaaagttttggagcgttttcggctttacaatctgaagcttagcccgaaaaagtgcatttttgcctcaaatgagatgaattttcttggatttgttttaacagctgaaggttttaagccaagcttaagtagaatcgaaattctcaaagaaatgcccgtgcctttaaatgttaaggaagtaaagagagtgctaggacaggcaggcttttacagacggcacattgagaactttgcaatggtcgtagagccattgctgaagcttacgaggcaaggcaataaattcgaatggggcagggaacagcaaaacgctttcgacaaaataaaagaattacttactcaagccccgagtctaatttttccagattacgacaaagcatttcacattttcactgatgcatcatcgactggacaaggaggagttttgatgcaaaaggatgacgtgactggcacattttctgccatttcctattgcagcagaaccctctctgctgctgagaggaaatggccggctgttcaaattgaaatgagtgctataatttatgctttaagagaatttagaacgttcattttcatgtcggacattgaacttcacacagatcacaaacccctagcgtttttgctgaagaaatccgaaaccaatcagcatttggcaaggtggctcattgaattgcaaaactatcaagttaagattgtccacgtggcaggaaaagccaacacattggctgatgcactttctcgtgccgctgaggacaagcccttgtcggaaatatacaatgtggatgaactcgaggacattatcgaatttccggtctgtctcgctttggcagcacattccagggtggtcgcgtacccatttttgcacactttgaccatccgacacgaggatggaaacacttacgaagttaatttgttggaagagcaggcaggagatcctgaagctgcagcctacattgcgtttgtcagagatggggaatttccagctgatttggatgagaaagaaaaagagttatttgctgtaggcactgccaattacaaattaatttcgggaattctttattttgaggacaaggtactccctccgaggatatatgtcccaatttcgttacgtggactcatttttgaatcatttcactcgtctcttttgggtggtggtcatttgaattacaggaaaacaattgccaagtgcaaaaaatatttttggcccaaaatgtactctgacgttttaacttgggtcaaattgtgtgtcacctgccaattgagacacaatccaacacccgcgtaccgggaagagatactcatggtgccagccaacacactttttgccaaagttgggctggacttggccggcccctttccagtcactcaaaaagggaataaacacatttatatatcgtttgttggttcaccaaatacgcgatttctgtcccggtccccgacacaaaagcacaaacaattgcccacacttttcttaccaattgttacttaaaatacgatggttgtgttgaattaatcaccgataatgcttctgcctttacttccgaatttttcagggaattttgctccatgctttacattgacaaaaagtatgcctgtccacattggagtcaaggcaatgcgtcaacttaacgcacctttcggacatttcacaatatcctggccaagtacatttcgaagactcagcctgaattcgatgaatttttggatgcggctaatttctgttataatacgtcagtccatgcttcaacgggtgagactccattttttctaatgttcggacgtgacccaattttttgtgttgatcagatcattgatccgaaagttcgtgatccgatagccatttcggatcgtaatgaatttaaacagaagctggtcgttgccataagacacgcgtggcacgctgcagctgatgaatatgcaaaagctcagcgaaaaatgaaggaacaatatgacagaaaggcaaggccacagcaaatcacaattggtgaccgagtgctgatcagaaactacgacggacgggtaggaacatccaaaaaatttcaattaccatggcgcagaatttttcgtgttatcaaaattgagggcatttatgttactgtgatcagttgcacttcgccaaattcaaacccaaaaagacttcacttaaatcaaattaaaaagtgtttcgaaattttgggccctccctgcactatgccaacacaaccagttgaagagaaaaagtgccttgaaaagacacaaaatgtggaagaagtcagttcggaaaggtccggaatccgaaatgaaatggaccccgaatcccgggaaggcgaaaatttagaggaaatccacgcccgagggccggaaacaagaccagaaattgaagcagatgaggagaaaaatgagcagaaaaaaatagatacggaaccaagaaagtatgaccttaggaaaaggacgagaacttgaaaatatcttgtgaattattagcacagtaaccattaacatcaaaatttatttaacaaaatcaatgaaattattcgagatcgatctcgctaaattgatgaccgaagaggtggccttctttttcgggatggacactcgcccctccgccttctgtttctccctctgagcacggcactgggctgccaacacttcgttgtccgccctcacgcgctttccgctttgctcatatttcaaggcgataacccttggccctagcctcgttttccatggctctttaaaaatttgacttagttgtgaatgagaaaattcatctcacttaattccaccaagacattcctcggtttgcttttcggtgaatttataggcttcccgccctttacagtcacaacgggtgtgttcccccacctctaaatcataaaaattgttgaaaagtcattgtctgaacccattttatacttttgaattgttgggccgcccttgggctacacaactccttcacaaggcaaaccgaagctccaacattaatgccacaatgcagaccaacggtgagcacgacatcaccgggccgcttgatgtggaattcaaacggaatttccgcctggcgcaattgcgcaggggagaaaatgtaactgttgtggccgagcggatttgggcatttgggccaacgatcggtgaacagttcttggcccaattgggaaacctgcgtttcgaacttccccccaatgaagagccacaacttaatttt

SEQ ID NO: 13212 - DNA, 1655 bp, Heterodera glycines
aagaaatttctttttgatgacattgaacctagtaaaaaaaaatagttaattgtggaatatacatataggtacatatacaggcttttttcaaaatgtcgaagctctattaaaaactcaaattactaaataattgccaaacattatgccaacttataaaattaatcaaaatttaaaaaatctgacgaattttccccaaaaatctcaaaaattctcaaaagcctcaaaaatcctcaaaatttctcaaaaagccacaaaaatcctcaaatcctcatttcaaaaaaaaacctcattgacctatcaaaatgaagataaatcctcagatctgagagccctggttataatcgagggtggggttctattcgatggggggttataatcgaggaagtacggtaaattttaaaaaatttagtcaagtatgagcaatgttatggccaaacgtacccaatgaaccgggttttcaaacatttttcgccataacttttttaaaacctaacgaaattttctgaaatttttcaggctaatagaggacacaaagggctatcgaataatagcaagacaataaaaataaaaataatttctaagtaaaattttttaattacaaataaaattattttgatcactaaaaattctgatcaaaacattcttagaaagaacaaattaaagtggtcttgctatcatttgattgcactatgtgtcctctattagcctgaaattcaaaaaatttcgttaggtttaaaaaaagttatggccttcctttggtaattctgaaacacacacaattgaagccaatgtctttgggaataatgaggaggaaggaccaatggaacactttcaagattggcgaaaaatggcacaaaaataccgtatcataacatttatgtccaaaaatataaattaattactcatcagcctatcatgagaaaactaaaaacaacagaagcaagtgccaagagtttataccgaagaaaaagtctgcgaaacaattttaaaaacccgaaaaattaggacagaataaaaaaggaaagagttatcgtttggttggctggttgatcacaacctaaactgaaatttttaaaaatttcccggcggcgcctatcggcaccgccgtaccctcctccaagttcccaaaaagtttttgaaaaaatcgcgctgtaaaaaacgtgtccgccagcccctaaaaatttatttttcagcattttttgatttttggaaattttttaaatttaattgaaattttttgaattttccaaaatcccgcaatcccgcacgggatcccgcaaattttaaatgcggaatttgcgggattaatcccgcgggatcccgtcccgcaaaaaattttgagttccactcccgcagcgggatccgcaaatttgaaatttccggtctctactgatcacttactttgtccctcaactttttcaactcctcgatctctagacacttcttctacatcaattacagaatttttgatacgtacgatgatgatagataatcctgacactatataacaccttataccaactcatcccctctcatctctttgctcgtctaacaaatgacaggcgacgtacgatcgaataaatgtgtatttatgtactgcttgaaaccactgaatacatcggctaacttccctgcggtcgccattcatacctttt

SEQ ID NO: 13213 - DNA, 2526 bp, Heterodera glycines
  unsure (1)..(2526): unsure at all n locations
tgataattagctacttgctttctatcaaattattaaattttttgctcaccaatcccaatttccggcacaagcgcncacacttnnntcatattctttgtgtgcttnttgtacattttctaattctttatccttttcttcttgcttttgtttcaatgctttttccaattctttcaaataatttcggttttcaccgttttttcttctgtgtacgtttgttgaaaaaagaaatcaactaaaaaagcataaaaaaaagtcttttaaatttttttatcggaatttatgtgcgttttttaaattttcattaaatatactcgttttcagagttttttttcttcatctcacctacttcccatggtctaattgagctgaaattttactaacaaataagtgcacttctccataaaaataagtcatggacggtaaaaaacgaaaattgccaaaaaataattggcgtaaaacaaaacgccaacacacgcaaaaacaaagtatatgcacttacactggtaaatgccttttttgtattttttattttgatcagccataacacgcttcattcccaacaaaaatgaacaaatttggtatctaaaaaaagattttgaaaaggagaatctttttctaagtgaattctaagcaatttgtcatctcagaaaaaagttgtgatactttcaaatttttatcacgttataactcaagtcctaaactgctgttttcaccaaaaatgctaaaactattaatttctctattaattctaaatgtccaaagcgattttgtacccttataaccaaaattattagaattttcgaatttatgttttttcatgtgttagagacatgaaaatagtacgccaaaaagagagaaaaagtaatgcattttcatgttttatatatgtcttttgaaaaagtgtataaaacataaaatgactgtattacattatgcagaatttttttctctatcagtatgtaaaatttggtgtggatttaacaagtagaaaaaaagttaaacagaatgaagtaaatgttgttttttacataattaaaatgaagagatagtacgtaaaagtgagagaaataaagataaaaagtaaatgtgacagaacgccaattttttcccataattatccataaaaagatttattgtcgctttttttcttttttaccgtccatgaagcatacaaaaaatcggaatgagtagagaacaaaatcggtttatctcagttgggcccgggcacgtttgggcccagcaagtttttggactataacttttttcttgtcaaccaaatccagtatagatggtatcattcaaaagctatagagtcatctgttagcctgcaaaattttcaaaaaattccatcaatttcggacaaatttatggccaaaagtatatcagaaaaccaggttttcagtctttttcggccataagttttttcaaaattgacggtttttaaaatttttctggctaatagaggactcttatttgttagggctatcgaattataataacaatgttggatttgggtgacttatgtccaaaaatgtggtgggcccaactgagcgagtccgaaataaaataaatatttttatactaaaaatgcttcaaatttggatttcaaaatgataaactcacaaattttgatgacatatattttttgcacttgataaaatgtgaaagaaaccatgctaataaattcctaaatggctggaaaaaattttcgtggaagacgattttaaagattagaaagagcacaaaatttgctacaaatggcctttggataaaatggcgcgtattcttctcagtatggagaaacgaagggtcgtaaaacctcgagaatcccaaaaacaaataacaatttttaccatttttaagagttttatgaatattttgctattaatttaccggtgttcaatgaagtctcattctcctgtaccgtttcacatttgttttcgttcacaaaattgaactaaaataattaatttttgaaaattttatgtattattttttaaaacttgcctcaatataacttatgtcgctgtcttcgttgtcttcaaaatcaacaaacatttccaggaataacaatttgattacttccattgctgagctcaaccgaatttgccgataaccgttaccaaccgaaagttgaaactcgggcttcacttaaaggataaaatggtatttttagaatttataaaaaatgttttgacctggtgaagcggcgttttccgcatgcatttgaccttcttctccccaatttctcacatatctatcaaatgccgttgccatccttnttcaagattcacaacgcgcttctaacaatttaacgtttacgccagtgtaaacctgcatcccactcatcagttttttccatgattcttcgctgcaattccatccctncagcatttggcgcaaaagtacgttttgataagtgccttttgctttgacatgtccttcttctccgccctccgtgtgtcatcatctttcaccgtatcnaatgccgcaattgtgcccacaatgatcagaatgatcaacggc

SEQ ID NO: 13214 - DNA, 1732 bp, Heterodera glycines
  unsure (1)..(1732): unsure at all n locations
cagaatgatcancggcagaataacaaataaatgcaacagaaaatgactcattttctgtatgcaatatgaaaaatctatgcatgttatactatttttaagcataatttatgggctgcgaaaaatgggtaatttttgtgaaaacttttaaaaatggctatcattcaaaaaattataaaaaatccaaaattttgcctaagggcgatcctggggaaatgaatttggctttcttcagagaatggtgccaacataaacatttgtgcctcgattttatgtcgtttttgcacatgtcaaacactttgtacgttctctgatcaatgtgcatctctaataataaatttataaacgattaaaaatcataatatttttctaaactacaaaatatatttgttcaaaataaaatttaattatattataaactacaaaaaaacataatttttaattaaccaaatcaaaatttgtttaatacaaaaacgaaagatgccttcacaaaagtgcattcaaaattttaatttaaattaaaattatcttaaattctttattgaaaattcctaaattaattaaaactttcataatttgtacacacaatttcgcttccttattaatttaatcatctttattcacataatgatcatgtctcatgccaggtcttcttctccaccgcttgatcagtttcatctccatttccgattggctttctcctttttgggaatgtccattttgtgtagtgttcgtccactttgttcaacagtttcggattgtttaaatccgcttcatcgcttgtagtcaatagcaaaagctttttcttctgcttctttttgtccataaaattgctttccgcctgtttctgttcctcttggccatttatttgaccattagcattcccattttggctatttgttgtgccaatgccatcatttccatgccttgttccactatcattaccatcggcaatgttgttgttattgctgtgccattcttcatcaatgccattgccatagtccaaatcatggacacccattttgccatggttttcctcagcttggccttccgtcttgtccaggccaaacatgctcaactcttggcctcggttgccattcatagttcggtcttccccagttggcaagtcgatgccatgctcccactcttggccaccattttgcatatcatactcctcattcccatcttggccatcagcgttgtccaatccgacattaatttttaggtcttggccattgtccttgcccatattctgtccttgattttggtttccaattccgtttttgccctgcttttttgtggcgccattcccatgctcattttcacaaaagccacatgtgtgttggcattggattctgatcagtcgtacatagcgaatttcccagcagaacccattcttcttcaatacaccacaatttgctgaccgatcagcacattcggctgtacgctcgacagagcccgggtcagtgatcagctttgggtccatgccgggccttagctttcgtcgtcccgaaaaaggaatagttaaagaaaattaaaaagttagagaaaaaaaaacattaaaatttatatatatgattatttttaaaaatctaattaattctttaacgaattgacacatttacttttctgtttgcatttgctcaaaatttgaagcttttccacatcgaatttggtgagctcaaaattgtccgtaaagtcgacgccatcctcaacaaataaatgaacaaattta

SEQ ID NO: 13215 - DNA, 985 bp, Heterodera glycines
  unsure (1)..(985): unsure at all n locations
cttgctgcctgcggtcttttcggggggagggtgggtgaacgaactgctcccggtcgtgaatgtgtcgtcttttttgagttttggcattggaaaatttattacaggagaaagagggtgtaaagaaagggtagatgaatggcatcgcgtacaatggcaattttttatttttccctttctttcaaaaggtggcgacggcacactttggctcattgtgtgcacagattgcgccggaaaggcattgccggccctttgctcgtcgttccgctcgattcgatgatggaggacttcgatgtccatacaacactgcccgcactgatcgcagcattggtccgagcagaatttataaattaaaaaaaaagttaaatcgttgaaaattaaattttattaggaacggaaaaccccaatttttgggttctacgacggggcggagttggcatttcgtaaatatcaatttttcgaaggttccagaaatcatgaaatttaatttttacatttcgttatgggtgtacttcgttccctcccgtcctaatttttttttaatttcaaacttattgttagacatttaaaaaaaactgtttaataaatcactaaaaaatttcaaatgtttttttttgaaactttcttataaaaaatttctaactgaacattttttgatttttcggtggagggacgagctgcttcctttctttacagccttaatttttatacataatgtttctttttctgcagagagtgacgaccaacagcagcagccgtagtaataacgtggtccatctgctgccgccccggccgttggccgaggacacggcactcgtccactcgctggctgagtttgtcaaatatgtgatgctcaacccgcaaaagttttgtctttccacgccgacggatggaccaaagaatgaatganaatgaacattgaattcattagtccaatcattagtgtacacaagttttgtttgtttgttgttttgtgtgtgccttacca

SEQ ID NO: 13216 - DNA, 2852 bp, Heterodera glycines
  unsure (1)..(2852): unsure at all n locations
aaaaaatactttttagttaaagtgttcaaaaaatttatttttttgactataatcttaaaaaaaagtattaaaataaaacaaaattctatatttcttaaatatatatgttaataagaatttttattaattacaaaaatattaattttcctntttcctttgaatttccagatttttttggggttccctccccggacgacttgcccaccagccgagtctaattgcttggcacattgtgtggaaaattcgaagaattttcaggcctcgaagtgggagggaggggggggggagagagcagggctggacgcaatccaaaatttttttttccaaaaattcatttgtttagattaattgtgattgttgtgattagtcgttcaaaatgggcgccacagaaagcgttgaacacagcaaaagcgatctgcagcagctgaagggcgatatattcgtcaatgggaggtgacggaccacgtcatcgttctattggcttaattttacaattaaatatggaaaaattgacccaatttggcatacaaattaatctatcgatgcaatgtgccattaaaaacaaatacaccgagccattttggccccaaaaatggttcccttggccgattgggcacaaaaataaatgcatcaaccaaatttggcataaaaatggataatttgccccaattagcattgaaaatgccccctttttcctcctcctagacctttccccgaccaaatttgccaacgaattgtcgctttggccatgggcggcatgcccccgcgggacattttgcgcaatttgcttgtaagttattgttgaggaggtcaacaaaatattcagacgtgtcagcaggaaatgttccggaataaatattgctttgctgtcatgagaatataacattccgtagcctccttcctcctaataccgtcccagtagaatactgtatctgtgtcatgacaactcgtacaaaagtcgactcatacatattgtacgagttgccattgccgcatttttcggtcacgcccccccccccccccccgatttttattatttttactcatcctgggaatttaattttaatgaaataaattttggatgagttaaggtgtcgagcggatgtgtttctaaaattcttgcaagttgtggcaccatcgatggccggtactgtttacaaggcacaccaatttgtctgatatattgtaaaaatgtcaaacttttttttaaagttccggaccccaaatgctgagtcaagaaatcgtcgagaaaataacggtaccgtttgttgtttgcgcgaaagtgcgcgcttcatcagtgatactgtaaaaacagatattattttaaaaagcatttgaaatgtatggtaagctcacgacagtatgccacttttttatacagtatcactgacgaattttttcggttgcgcaattttgcacaaatttttgccatcgcttatcatttttggttaagattacttttagctgtataaaactgaatacccgtccatttttgcttgggagatcagggaccggctgaagcaggacagtttgtgcacggcggagactttgccaagcgtgggttgccacaacccctcgggggaggacggtagcgccggaccggccattcatttatcgtcattaaaattgttttgttaccgattgtaaaggtgttcaatatttttgtaagcatgaattggtactggaacatacatgtaatccatttacagtatgtttgcatttcttggatttcgtgacttcctgttgtttttgaacgttcaaaaaaacagaattattgaattcaaacaaatttccttaaatttgggtcctttatactacaataagtaatgatacagtatcaaaaaataaatggacaataaaaaaatacttttggtagtgaaaggccggttcttcgcgaaagtaccgtataccctcgtccaactatgctactgtattggttataccattataatgtttaaagatctcgtcaatcaacactgtgcttcgttcccatgcaatattgtgaaagcagcagatgaaaagcaaatttgacgaaatcatgaaagaaaggagagggatgaatcggcaaacaaatgatggagacaattatttgattatttttttttgtttatttaatcgtcgcttgggtggtaaacgccatcataattttcttttacattttgtagcaatcaaatatggtgctctttcattcattttgaaatgaaaaaagaatgattgtttggcgttccgttggcccatcggtttgggccgaaaatgtccggtttttttcttttttgcttccacattagcatgttcgtttcgtatcgagttggctccgcggcaagaaaattagaaaatgactcttcactcataaaaaaccgtttgaatataaagcaaaatcaataaataaaacgagtcaaagagatttttcaattactgtgctctttcgaattttgaatatctaacaaaaggctatatttttccgatggatttgacccccgtcggcccttctgtcgctccgttggctttttcttcgtcttcaaccgatgcttcagccgttgaattgccatatgccgtcccaaactttggcacacccactgaaaaattgttgctgggcggggagctgattgccgtgccaagcgctctgttggccgatgtgtgtgtttactctatcattttttcagtgttttccaatgccaattttcgcaaaatttgccttctccctgcctataattcgactttttgttcatgttttggccgaattttcaggcatagaatgaaaacatgaaaattgttattttggaaaaccattcgcaatttttatacaaaaatcccaaacatcgaattaccttccccaatttctcgactctaga

SEQ ID NO: 13217 - DNA, 3809 bp, Heterodera glycines
  unsure (1)..(3809): unsure at all n locations
caaaatgtcgtggttcggaggcagttttggtgtatttgtgcatcacatgttcatccatgagaacagaagcacgaaacagaggagaggcaccgggggcacacaaaacaccaacccgaccacatgctcagcagccttttggaaccaatgggcgattgcgtactcgaacttttggtaccaaanccatggaancnctgggaatggtaagaaattcaccatttatgggaaggatagcacaccttctcccaatcggatggattcttccgcacgcacagccaacgtcgcttttcaagttcatcagatgtaaaagacgaatcactgccgctggttcgaatttggaatcgccatcaatggcgagaatatatgtgttgtcagcctaagcatcggtgcgaacattgaattattgcacagattccacgagggcaaaatttaggctcaaaagacctgcaattgtttgtcttctacgctcaaatgtgagtccataattcgatgcccgagcaaaaagtacatgtacatcacttgcgaccaacgctttttgtgtcggatcaaacgtttgtctttgagatgcacaaaaagaagtgagcccccattcaacgccagcacaagtcgacctccgtacggagtgttcagaagaatacggctgtacatgtccgcttcagcgttgtcggaacttgacaagacaaagcaaaaataccacggaaccaattgactaattaaataaaaccgagtcaattccatcagaacttcgaacaacagcttgaagtactcattcggaatgcgaccacattctttgtcatcagtccacgagtcatcgaagaaaatatgaactgaacaaatcacggaaagtttcaatttttgtagaaattaactggaaaatataaatcttaggtcaaaaaaaaggtgagaaaaatgcaattggggcgagcttgtcaattttaataaagaccttccaagcggaatttggttccttcaagggtatttttctccgacaaacgaatggcatgttcctcatcaagtctaaaaaatggcgaaaatttgacgaaaaaatgtcaaactttagaatggatttgatcatctgtgccatttcgttccgtgtctcgtgccacatcgtcgcacagacatacagtgtaaggattctgtccatttcgccattaaatattcttgaaatgctttcacggtagttgtaatcggagtcacaatcagtttccttgataattaaaattaaaattgcattttgtgatttcagagaacctttttagcgattgagcaacggaaaacaaccagagattggcaaatgtcaagcccactcatcatcggtgacatcgacacaattcttgatcaattaggtaaataaaaagtacagaacgtggaacaaacatttcgtccatctgatcgaagttctcaccacttataaaacgatagctccatttcatatatgagaaaagccaaatcaatgttatgtagaaatcggagaaaacgccttgccgttgcattcctacaaaaatttcattttaaacgcatcgatgacatcaacaaggaccttttacgcaataaatgctcaagtcaaaatgttgaaaaagagcattgattcgacaaataggaacgtaatgacaaaatgtatagaagaagaagaaaagcattggagtcgtgagaaagacggggtgtccaagcggaatgagttcaagtcgcatcgcagccaaaaagcggaagcaaaagcggagataaaagttgagagaaatgacaacaagcgcaagcagaaagataagtcttanagcgaataagcgaccaaaaagacaattttgagtacttagggccttggagcgttcccccgttgagcaacagagaagtcagcgtaccaaatgggatgttgtgattgcaaagggaaaaccccaaaaatcagcgcggcacacaaaaaacggaccacacaagcgcacacgcgcgtctccgcgttcagttttctcagtccatatttgagctgtggttggctaataagctgatgatacgctcgtccttctcacctcgtacaattcctgcaatacgccgcttgtgtgtttcgtgtccacccaactttcccagtgtccaactgcacacatcagaaaggataacggaagcaaaacgccgaaacggaactccaaatgcgcttgagtaagataccacaggtaggcaccagtgaaaagaacagcgaaaataaacgctgaaggaatgctagcgatgatgcgcatgaggcgccatccaatcggacgattggagtcggcagagctatgaaaacagcgaaaaactcggagaagataagaaatgcaatggaaagcagcgccaagcaaaacacagcggggcacgtccaaaagcggaaaaacattcaaagtcaggaaagaaagtccagcggcacgaagagattcaaacagaatgaactgaatgggagtcgtacgcaacacaatcgggcacaaataccatcggaaacagcgaatggtccgaagcagaagttggccgaaatctgacaagtgactggaaaagagcgaataagtccggcaccacttggatgagccaaagagcagcacaaaggcaggaaaagcgttcgaagttttgaattgccaacggcactagaattaaacaaaatagaaaaaacaaatattgaagcattaaactaaccggatgcacaatattcgtacaatttaactccctcgattaaacgatttgcaccgatatttgtagcaagaataacgacgatcgacttggatacgaaggttgcgagcagacaagtgcaatgagcaatcagaaaaatcccgaacttgaaaagatgcctatattttgtgctttttcgtcggattaccttcaaccattgaagccagcgaacataataagagtctgatttctggaaaatcctttttgaacgagcattggacctgaaggcatcccatctatgatcaggttgctggaaattcattggtcgcagccaacgaatgtaaattctcaatattgtaattgagcaagaagtttcctgttttttctttaaaattcagaattaaaatggattgagttaaacaaaaatgtagtctgtaaaagagctcattggacttgatattaatttactaaaatctaacgtgtaagtggtcaccccttcgttggatattttatttcttctgaataaataaaaaatattttaattaaattatatgtagagaatattgatcatatgaagtcaactaattcaaaattgcttaaaacggtttgaatcgatgcagaactattagaaatggatagttaaatagaattaagggcatgcttgctcttttcaggctgaaaaaaattccgggtcgtccaaatcagccgggaccagataaaaatttcgactttttttcaattttctttttataacatttttggtaattatttaattagtaattactaattaccaagcaatagctttgaaaaagcttctaaacatattgttggatttggtcaactgagaaaaaaatttaaaagttatgagccgggactcaaccgcacgctaaaaagcgctcaaaagcctttttaaattatttttttcaatttctgactgtagtttttttgcttggcggtcaaatcgtcactttttggctacgcggacgaattacaaccgtataaatttgctctactgctgcagtttagcgtccatttatttttacatgttcattcaatgactagggtttgtaattatatggaaatccatatttttttcctggactgttggaggcctgaaacgcatgaaaaacatgggttttagcttgggttngagcctctagggaagggagtctatatgcatattttccatattt

SEQ ID NO: 13218 - DNA, 1623 bp, Heterodera glycines
ttttactttgtccggtccggcaacctttctcttttccgtaagcatttccttttattcgaccctctctttccattcattccacaaacataagaccaatcgcacgatgcgccgccattttattttatttttttttgtcctgcttttcttataaaagtggcgaagcattttgttgctcttcgggaattatggccgattttgggctagcgggggttcccccttaaaagggcggaaaagcgcgctccttctccaatttcgcttcgactgtcacttccttcgattgaaaaaccaaaatatttttatttattccatttattattaaaataatagtttgaccatttcatttatcagctgctgttgtgggggggggggggggggaggaccaccgattgcgtcgtttgcgtgtgctcccccccaatgcttggccatcatattgcgtattctttggtcattggtgataagtccgcccgtttcttcttcttctcaaattctgatcgctttatttcattctcagggattggtgatacaaataaatcaatgaaatttgacaaaaataacaaaatgaatgcaccaaagcgtcacaacagcgtcagtttcactgacccatcaattttgccgacagaatgccaaaataggacgaaatggcgaagttattccacaaatttccaatcgaattgccatcctcacgggtcgctgttgagttttgtgatgcgacacaaagtgaaaaacggaggccccagcagagaggcggcgatgttcgctgttccctcctcgattccctcacttcccatggccattctccaggcgatgatcgccccgaatctgaagagtaagttgaaggcaaagtcaaattacaccaacgaaatttaagaaggccattattcctcgggtactttttcgttggacggcgagggaccgtccgttttttcgtcggtttgctcttcctccgtatcaacgacaggcgctcagagcaacgctttcggaaggactagcgaatgccaattgggcacaacgccaaatcggtcatccgacgatttttgcgtttgcccttcgccgtggaaatacgcgcaatcggaggaaaaagaaagtgagttaatgaagacaatatgaaaacaaacggacaccctgtcaatgattcagcaaatggatatttgttcattttgcactcaaattgggcactgcaaaaggaacgaatggaaaatcgacgggcaaatggcgacggtgccattctctgcgcggaagggtaagcgaaagggcggcctctcacaacgaagcgacgcatcgcaggaacacccaggcgcatttgctgtcgctggtcgccccgtggggcaaaagggtggtgaacgtcggccgaagcaccggtgacgagacggtcagaagcggtgactgccaccgactgttctcacacaacccgaacaatctgaacccatacgaatgaaaggtccgtccgatccgacgcgtccatttcccatcgatgtaaaaatcactcctccatttatggcaactgatgtgtacaaatataatttatgacaaatatcaatagcattcatttatccatttttcctttcttctgctgccgaattgccctttgtgtcgcaactttctctggggcactgtccgtctttt

SEQ ID NO: 13219 - DNA, 3680 bp, Heterodera glycines
  unsure (1)..(3680): unsure at all n locations
agctgtggaggcgtgccgccgcctggtccctccggcccctgtgacgagaccaaaccaccgaagccgaagcgacaacggcagcgcaaagcggcgacagcaaacagtgtcaatgccaacggcggcggtggcgcgggcagcagcggcggttcgccatcaaaggccagcaagaagggcgcctccggcgcggcacaatctgcgccgacagcgaatggcggaccgggccagcaaacgccgcccattggcggcgcaccgcccggcagcggaggcggcgccataacaccgatgggcgctggtggtccgttcatgggtggtgtgcctggacaggtgagcctgttcaaatttttgaaacattttggatgcttgcgaatggcattgtccggcggggctatcttaaaatccaccattttcctctacaaattgacattttaaggtttaaattagcttttcaagccaacgagtaattaattcttgaacaggttgccaaaatgttttttgaagttcgattttcgaaacacacggcgtatttttataaaagattattctgcatcgaaggttaaaagtggaaaaacgctttttgccattttgacccaaatgtttagaaatttttttaatcgccattttgaaaaaactaattaaaatcttttaatgccaatttgtagaggacagattggagtattaaaatagaataaagaaatttctgcaaccagacttttttgagattttttcatttaatcgcttttcaaaaaaaaaaatttcttttttttattttaatcgaaaattttgaataaagatttcaaattttcggggggtggggcggagcgatatgctctggtaattgtcatttcggcaatctttgcctcattctcctctctttttggcacagttccatccggcaggaatggcaccgccgggtcaataccaccacgaggtgttgacggtgggcgagccccagctgatggcctgttcgtacggggagcatgacgaacggcatatcacgcgggtggagaacacggcttttgctgccgcagcggcgggtggcggtgccatgggaccgccgccgatgccaccgccccagggcataatggtcagcagtgcgccgggaacttcagcgctgggcatgccaccgatgccggtgccgacgacagcgatgggcggcgacaacggtggtaagcgcatatttccgggggttaggcaccgttggaccccattgtgccatttttgaaaatcattttttggcacaaaaccgctacatattttttaaatttattcttctttgcttgggttgaaatgcgaacaaaaattcgctcaatttacagctcctccacaccatttgcttggtgccaacaacgacttcgagcagcacatccaacagcagcagcaacaacaacagcaaatgcccccgggcggcttgtggaatccgctgccgccagcaacaagcgcgggccccggcggcaacggcggagaccaggcgatgggcggaaatggcggctgatgactatttattgtgattggactgcttgctgccgtgcgttgaccgggctgctggtgatgatcattcttcgcgccaccgccgtctctttcctgtaccgtatcgcccaccgtattcctccgctgctgctcacttcgtctctctcctcccttcactctcccactctaactnatttctgttgttgccccgtgttgcgtgcgtgtgtgatcgacccatttgaactttgattgacctccttcctcatccccccccgntctcgttccttcgttccattgccctcgtcaccctcttcttctgtcactctttctttgctcattggcactttgtctcggaataaaaaaaacgatcttttcaaaggaaaagcatgtggtgcgcatctgtgcttcatggacatgttgaactaattttggcacaacatcccattacaaaaaaaaagtgttgtgccaacgatgttgttttgtttccttcgaatgtccaatgacgagagtctcgaaagcaatttgcttttgtaccattaggcattgaagaagtgtgtttcttgacttactgagtgagtgaccaattcctcccgcattttcctccatcccatgccgaaaatctcgtccaacgacacaaaactgaacacatgtgcttctccccctcgtttgcttgcattcactatttcacaaatttactttatttattgttttatttccataatgttttgttgcggatggcagcgatgagacgaaaaagaaatccgtgccaaattcctttttatttattccatgacaccactcaaaaagtgccattttgtatccgcaacctcagctgatcttaatttattttagctgattcttatttttcatacaaaattataaaagctagcccaaaattggcacggatccgccgccaaactttttttttttgtttcacttttgccatttgtggcatgtattcgggtcgcttagtccgagacctcggtgcctcaaaaagctcgagactctcgagtcaaccgacacttggtatcaaacctttcgagcagtacaataccggccggatgcatgtcacaatctcatccccattttctcccttttccacccacagtcccatcgatgccgtcctattttcctcctaaatatttgttttcccttttttggcacatttcaacatgctcctcatcatcattaagcagcacagaagcagagcaaacacaacacaacagcatcacgaaacaaagacaacaaacaacaacacattcattcgaattcattcgatgcgtccactcgcgcaaaaaaaataattatttttaattttatttcgctttttatacatatacaaaaattaattatggaccaaattattaaatttttattatatattttttccattttcctccattcattcgttcattgttcgtttttcttcttatattattattattgctctctcttttcctatttgaattttggtttcacattttcgttttttattttatttttattggagaaaatttaaatgttaaaaatttattatttaattgcatttaatcgagagtaaaacattaaaaaatatattttttgttttatctattagcaatgctttaatgataaatagaagggggtaattaatggcatggctcgagatgtaagagttagtgagaatattaatttaatccaattaaaaaataaaacaaatattattaagcattttaaatatttagaaaaagtgtttgataaattttcgagctaatgaaaagactatgagagaagcgaccatcagacagcagcagacgatgaagtcaaagtcataaatatactaatttatcaaagattattgttatgggttgtatgtgatcaaaatttgtttctcttccttgcttttttctataatgtagttctgcttactcccctctctctgttctctcccctccctctccctatgtctccttatacctttccctccctccccctcgtccctcccctctctcttcttccctctatcttccttctttctctctccctctctctcttcttccctctatctctctccctctctctcttcttccctctatctctctccctctctctcttcttccctctatcttccttccttcctctcttcttcgctctatctttctcccttctctcttcttccctctatcttcctccctccccctcgtccctcccctctctcttcctccctctatctt

SEQ ID NO: 13220 - DNA, 1453 bp, Heterodera glycines
tctctccctctctctctatctctcctaaattctttccatttccccaccacaattccctcattttccatgccattctcccaccattctcggcactgctgctggtgtgggtgtattcatttcaatgccatttaccccccatactttttttgttttttttcttgtctgactgcttttccttcccctttttcactttggttgcctcactgttaagctctgcgaggatgaaaaatgccatttttttgtgccgtccgtccttcgacgcgtgcgtcgctttgccattggcgtcgccgcattttgcttcttccgccgccacgcctttggggccaatttcgcttgaatgggaatgaatatggcgctaacaaatgctgccccccgcctttattcctttgactttgatgactaaaaaatcagtgccattctttttttttcaaaaggaataatttaaatttttgtaacgcggcaaaatttaaaattaaatttattttgattttaaaattcgattatttatttcattattaccacaacccaattaatttattttttaaattttattttagaaatatttttaaaaatagtaaaaaattattttattttattttattttattttattttattatcttttatcataaaattgagaattcaactcatttttttgtttcttttatattaaacacccccccccctctcccaaattactgtaatcgctcgtataatcatacaataccgtattcccgtggcattaaacaaaattttttttaaaattctatacgtattttttgccatttttgattttttgtgcccgcacgcccttctcatttcaaaattatccttctcctcgtctccttggtgactcgaagcaataaaaaaaacataaattagatgaacaatttgtattgaagtgccaaaaaatgaaattttgggattttacaatgttagaaattaaataaaaaaaaattttttttctcctaaaattttttctttcccatccaaaagtgccgaaaacaaaaattcgatttttgcttttttgccgacttaactgatggatgaagcttcttcttcaactgcttttgcttctgcaccgttcactcattgccttttgcgagaaggtcagaattggcattccgtcggtcggacttttcccccgggggcggaagggatgggatgggatgatgaattactttcttccgctccccccccccctttgggttcattggaaaagcgacaaaacaaaaagggccacggtattttcagacggacaaaaagcgccgcccccggggcattccgccggcgtcactttcaaattgggcgttaatttgtcaaaaataaattttccaattttaaacggcaatttgtgtccatttttggacatgaattaaaaaaggccaaagaatgttggccaactttcgtttttagcctaaattattagcggcacggctctttaaattaatgga

SEQ ID NO: 13221 - DNA, 2583 bp, Heterodera glycines
ttgtcccgggtccgtttatcaagcagtacagctgaaaccctggttatgtagtattaccatcatcagaaatttactacgatctacgactaagcacatatgtaatatatacttttagttttttccgtcatatataaaacttaatggcggaaattgatatggccgaatttgagggtgctggtgaacgttataagtttttgatacaaccagtaaaggatcttgcagccaattgggatttggatattgccaaaacgcttgaggattacatccggaaagtctgtagtttattcttaaattgaccaacatttttatataaaagcccaggttgttgcggaaactaaaagaatcgatgccgaagctccggatgatgaatataggcggcacaaagtgtaattaattggttcaccattcccaagaattttacctttttaagtttcaatttcgctgaggccgctttgctcatccacgggacgacgacagtttatgcgcgaaaagtcgactacgtattgcaaaaagcccaaaacttttttgatcaattgagggaggacgaaaacattcaccaccagcagcagcaaaaaggaaaacgaaggaaaggttttgaaattaacaatcgaattgactcttttcttgcattagatgatccattggaagaaggtgctgaagcgacaggggaagagatggacgaaaatgcaaatgcggacgacgcgggcgagggaagggaaaaacgccaaccgaaggctaaccaagtgggtcaaagggaacgaaggtttagtggcgccgcttggtaatttagttggatttatcccgccccctggttttctatgtaattgccttgctatcattgtcagatcaattacgcttccctgggccatttgctcgatcgtctcattgtcagccagcgtcggacttcgcttcttcccgtcgttccaatcgctttttttccactcactgacttcgagaaacgaaatgtgtcgctttgcacgcgcacaaatccaaccgaagtgttcggtaagatggaggacttcaagctcaattcgtgccacgtctatggggtgatttattctaatgttttttaaaaattattatcttcagtcaattgctctgctcgatttcaaaaacattgccatcgtcaacaaattttcgcaattagtgtgggaatttaatctttcctttttgcattaatttttgttttagcattaactcccaaaaaaacgatgcaaattttgtcggtttggagccattgatggagcaaactgaggatgattttaatggtaatattaactccattagattatgaatgcttttcagatgctttgagttgcgcttccaagtcaagcacagaaacaatgcatcgccaaaccgaccaacaggagatcgaacggcgcggcacggacacattggcaccaacccaacttcgacctaattccaatatcgaaaatgaaatgtgtgccatcgaaatgaattcggagttggcactgcaacgacatgacggtttggttgacgaggaaatgaacgagaacggaccaacaccggccctgacgcagcagcctcaaattgactttgaaaatgagatgttcgacaacgactccaccctcgtcccgccctcgccgcgtgattttttagaagtgagtgagcacgaaacgacgccggaaccaacgacagacaatgaggaaggggaagcaccgccgccggacatttcttctttggtgctgtgtttggcaatctttcggttcattggtcccgaattttttttttaattaaaattctgaaaacacatttctaaggctaatttgagccgctgagtacgaatctgaccaccttttcggcctttttcgaatcccgaacctaaagtcgaacaattttttaaaaaattcaaaaatttcaatttcatcaaatatgtacgcctagatgtccgggacaacgctccaattgttgttatttggacgaatatatgtgtcgataattcaacggaaaaaagttgtcaataattatttttagacgtatttatgtaaatatttgaaggaattcaaaattttgaattttttaaaaaaatgtttgaattcaggttcgggattcgaaattggccaaaatggtggtcagattcgaactcagcggctcaaattagccttagaaatgtgtttccagaatttatattaaaaaaaaaatttcgggaccaatgaaccgaaagattgccgctgttttcttataaatgctttgaattttctttttaggaatttttggatccgagtgaaacagtcactgaacaaagtcgtccttttcgtcgcaaagacaattgcgcaatgagtgctgtcaaacagatcaaggcacgaaaccgtcgcatcgaagtttgttcagattgtcgaatttggacacgcttttggaagagggaaggggggaaggctttatttctcaaaatcagactattcttacatttgtcagttaaaaattatcctgtccttttccgtttagcgagactgtcgtgagaaaggcgccccaaatgtggcgactataaaatgttacatcgaatcgcgcattttccgtcaccaactgaagaaacgtgcttatacacttggactttttaattca

SEQ ID NO: 13222 - DNA, 1563 bp, Heterodera glycines
cttactaccacactctctccccttcccctccctcttccccacaattcctcactctctccccttttctctcctatccctcccctctttcttctccccttcccttcacattcactccttcctctccccctcttcttctctcctcttcctcattctcttccttcccttcctgtcccccgcccctctctctctcctctttcctgcctccctttctcctccccttcccttcttcccccaccctctatgcccttttcctccctttctctctctcctcaaacccaccgaatttttcaccggctcctttatgtcccttttcgttattgggtcctttgctgacaacacattctccgacattagcatgtcctcctcttcctcctcccccctctgttccgtttcgccttcgttttgtgccgttccgctcgttccctctgcgagtgctgtgtccaactttttccgaattgctgcgatattcgcctgagtacggccggcatttgatggcatttgaatgtttttgcggctaaattcgatttcacttttttgttttttccttttttcgcggacctttcgttgaaatgcttctctagcactttcttctccgtttcggcattttccaactgtcggaaagtttcgtcgattgtctgaaaataaaagggtgatttgcgtcctttccgtggcatttattccctcctccgaccctaaggtccatgtccaaatttttgtccaattccgacaatttgtccaaaaccgtgccgaactgctccaattggtccttttgtccctcttggattagcatctctaccaactgattgctaaaagacgggaaagaattgcccaatcgctcggcctcggcccaccctctgtccgcagcttcgtcaatgtccctgaacaattcgaaaattttcacacgttcatcaaccatttcaccaaaaattggataagtaaactaaagagaaaatgagccaattaaacgaaacactttcggattaatgtacacaatactgtatgagaactttttaaaataaatttaaggcatttgaatttaatagtaaatgcgttttttattgtacacagtaaatacaacaacacaaaaattaaaaataataaaaaacgtttattttccattatttttcttccatcgatgcgcggagcgtcgcttcgtcccatgggccatggattgtgctgaaaataaaatttgtgtacaatgattttccaatcacttcagagatggtcagtcaccacctttttaggctttgcattcgaatgaaaagcaacggacagaaaaggacgacgaacaaatggagaacgagaaacataaaggcgaattggagaccaaccaaaagggagagggcgaggagagaaaggacggagaacggcacgaaacagaggggcgacagaaggggccaacgcgcaaaaagggctgatgaatggtcaaagtaattaggaaatgactaatgaattgggtaatactgacttttactggtcccataaaaaaagaataaaaaggctgtttttctacggttcttctttccacccgggggttatcggagacagagatcacgaatatga

SEQ ID NO: 13223 - DNA, 2998 bp, Heterodera glycines
attgaattaaatctcaatgcaatgcctgtttggcattgtgtttcttttttattcaccgtttctcagtcgaggccaaaaacagaagagacaaagcgaaagtgcgagcagaagaaaggccacaaggtcggattggagacgagaaatcagaaaaacggaagcggcgaggcaaagatttgccgacaaaggcaaactgacgctaaaacgggaaatgccatcgttaaaaagaaaataaaacattggcacgaacgaacaccggcacatttatgccgtagtcgtggacaaaaagactggcgaaaaagagcagaatggcacaggcgtaaatggtgtcagtgctaattgaagtggtcaatgtcctaaaattgcaattaaacaaacaattattggtcatttatccccctttctcaccttatcaccggagtaaaagcgtaaccaaacgcgagaattgtgacaaaagttcggcaatattcaacaaaatcggaagacgaaatttggaacagatccgacgatcggagaagcgcaaaatgagccaaaagagtggcggaagaagcgaaggaacaaaagcaaaacaaagcgaagggaccgaagacatcggaatggacaagttcaaagcagcaaaggaacagagcgacgaggtcaaaatgagccatgacagtgcacgcggcacaaatggcggaagaaaaagtgaaagggacgaagccaactgaaaacggacagtcaaaaacaaaacaaaaaagtaaggcaaaaaccaaagagactccgtaccatttgtcctgagttggtcgagaaacagtgtctcatcggtgtaattgtcgggaaagggctgccttttgtacaacactttctcccaccgaggacaattacatagccgacctttaccacggtgcattcatagttaaaaacgaaaaaagaaagccaaatgataaaatattgtgtaaatggaatcgaaaaaccaaggaaaggtcagtcatgaattaataagcatagttttatgaaatgattcgtcggtcgacaaataatgacaaagcaaaatgtgaaaagtcaatcctcacaaagaaaagtcatttctttcctcagctacgactttgactttttcgacctaagagtaaaaaatgagagtatttatttgaagccttcgtcaaactcacgtgattaggtccttgaactgcttcaacaccgtgtcctcgcgcctcgtccgctgttcgtcagtgaacgtgctgagcaatcgcttctcctccgcagtcagaatttggttctccttcctcagccgagtcgcttccatggctttgtgccgcgttccgctcattacgtaaccgaccgattcgaacgttgagatttcattggaagacagtccaatttcaccacggcgcggaatgcgctttccctgcgccgcgtacgcggccatcgctgcggcctccccgcgcaacatattgttacgggcactgaacagcaatgtttggttgaatttgcgctccattttcacctcgcgtccaatttcatttcgggtgccatcgtcgggttgagtttctgcagcaaatcttcgggaatttgggggccaatcatcgctgcctcctctttcttgctcttcttcacttgcatttctttcgtgaattcgacccattcgtcgccctttcctccaccctttgaagtttcgtcagaagacccactaaaagaggagaggaatcccttcaacacttttaggtggtatctttcaattatgctaaatatcgcctccctctgataacccctttctctgtccattaattacccctttgatgtcaccgatccctcccttttcgctctctcacctcgttgtgctgctctttcgctttgactttttgtgcttctttctccgcttgctttcctccttcctcttcttccccctctcttttctgcccctcttccgttttcgctttttgtcttccgacgattcgctgtccttcgatgactcttccgtcgtctcgtcggatgtttcctctttcgtggactgatcattttgctcttccctcgcttcctttcgcttccttttcttctcacttctattcttttccgaaatcacgtcccgcttcagctcctccttgagcattcgttctgcgattcgatgttcctcaaacactcgctccaattcgttgtgagttggcgaatagccccaaatgtgccgtactccgaccgccccgagccgttcgcgctcctcccgacgactgaagggaaagccaaggtaaaagccaacaccacatcgaccaattgttcagcaaatggaccaccgacctacgccattgccggtcttcggcttccgttcgtgccaaaacattccaattgtcgccctcttcaccgtccgattcccaattatttcttctcaccgatgttggagattcagttccatttactgaagaagccatctcgaacatagattaaataaattaatcatttttttaatgaaagtatacaacagacaaaaaaaaatgccgattttttcaaaagagaatacataaaactttaccgggattgaaaatcaaagcaaaaaatgtgtaaaaggcaagctaatggaagactaaattaagtttttagtgaggttgactagcacaattaaaaaggcaaaagcagcgcgaaagggcaaatgagctgaacaaatcattgtgaaaatcacaaattaggaaagttaaaggagggcaacttgactacgtacaatacaatatgagaaaaaaaaagaagcaatgggcattaaaaatggcaaaaattagtaaaattatccatcaaaatattcgcttaagggttccccctcggcaaattcgcaccacgtcccatctgaagaaaatgggcaaaaaatattgaaactcactaaaggatgagcaacagacccaattgttcacgtagcaaaatgcattggataaagcatcagtccaccgccaacaaaatccaacgcaacgctccaaagtaaaaaacggcaaaagccgagccgtcaacggagggccatctgctggcaatagatgaaaaagagaga

SEQ ID NO: 13224 - DNA, 3354 bp, Heterodera glycines
  unsure (1)..(3354): unsure at all n locations
ctccgtccgattgagtagaatttcctcccattttccgctccccctttggagaaggacggagtaaatgggtgaatggaagcttaacggctcccgttttcctccaaacccgtggacctccatctcttcggaggtgagtttgtgcgggcggagcttatcgataagcggatccgctccgtacgttgtttggcttcccgggtcaaagagcactgcaactttgattatattccggctgtcgcgacttgacttagccagcagccgtcgcatcatcagatacgcgtgcggatttttgcacttgggaaccttgttggctctccctttgctggtgtccacggtggacatccccatggattgaacgatctccccctctcttggcggagggtttgactgatcgttctgttgaaacccagccgtgatcaggtgggtttggctttccacctgccgctgatggaactttcgccctcctggctctcttcccgacttgggggaggaagcggaacgattcccatttgaccgtgaatgggactcctccctcttgaagcatatgaggaagtggtgtttgttgccacagtttcggcaacggtatggtgaggtgcactcctcagtgttgtgaccttgcacaaggcagttgaggcagcgctgctgttctgtcagccgttttcggcgagctcccggtgttgggaacgccgggcactcgctcgggagatgatcagttcccgagcagagcgagcaggaccgaccccatttccttgctggggttttggccctttccggatttttgttaatagcggagaacgccctatattctggctgaggcgttcctccgcgattaaatggccttggtggttggctctgtcggttgttggagtgacggtggtcacccctttgatcccaggcacccctctgttgaggtggggaattgaaggcggatgaacgtggtcgttcatcgcctcggaggacatgtgcacatctctgcacttcctcctttacttccactattgtttgaagtgcctttctgatgtcaaggcacgaaaatgtctttcctgaggaaagctctttctccaccacgtgggtgaggatggagaaaggaagcttcgacttgatcgtcgaagccatgaacatgttgtcctcagattcgccgaagtccattagttggaaacagattcgttccacggactctgcgaagttgcggagcgagagcactgactctcccggcttggggaggtgcagtagctctgcctgcaaggactcagtgatagttttactatcaccgaaccgcttcttcaagatgtcgacaaccctcggataattttcgtccgagggtgggtacaagtcgactgcccgcctagctggcgagttgtggggaaggcaccccaacaaatagatgtgtttcttgaagtcgtcgattggaaggttgtccactgaggaacggaagagcctccaaaacatcggccactcccttggctctcccgcaaattttgggagagaaatgggagggagattcacctcatggcgaggtgggggaggctgaacatgttgaatttgtggaggattggcgggctgagagataatgctcccagttatttcgtcgtcatcctctggaccgatcactccatcgatcgtgtccactgcacctcgggctttgtccgaccattccatgaagtgctttcccgatggcttaaagtcatcgtagcgttgctcctcttgttggcggtcggctccattgaatttgagcaggagggattgccatttgtcattgcaatcctccaaaagccgaatcgctcggcggagtccacggcgctccgctgtgaggtctgcttgaatgctctcgtctgtcgtgtcctttccgagattgaccgtggccgcctcgatgtaggccttggtacgggcggcacaaggcccgatttttgagcggattggcccgctcatgttgattctcctgctttgggaggttcggctgctgatggccggagtcctttaacccttgttggtgaagactcgaagattcggctgctggtggccgtttgtgtctccccttgttgggtgagacttgggtcggcggcgatggccgaatgtgtcttgcctcttgttgggcaagacgaagaagtcggcgactggtggccgaatgtgccaaccctttgatgggttcggctaaatgagtcggctgctgatggccgaatgagtctcgccactggttgggcaagacgaagaagtcggcgactggtggccgaatgtgcctaccctttgatggattaggcgaatgagcggcggcgatggccgaatgagccttccctttgttgggttaggctaaatgagtcggctgctgatggccgagtgtcttgccactggttgggcaagatgaagagtcggctgctgatggccgaatgagccttcctccctttcggtagggagaaagtaaatcggcgactgtagccgatgttcttcaccccttggcgggcgaagactttttgatcggcggctacggccgattgaaggaggtcaggtcctttcggcaaggaacaactgacccctacggggctccaattttgtcgcagccaaggaggcgacaaaaacttttgtggggagcgagggaggcgagagccgactttgccaagggcaaaatcagctgtttgcttccccctttccctttctcggccgtgccttcccaaatgtgggggaagggacggacgagccggtggaagcgaaggcccgcaggagtgagagactcctgcggggaagaccgacgcggggcggacgacgacgcagacgctgagcagcagaagggggaggggaaaaccgtcccgaccaaatcccccggactcctttcacaaatatatatttattaagcagcagcagaaatgaatgaatggaaatgtggaagtgagcatttaatgaaaagggtgccctttttataggccgaaaatgtgagggcggggcacagaggaaaaaacttaattggactatcactagcaaaaagcgtgggaaaaacaaaaacagctggcgatcgataagatctgtcgctgctgtcagcgacataataatataaaacaaaaaaataaattctttttatacacaaaatataatgcacaaaataatttatatttctaagaagttagaaagagttacatttctcgggggcaaagaccgggaaaaaccgataaatgcatatgtaaacattaatttacaataaatatttgtaagaaataaaaaatttaattaaagaagaataacgcattcaaattattaatatttgggaaatttaatataagaatttaagaaaaataaaaacaaatgcatataanctaaatacttttaaagttaaattaatatgaaaaacatttaaattttaattggtaa

SEQ ID NO: 13225 - DNA, 2205 bp, Heterodera glycines
aattggttcccaagtccctccctctctgtcctctttgtgctggcaaaatgtctgcgtgatggcgtacgcttccttcgggtcgcccacttttgtgcccgtcccgtgcgcctccacataggccaccgcgttcgtgtccaattccgcctctctgtacacttcatccaaaagcaccgcctgccgctctcccaccggaaaggtgatgccctgctctttgtagccgtccgtgttgctcttcgcgtgcacaacagtcgcataaatacgacgcgcgacggaacgccgctggataattatggcagaaacaccctcagtacgacaatacctcaaaagagcagggaaacgatacagtatgtcatcggaaggaaaaaatgacatacccatccccggattggtcgaaggagcggcacgagccggcgggggaaagcatgcccaacttgagaaactgaagagccgcagtcggagtcagcgtaaggtgggcacctgagcaaagggcgggcgaaggttaaagcatttaaaaaatgctcaatgtcttaaaatcccccccccccccctaattatcttactgtccccctactattccccccccccactcgctcgcccccctcacccacctgccactattgctgcttcgcattgctcctggcgaatggcgtcgattgccaattgcaaggcgagcagtgaggaagaacaggcggtgtccacggagaaggacggaccgcgcaggtcgaaggcgtaggagaggcggttggagaacatcgaacgcacacagccggtcaaagtgtagccggtgaccatctccggatcctgagtgagtgctccgcccgtttcggaagcggaacagcccacaaaaacgccggttttggtgcctcggaattccattgggtttactcctgtgaatacattatttgtcgacgaaatccctcgccgttttgctcaaccgatggctaaagaaagacactcacccgagtcaatcattgcttcgtaggccacttcgagcagtattcgcacttgcgggtccatgtaattggcctgcaatttgctttttactttgcacaattccctattcccacttgtttcggcgtcacgctgaaaaattgcgcgtcgaatttgcgcaattccttcagttttccgtgccttttcggcagatcataaaagccttaaataaatggggcatttaattgtctgtcattggtggaattctgcggaaataaggccaatcggacctggaggccatctgagttcgtcctctgtgaccaggtcctccccagccaacagcaaatctccgaattgtttgacgttgtcactgcgcgggaatcgtccactgatcccactgatcaccaactcttcctgatcacgccaaaagggccgcgaggacggcgaatggggcgtttgaagaagttcgggggggtccgactcggaagacgggggcgatgaagtcgacatttcgttttggtcagaagactgagcttggaaggagggaaattttcaaatagttaaaaaaaatgggactgttcaaaattgtaagtgacgtcattgtttaagaaggaaagatttttaggaagataattaaatgatggaaaggacgaagaagagaggaggaggagaacgattggaatgggaagaaagggaggaaattcggtgagttggatcagcaccagaaaatgattgggggggggggagggggagggggcgatgattggggccaatcggcggacgaattggcagcaattccgagaaaaggcgaggcggcggtgatcagcgcagcgattgagtgggttaagagaaaggaacaaatcaaaaagcaaccgaaaacattaaaaaattggccaacgcacgaaaaatgagcgaccgaacggatggacgaagcgaaaaaggaccgccgaaggtccattcatccgaacgaagcggagaaagggtcagaggaaggcgaacgaacggaacgcagagggaagaaagacgaaccgaccaaaccaaaccaaggtcacccaccactgctcggttaagcgtcggcaatgtccgatcagtttggatgattcgcgcaataagtgagaaggggggggggagacaaaaggaagggaagggggggggggatttcgaacatcggcaagggaaaacgatgaataaattttgaacggggggggggagtcccatcggagggggtggaggggatcgagaatgctgactgacccttggggcaatgaaagttaa

SEQ ID NO: 13226 - DNA, 1031 bp, Heterodera glycines
cttggggcaatgaaagttaaaatgataggctcacggaggaggttgaggaagaggcggagcaggtcgcctcgatgcgctcccaactgcccccggcgctgctcaactcgcccgccgaggaggaggaagagtgatggtcgctgctgactcctcctcctgtctcctccatctgattgttatcaactgtggcgatctccgttgtcgggatgaggtgaacaaaggggaggagcaaagagaacggagaggaagaggagcaagaagaataggaggagcaaaaggaggaggaggaaagggaggaagaagaagaagaggaggaggaaagggaggaagaagaagaagaagaagaagaaaggagacggacggaagagtcgacggaagaaaagagtcgacggaagagaagagtcgctgttcagaatttgtgctctgccggcggcgctgagatccgtttgaaagtgagcgtaatgaataatattacaaataacaaagtgccttcttcgatttaatctgaaaaggtaatgtgggaaagtggatgaaaggagataatggaggagaaaaagcgggggaaggggcggatgaagacgaaaaaggtcgaaatgtgaaaaatgagtggggaggggggcacaggacgatgaaagtgcgggagggacagagtgatcttcgagacggcggccatcacttcgcctcccccaccccatttagcgaacaaatttttgtttaaagcgcgaacgtagacaccaagtgcgggaatttgccccgggcatgggaatgtgtgaagaaaagttggtaggaagcggaggagcgaaggaagaggaagaagagcggaagagagagaaagaaaaagtgagaggggaaggaaagggaaaaaaggaagaaaaaaggaagaaatgggaggaagtaaaggagaaagagagaagaaattggaggaagtgaaggagaaagagagagcagcaagggtaagggaatacaggaaaaggaggaaaggagtaagctaaaaagagaggaagaaaaggaaaaaaaggtggaatgaaaaagga

SEQ ID NO: 13227 - DNA, 2941 bp, Heterodera glycines
tgttttattaatttattttaaattattttctgatgaataactgttttatttaatttgaattttcgagaaattaattcctttcaatttcaataaatattctatattataaatttcgaactttatcatagttttacttcttttaatcactgttgtgcctcttttaatcccttttatatctcttaatccctgtgtgattgcccgtctgagttcaactaaattttaaaaacgggcgcgaagcgcccgtccaaggccaaaaaattgaaaaacgggtgcgaagcgcccgtatgagttcaatagccgacggttcacgcacccgctagtatatatgttatataggttttgagtttcgtttcaaaaaacaaaatctcccggccgaaggccgggagcgccctgaaagtagtggaagggtcttacaactttttgaggcgcatccgggaaaaatataggttttccggtccaagggccaactgagtaccagggactgatttctcattttttcgtgcgtttgacggctcgtaactttttttctaaatcccgaatcaaaaactttccgctggtaggaacctaagttgaagtgttgtctaaaagtcaaaaaaaattccaggcctctacctatagtaggaagggctgcagaaaataggagaaattcagtaccaactttgtccagttcagtcccaggtgaataccgagtcagggtttgatctgagcgagggggctccagcggacttattgtagagctttgaaagctcgatttttccaaattttaaaatttcgaaaattttcaaaaattttcgagttaggcctaaaagtaggttttggggtttttgaattttatgaatttttaacgaattttcctagagaaatggagaccacttccaaaacatagtttttcgagctctatcgactggtatttttttcggaaaaatttcgattttttcccggaaatagaaaaaaattttggcctgagcgggacatttgagtcccgggctcataactcgttaggggttggttttagccaaaaattgtcttagaacatttttgtagagcttttaaattgctatctaatgaggtactataggtcggaaaaatttcaaaaattttcgagctaggccccctagaaattttcggaaattttttttcggacgaaaatgggggtgaaaattttttttctggggtattttgaggtgctgagcacgaatatgacctttgtttttcgtttcagattttttggaattttttaaaaatttttgaaaattcgtcaattttttggccttcgggattttgggttaattttcgaaaattcataacaaatcgaagggtggatcaattttcatgcaattatattgtaaaaatagagaaaaatcaggagaattttatgggatttatttgggatttctatcttaaaaagaaaaaaagttattccagaatttctgaaaattttcgatttttcagaaaaaaattcataacccccttctgaaaagaaatttttgaaaattaaaatactacaaaaatccgcaatttttttctttaaaatataaatcttattttacatttttatcactttcttacgaattgttacaaaaataaaaccgattttggtattcgggaccaaaggggtgagcataggatttttgagttgaaaaattttttcaccaaaaatcttcaaaaaatatgtctttaggggttatttgggcccctgatcacgaatacgtaatcagattttacttttgacatggttaagacctcagaatccctgtgtgattggggattctgaggcacccttatgaggaggggagaggcaggttcggacccggacggtgtacattatttttctatgcatttttgggttattttcactgtttttaattaatttgaagatttgttttaaattatttaaatttatttttttttaaattaaagaaattattttttgttttattattaataacaaaataattttaattaaatttaatttttcttttgatgaatagaattatttttaagcaaaattagatttaaaaatttggatgcataataattcatttcaaaataaagtaaaataaattattccgtttattaattaaaaaataaacttttacattttttattatttagttttttttaaatttttaaataaacctaattctataaaattatgatattatttttgtacatctcataacaagttaacttttgtacctcttctatttactgttgtacctcttctaatcactgttgtacctcttctaatcactgttgtacctcttttaatcactgttgtacctcttctaatcacttttgtacctcttctaatcacagttgtacctcttctaatcacttttatacctcttttatcaaatttgtacctcttctaatctctgttgtacctcttctaatcactcttctaatcgctgttgtacctcttctaatcactcttctaatcgctgttgtacctcttctatttactttgtacctcttttaatcactgttgtacctcttctatttactgttgtaccttttttaatcactgttgaacctcttctaatcacttttgtacctcttctaaacacttttgtacctcttctatgggcaaattttttcctccaaaattgcttaaaaatgacttttctgggctattttgggccgcttatcacgaatatgacatttattttagtttcagatactttgggttcgtttaaaaattttttgaaaattcaggattttttggcccctgggaatttggtgtaattttcaaaaattcgtaactcgggttagggagggtgaattttcacaatcaaataattaaaaaatgagaaaaaatacggcacattttatgccttttatttggtatttaaacaacggataagaaaaaagatattccaaaatttctgaaaattttcgaattttcagaaaaaaattcataacacccttcatattaggg

SEQ ID NO: 13228 - DNA, 909 bp, Heterodera glycines
cattggccagaatgaccttatttttgttcaccgccaacttctttcttgcatataaagtgccaaaaaaatatatatataaataaaaatgattttttaataaaattacacttaaaattaattgaataattttaggtgcttccgtctgatcccgaaaatcctccaagttctgataaagtccctgccttaactgttggtgcacacgaattcacgtgccatgtgatgccttatttggacattcagtgatttgacttaatgagattaattaatttttgatttgtcgagaacaatatttttattacaatttaatttgaaattgagttaaaaaattgagagatatttttgaaagaatgctgaatgccaaaaatttaaaaaattttccaataggcaaagtgccaagtataaagtgcaaccacaactttgaaatcaagtacatttgaaaaaaggcaaaaaagcaaaaacaaagtatgtacttggaaatcaattacaaataaaccgtatccgaaccctgtaattatgtataataattaaagggttgtgaagaaaactacagtaaactcaaaataaattgggatttaattgaattttgaaggacagcagtactccgatcccccgtccccgataaatctgtccccgaaagggtcgtcgggggtgtttctccaaaatttccataatccatgtgttatcaaaaaacagcagggggcgaaactctgttaccactcccgcccggtctactggtagttgttgttctccggtgacaattgtcacaagtgctggacggagtatggtaatgccaccgacgaaattgatccggttacggtggaacactttcatgtacagcatacggcaatccgagcgtatggttttgttcagtgccaaataaatcaccgacggaaagcctttgatgagtga

SEQ ID NO: 13229 - DNA, 1597 bp, Heterodera glycines
ttcgctaattcctaaaatttttatgtactgaattcttcattgtgccaaattaatacatcaatcccgactctgccctctccaggctccccaatttgctcgaccatattggatcaattgttgcctcaattgttccattaaacttcctctcgaggaagcctcttcttctcaatctcaataccaaatggtcaatgttgattattctaaattgagagtttgcaaaaaagaaatgccaaaattcaaattttcaaaagttaattaacggccggctctttcagtttccattagtgaacgctcactaattaactccaatggaacttgaatttattttgttgtatattgataatgccaaccaaccagccttacccgtatctgcactgcgctgatatccgaaagcacagtgccaaactgttgacgagttttgcggacattgtaaaaaagttgggccgcaaaaatcagatagacgagcgggcacagaattgagaccaggccattgtgcacaacatgcaaccagttttcatactgtaagaacgggcttcattttacaaggtgtacggtacatacagttctttgagttcataccatatttcgaatacctatgcattttgcttctttcaaatgataaaaacagatagatacacattttgtttacctcctcaagatttgtgttacggtagccaacaaatgggtagaagaaccagccaaagtaaaggctactgtacaccgccggcttaatgaatagggcccagtacagtgcgtacagtgaacagccgatgatccaaaacgaggtacgacgcccggagaaaaacaagttggacaaatagggtgagctcagatccaagcagcggttcagtgccaacacctataatgccaagtacgttttttggcaattaaaaacaaaaaaatgccaaccaaatcagcggtgctttcggcattccattgggctaaaaattggggggaaccattttttcaaaaaataccgtctggctcacattaattgccatgccagtgaaataaatcagtgtcggattggagcagaaaatagcgccacggaaattcagccatgcactgaagaagccgatcatgcacaaaatgcccaaatcgacgcagccaatgtagaacaacagcttataacaggagttgtcgcgcatgtgcttccaaatggagtacatgcaggggatgtacagtatctgttccggtaggaattgtatacggtattttatggtgaatcagtctgactttttggtgccagcgaatttaagtttgcaagggtagaatttcgatgtactacatgcaacaccttcgatgtgctcgccatatgtagccccgattttcaatgtgttaggcctcagaattttttttgttgcgatatttttttgtattttttgaaaatttccctttgttttcagggcatcaccgaattgcctaaataaaaaacacccaattagaatggcctattataaaaaattactgatcagattgggttttgttttcgctttttgataaaaaatgcatccacttagtatcacggtaacttcacagtactgtatattttaattttatctacaatgtatttgtaccgtacatacataataaatgg

SEQ ID NO: 13230 - DNA, 3248 bp, Heterodera glycines
  unsure (1)..(3248): unsure at all n locations
aaaattttttggtcaaaaaatgacagtcctatttattcaagacttaatttaattaaaaaaaaatttagttaactcaaaagttgtattcgcttgcccaaaatacacttgatgccaaaaattcgagtattaagaaaatttatgccaaatttgaaacaaataattgcctgagatttagcaaaaagttaaaaaccaaggaggaattcatgaacgaattcaaggtaaaataaataaaatacccaaaaataaataaattgaatgtcagtgcttttaaggttagctttgatcaaaaaactatctacatcaacaaagcagaagaaaaagctgaaattaagagcaataaatattttaatgaagaactaacatatagcatttcaagagaatattttgctggtcagttttatttattttttaaataaaaaaaataaaataatttcgctaatcccaaaattataagccaaaattataagtccaattaattgattaatttaattttttttttgctattttttatacttccaagctctcgtctagccgaatttttttttacccaccatatcttccacacagatattaagaagtggacaaaaaaaattgaaaatatagaaggaaaaaaattatgaatttgaatttctcactgaaaattgcataaagaattaaatattattggtgtataataaaaaataaataaataataataatttaacataaaacaaaatgaattttggttgagaaaaatttttataatttcaaaaaatgaacaataaaatcgaaagtgttatttaagcaaaaagttcaagcgaagaagcaagctcatctgcagcatcatcaaccaagcaaaaatggaagcaattaggaaagatggtcaaatcacttccattgttgggcggaaaggacaacgacaaaaagaaatttgaacagtataaaaagaagccacacgtttttgatatatataaaaaggacagtaggggatgagaagatacagtaggatgttgtaacgtaaggatggatttggatggagacacaaagggatgtgacggatttttttcttccgattttcttgatactgagtcggcacaaaattttgagcaattttttcagatttttccttgaaaattcttaaattgccaattcagtaccaagaatttgaaaagttcggtcacattcctaatggagactactgtatgatttctttctggttatttgtaatttattcttttttttggtaatctttggccttcattggttttaactgtcacacttttttctattattgtaaattttcttatttcgatccattttcgttggaattatacaattttatttcaatttttgcggataaaacttttttattaattcaatttgtgcaaaatttagaaatatttgtacagcagaaaatggaaacttttgataaaatgctttaattacgttatttttcaataaatatcttttaattgtatgcgaaagcataatcaaattaaatatttgaggcaaaaaataagaaataaatttaaaaaaaagaattttcaggaactttaataatttgtaaaaagaagtatgataatgtgatgaaattttttaatttaatttttttttggtataaaattagcaaatttccaaaaagttccccaatcccgagtgccagtcttttccattctcgagtttttcaaggaataatcactcaaaatttgtcaatttatttaaatatgataaactcaaaggccaccaaaaaacaaattataaaaaagattttttaataataacaaatttcacaaattaattctgttaaatcactgaatgtgcaaatagggcatcacatggcacgtgaattcgtgtgcaccaacagttaaggcagggactttatcagaacttggaggatttttgagatcagacggaagcacctaaaattatttattaattttaaatgtaatttaattataaatattttggcactttatatgcgagaaagaagttggcggtgaacaaaaataaggtcattcgggtcaatgcttcaccagggcattgtctaagaagcaaaattatttttaaaataaattaaaattatttttaataaaaaaggaagttaattcacctcttcccaactccaaatggaattaatttgtcacattttttcaattttccctcatcgtccaaaaagcgctctggccaaaattggtggggttcggcaaagtactaaaaaaaatgttcggaaattaaaaaaaaattttttttttgcaatttgttacgcagttttttgctgaattttaccaaattttcctaccttttcactgaagaggacactgctgatctgaaaaataaaactaaaaaatatttcgccggattttttgtccacctgtggcacaatcggtgtgccactttccaccgtaaaattgccaacttttatttcatcaagagtcatatgagggttgttgaacacaaccaaatttgtcaaacgcaatgtttcctaaaaaataaaaaattaatttttaattaaaatagatttacgcattttgactcaaatatttagttttttatgaattcagaaaatatttttattacatctagaaataataatttatttaaattgaaaatcataacagtgcggaaacagatatgaagcaaaaaaagagaggcaagttgggaaagtaaatttgcactttttgaaagaattttggctatgtgccaactaattatatctttttgtccaaattttaatgacgtactttcacagatactaattaacacttgtaaaagatacaaattatctcaccacaaaagatgaacaattggcagattgtctaaacaattttaacaaattgtttgactcgagacttaatctatccagcttttactgccatgacacaaaatttatttagcgaataatatcaaaaaaaagtcggaggtgaaaatgagaagaaaattaatattatcaaacaaaaacataatttaattaattcatgagagaaataaaagtaatttttaaaaaagtaatttaacaaaaatatttagcgccagctattaattaatttaaattanaaaatactagacatttaacaaaatagcttaacgcaaaacaggtactataattaatttatttattttttgtttaatatcctttatattanngattattgaaagaaaagacattgaggcaggaagtaaaaaacaaagatttatttaaattataacccttttttatttgngtcattactagtattttgaaacttttaaaaaaataataatgtgattaa

SEQ ID NO: 13231 - DNA, 1623 bp, Heterodera glycines
tatgtcgaaggtgagcagtcgaaattccccgttaattgccttaattatttaattgctttactttttcggtcgactcgccggtcgtcgcatttggtggtgtccgagtggcgaaggtttggtttcgaattgccgtaattaaattatgcctatgttttggcacacatcaattaattaataattaatgccaggttatttggcttattgtccccagcccacggacttcgaacagtacacttactgttgtctgtactaccatttgggtgttgaccgaccttcgtgctgtcgcttcccatttcataccggtagtgggcaaggcattttgccagctttgaagttttaagtaaaaattttaaaaattatcccccccccccttgtgaaatgccctcaggcaaaaagacataagagaattcagcatcaattagcgatgcattaattgtaattcattcaggtgtgatcattgcactgtttgtttcgagtgttgtcgcctttttgggtaattatggtcaatttacattttatctaatttcattttagttaattaattattatttttagttctattgtttctaatgtgttggttttgcccaatttgtccgttggccaaaaaattgagggaaagaaaagaagaggaggctgaaaatagtggagaaatggacgaataaatgaagagaaaagagggaatagagaaaaaaagggaagtgatcgaaaaatgaccaattgacgatcagaagaagaacagaaaatgagaaaataaagtgccggttttgatattccgaattaattagttattgtttgttttttcattttcaccaaaattcaaattattttttaaaatattttaaattattattttttgatttttgtcaatttttcataaaaagccattcaaaggaatgaaagcaatcggcggatgagtggccacagaattgtgggacaatgacaacgaaacaaaacaaaacaaaagggcgtcgtcacaaaggtcgcttcgcttatcgatgaattcattccgcgatcaatcaagctgctaattgacacactccgaagtgaccaaaaatattccgagaaaagcgcccttttttcattttaaatttattcatttttaaagtaattaaatgacgaataaaccgcagttcatccataatccaaacatttctcattagtgagtgatggttcgaattcgaattcggcactcactgctcatttaaatgacgaacaatcgaaaaatatttacaaattaactattaatgtgttagtttccattttggtgtgtctccgcacacattgctaattaatttcattaacggaaacgacgaaacggtgaattgagagacagaacagacactctttgaaggtgatggttcagcgacggcggttcatttcaatgatcaatttcttgggtttggttttatttttaattgcatttgcccattgattttttttctttttttctactgatcttttggcttttcctttttagcttttcctccaaatgaccgtctcttataatcaggacattatcaacacccattccctcacttttttgcgtgtcatttttcgctggagaggctcagtgtggaaatcggttgggaaaagcgagcccattttgggaaataattttaaata

SEQ ID NO: 13232 - DNA, 1188 bp, Heterodera glycines
tgaaatatatgaacgagcggtgaagcctttgagggaaaaactatgggacggtcctctcggggaagcttcttcttctctatctcagtatcaattggccccaacttcagaaattgcaaatgctgatcaattacgactgggtgcccgtccctctgggcaagtccctccctttcccttccctttgcctttggccaaatgccgtgccctcccctcccccttcagcttattctcaggtcgttttcttggccactcgcgtttacttccttttgtgtttgtttgggcgccaatttcgcatttgggagcaaagggattccatggcttacttcgaatattactttccgctgatgacttttctgcaactgatgtgttacatgggctggctgaaaatggccgaatctttgctcaaccctttgggggaggacgacgaggactttgagagttcgtttcgcaatacgtacgctgaaaaacgacgaaaaacaattcgacgctttttcaggcggttatataatcgaccgaaatttggccgttgggatgacaatggtggacgaattctatggccaactgcccacccaaaagccggacaaattcggcaaggagggcgaagtgccgtcagcgtacacagagttagcgggggtcagtcattggcactttgccaactcaatggaaatggcatttcggctcagaatgagtcccaacatcaactggtcggatctgccaaattggctgctgagaacaatccgagtgttttggaagggacggcggaacgccaaacgccgccgacaaaaagtgggagagattaaaaacaaaatatattaaaaacatttgtaaagacgaacggaagcgcagcagcattttcgggaggtttctgcaaagggcgagcggcgatcgaattggcacggacgacgcgggacggaagcggcacaatcggtcgctgttcggcacacgacggcgatcggcgacaacggcgggcccaataagtgccgaagagggaaaagaaaaaatggtaaaggcacttgggaaaaagtaaacgaaattgaaaaatgagaccaaaactaactttgaatgaaaattcgtggaagcagcgcaaatcgaattcaatcgcttgtgcccctattcgccacttcctacgacaaaatcatttggccgcccccaaaagacaaagagacggacgaacagcagctcaattgtgaa

SEQ ID NO: 13233 - DNA, 1270 bp, Heterodera glycines
  unsure (1)..(1270): unsure at all n locations
attcatgagacagcattaatgaatcctcctagtgtatttctcaagcaccgtaccatcaatgacattntacaatacatcactgatttaccagtgatttatccctttctntaatatgcgaatgttttaaaaatgtaaacncaagcaagggtgggaatttgggctcataattgacagaacggaagaattaggcgattcattcaattaattatgagaaatttggcgcatatggcctcaattaaaaacacttgcatgacaaatttattatcaaaaatgaaataaacaattaataaattctgattttttattgttcgttattatttacttttttgcgctttccagaaagaataaataatcacaacgaatttcgcactatttttgtcccatatatgtccgtccatcctttgggattaaaaggagtgaatttgctgctgctttaatgccctcttccttttggcttctccctctgatcaatccattgatcgttcggtggcattgactgatcggagatggatggatgactcatctcctgctgcttttccctgcttaatttgttttgttatgcctttggcattgccaatttctctcactttttgtgttcaacaactgttcaatttactcatgtcaatctcttcttttcgatctgttcttttggctatgtctcaatgctctccattttttcctcttctttcgacggacggacaaattaataaattgttttattttgggataacatttaattattcatttggatattaatgttttgtagattttgtataatttcatcaaatctttgagaaatgaaaattcattgcatttttttcattcttcttatcaacgaacttttcgttgttcctcttatttttggacaaccaattaaagaaaaaaggtatttttaatatttgcttaaattaaaaaaaacataattttaaaaataaatagtcaatatggattaacactgtcaaatcaagctgaaattttaatggaaatgtgcatccttggaattcgctaggtttttttgagttgaccaaatttgtttttccaaaaattttccgattttcagtgtattagagggtgtcccggtcactctaaacgaatgatttgaccaagttggtgttgaaatatttttttgtcggcttcagcgggaattagcttgaaataattgaaaactccttttcaaagtcaaaatttggcggttttttaacaataagtgattctatagggataaagtttttgaatgatttaaaatacaactcaaattaatgccaacatt

SEQ ID NO: 13234 - DNA, 3678 bp, Heterodera glycines
aatgcagtaaatttgaaacaaatcgaataaaatacctttacgagaagcaaagaaaataatgatgagccatcaaaaaatgaaacattttctttcccgtacctaaaggtgtgagggcggcggaacgggcgagaaaccgcaaataccgtatgctacagcaaccaaaagaaaaacattgcaattgtgccaacaaacaccagcataatcatcctgatcatcacgagaagaaggtgcactgaacaacggcacaaaagagtgattgcttgctgcccgctgttctcgaggcgctctttcaattttcgattcccaaaattttttcgtcagagaactctcgaacatttttcccggtccatcacataaatacaagccaaaaagaagccatatgatcgatcatctctgtacttttgtccaaatcaagaaattgctgtgttcatcatccccaattaaccatttttttgtctccaaattcgggtttgattatttgtttaaaatcttttttatttattgtaaaatatatgtttgtgccttttttttgttgttaaatccattttggcttttccctttctctgcttcctgctgtcgttgtacagcttcgaccggttgaatgcaccaaagttgggcgggaggaagtgctcagctggatttattttttttttttaatttgcattttttcgctaaaattggcaaatttttttgaccctggcattccaaactatgacctgtatgcatagtcgaaaaattgaaatcagaaattatacgactcaatttttcaattatgttcagtgatgccatcatgggattccgtttttcgaatttttggattggaatttcgatttccgaattttttttgggccttggaattgcaccccctgttgtttcaatttgaaaaagcctatcacgtcacacatttcgaattactgtgagtaaaaagtaacaaaaaaatttcttgttttgaaagccgacaccaaattttgttctgaacttacccgtctcgtcagtgtcggttttgttgctctcaaatgttgttgttgttgcggttgcgtcggttgtgccggtgccattgctttgccatccttctgctgttgctgcttttcttggcattgtggtgtttgccctctgcagatcatcatcatcatttgacaactgccaacagttgtattggttgcagcagttgttacgctccttctgctgccggtactgctaccattgctgttgttgctggtcggtgttgctgatgatggtttcattttctgaaagtcgaaatttccgtcgtttttttaagtaataatttttgatcataaaaaaatcaaattcccaaaaatatttttatggaccaaaaacgaaacatgaaaccaaaaataccgaaaaagggggaccaaatgaaaaacaaaatttcatgcatccttgactcgcatttgggctgggccgaaaagcttggcttactatctgaagcctatgttcaaacccgagaattttcgaaaatataagtaccgcaactactgctgcagttgctgtcgctgttgcacatccgccaccaattgtcgtgacatttttgtccgttttaaatggaccggcggatgccgtaactgttgccttttggcccaaagtgccgaccccgccatgtgctgctgctggcttctgcacctttggttggcacgctttcacctgtgatggcttcaacggccgatccggcatagaggatgatgaggaacacatctgttgctgatgtggggctcgcttctgctggtgctgatcagcctcaatcgtcgtcgtcgttattccatggacattgttgttgttgctgttcggtttggcaacaattcgaatccgacacaccgctggtgcgcattttggtgccgacgatgggtcggcggttatgttggcagtgcactttggtgccggtgccaaattgttgttagtccgcttttgtgccgttcgtagaacaccagcagctgctggtggtagcactcgtaaagcattcggctttacatttattgttgatgcagcagctgttctgttgttattcgtcccaaactgttgctgttgtcctccaactcgttctgacactgtttggccatgagttcgttgagcatttgcctttactcgttgccgtttttgttgttgcgtctccgccgtactgttccgatcggttaacaaatgcttcttcgctttggtgctcatcgtcacaagtgccggtgatggtggcactgcttcattttgtaacaaattttcctcttttggtggcatattttgctgttcccggtgttgttgccgtgccgaaaatttggcttcttccgtcggcatcgtctgcgatgccagtaccaatttctcatgctgaagcgtcgaattagccatttgttgtgccaccatttccatatgcttttcctcctgttgctgccccttcttttcctcatctatttttgtgcactttgtttctctggcactaactatttcctttctcatcagtgcctggtccaccactgcttcaagactttgctcaatgattatgccgtcttttttcatttcagcagcgccatcagcagttctctcgacggcactctgcaatttttttgtaatattaatgccgatgatgaagcctatgaattttcatggagcaggatagaatttgtcgaatttgactgtgatggctcgcagtttctacctcatcgagcccgttgaggaacaagcgagcatcaagcaacggcgtgactgaatgtgccgtcctccgtcgtcgcacttttcccggcgatgacggagggcagcatgacggcgtttgttgcctctcccgttcgtccacaagtgcaaagcttagccggtcacgctttttgatcacactgtaaaattcaaatttcattttacctgtgtcatgaagggaataaaatgatagagtttttctattttttaggcatggaaaaacatattatgtgttctaaaatacatacaaccataaaatgcgcatattccaatgaataaattacaattgtaaaatacaaccataaaatgtgtatttttgttaaatcgttacaattgtaaaatacaatcctaaaatgcttattttccatgattaattacaatacgcatttggtcgtgtcgttacaattgtaaaatagaaccgtaaaatgcttattttccatgattaattacaattgtaaaaaggcaaaatacgcctttcaatatatcactacaattgtaaaatacaaccgtaaaatgtttatttttggttacaattataaaatacatccgtaaatgctcattttgattacaactgtaaattacaaccgcaaaatgcttattttccatgatgaattacaattgtaaattacaagcttaaaatatcattactttcttactgtagccgccagtctctcccttttaccttttcagtgccatcccatccaaattgtcaggagacgatttccgaaattggttgtttcccatctccaactgttgttgctgctgctgctgttgcaaattccgctccataaatcgccgattgtccttataatgggattttcgtcaaattaacttagaatacatataggtacagtaagttgaccgtaaagcttggattttttttttttgctaatttgggctatcgtttttccgtctaattattgtttaattaacttcactatgccgtaattgcatggtaattagctaattaattaattgaaaaattgg

SEQ ID NO: 13235 - DNA, 3954 bp, Heterodera glycines
  unsure (1)..(3954): unsure at all n locations
cctcttttaatcactgttcttcctcttttaatcactattgtacctcttttaattacagttgtacctcttctaatcactgttcttcctcttttaatcactattgtacctcttttaatcacttttgtgcctaaacgggcgctaagcgcccgtataagttcaacagatttaaaaaacgggcgcgaagcgcccgtccaaggccaacaaaaattgaaaaacgggcgcgaagcgcctaacaagctaaaaaacgggcgcgaaacgcccgtatgagttcaacaaatttaaaaaacgggcgcgaagcgcccgtcttgagcctcaatgtggactaaaaacctctaataattttttaaaaattcaaaaaatctctccaaccaattcgatcaatttgaatcgcttcacagtctaggtagcgaagctccgaaagcgcgaagcgctttttcccagctaaatagccgacggttcacgcacccgctattactatatacgttatattgacaaggagtttcgtttcaaaaactaattccgaccggccgaaggccgggagcgccctgaaagtggtggaagggtcttacaactttttgaggagaatccaggaaaactatagagaaaaattctgcgcggacgactgagtcccgagaagcgatttgtcactttttcttgcagtttttcttctacgaaattttttctttggaccgggatcgcttagctcttgctggtaggattttaagtcagactatctccgacaactttgccagcaagaccaaagccctacgttgggcgcccaaggctgtagccttggctaattttttttacccaaaagtgtacacttcagtaccaggcgaataacgcgcaagggtttgacctgagcgcagggtggctagcagacttattgtagagctaaatgagctcgattttttcaaattttaaaatttcgaaaattttcaaaatttttcaagttaggcctaaaaaacgattttttcgtttttgaattttaagattttttaacgatttttcccagaaaaacgaagaccacttccaacacatagttttttgagctctatcgactggtaattttttcggaaaaatttcgatttttttccggaaatagaaaaattttttggcctcagcgggacatttgagtcccgggcccataactcgtcaggggtcggttttagacaaaaattgccttagagccaaattgtagagctttttaaactctatcgaatgttgtacaatctgttcggaaattttcaaaaattttcgagctaggccccctagaaattttcagaaattttttttgggtttaaaaagagggtgaaaaatatttttctggggtaaattagggtcctgagcacaaatatgatgtttattttaagtttcagattttttggaattttttaaaaattcaaaaatatttttcaatttttcggccctcgggattttgggcgaatatttgaaaattcatagctcacttcactgtgggactattttaatgaaataaagctttaaaaatggagaaaaatatggagaattttatgggatttatttgaaatttatatctcaaaaaagaaaaaagttattccagaatttctggaaaaattcgaattttcagaaaaaaatttatacctcggttctgaaaagtcactctagaaaaataaaatactacaaaaatccgcaattttttgctctattatataaattttatttggcctttttatcacttttttaagaattgttataaaattcgctgggaatggcaacgccgatcacacggcgttgctctgcatttcacaaggggtggcaatgcgctgcagcagcagccaaacatttcccggaatattgtgactccgggaaactcggtgacaaaaaatgcgccgattgcggtgcacatctcttctcacatgaagacagtaacatttgctgccggaagggaagagttgtgctgccaatgcttaacccgcatcctgatgagctcaaagagctgattgtggggaataagcaatcccgtgaagggaaagaatttgtgcgacacatgtcgcgttataacaacctgttccaatttgcgagcgtttccgctggcaacaaaccaagccctgctggcggtccgatggccgttattcttaacggagaattccatcgccgcataagcagcatgcaggctggtacaactcagattcctggctttggccagttgtacattctggacccagtcgaggctatggaacagcgtcgaaacaaccccaggtttactggggagaaaatcacaaacgaagatgagtttgtgcagggtcaccagctaaatgagcagactcttgagatcttagaaaaaatgatccaagtgcatcatcctgctgtgcaggcatataagcaggcgcgtgagcagctcactgagcttctccaacaacaaaatcaggaagagcttcgtttcttccgcatgactttgttggatagccgcagggctccagctggtcttaaagacccaaaattgcacccacaccaaataatcaccccttctacgggtgaagggatgttcgctattcatgcggaccccactggtgctcctccgcccaaaggaatttgggtagagaacaaacaagggcaattaaatgaaattgctcctttcagtccgtggactgatagtcttacgtatccattaatcaagccaatgggcgatgatggatacacaactggcattaaatatgctaagccaccatcgcgtaagcgaaaaggtgttcagaatgcatctggcctatttgactcggaagccgagtcagataatgagtcgtgcgagactcagtcaattgcatcatctgatgcggggtcagtcgcagattcagatgctgaatctgtagcatctgtttcatcgcagcaccggcggattgacaaatccaaacaatttatctccctgcgagattattgcaagtattatctcgcaataagggatgaaaatgtggagttgcaataccaccacattctttcatgtggtggaggacttggtcagcgctggatccttgaccaggctgcaaaaattgattggcaaatagcaacatttttgcgtagacctgacatggatctgcggatcagcactccaaaaaatctgctgcagtatttggtcaaccaatacaacaggcagcaagcacggcaaaaccccaatgcccaacagaaaactgttgatgacattggcagtgttgttcggctttccgaacacaacgtaaattctctccaatattggaagaaaatgtatgaagattgcaacaccgtttttgcacggtgccatgacgcgaagaaagcgcgtctcttcattactttcacgaacaacagggaatggcctgagttcaaagagaatttacacaaaaacggtcaagtatttactgaccgttttgacatgtggatgcgtgtctggagcagcaaaatcgctgagttccgagaagaactttatgacaaaaagttcttcggaacaatccttggttacggtgaatcaatggagttccaaggccgaggaggcccacatgcccacattgtggcgcaaacagacctggacgcagttccatatgtcattcaggaatacatatgggcgcacattccatctttgcctgataaagatgacgacacgcccattgcaaaaatgcatcgcgaaatccgcgaaacaatgcatatgcaactgcacagatgcagtgacagttggtgtggtcctagcgacccaatttacgggcggtgcaagaaggggttcccagccccttactcaaaatgtacgattttgcgcccggacaggcccgcgatgtatttccggccttcaccaactgatggtggtgcccaattagaggtaaacggcctaatatacgacaactcacatgtcgtgccgtataatccttatattctgctacgttaccgagtacaccataatgtactgtttgcatatggtaacaaagcaaatattanatacgcactcaagtaccc

SEQ ID NO: 13236 - DNA, 3820 bp, Heterodera glycines
  unsure (1)..(3820): unsure at all n locations
agcgaaagatgccttagagcaaaatgtagagcttttaagctctatcgaatgggtaggatagtcgaganaattcaaaattttcgagccaggccccctagaaatnttcggaaattttttttcggacgaaaatgggggtgaaaaatatttttctggggtattttgaggtgctgagcacgaatatgacctttgttttttgtttcggaatttttggaattttttaaaaattcaaaaatattttccaattttttggccctctggaattttgtataatattggaaaattcataactcagtgatggtttcatcgatttaactataataatgctttaaaaatagagaaaattcaggagaattttataggatttatttggaatttctatctctaaaaataaaaaagatattccagaatatctggaaaaattcgaaatttcagaaaaaaaatcagaactcggttctgaaaagtcactcgtgaaaagtaaaatactacaaaaatccgcaatttttttctctataggataaattttatttcaagtttttatcatttttttaaaaaaagatacaaaaataaaagtgattttgggattcgggaccaaaggggggagcacatggtttttgagtggaaaaatttttctcacaaaaatcttccaaaaatatgtatttaggggttatttgggccgctgatcatgaatacgtaatcagattttacttttgtcattgtttagacctcagaatccccgtgtgattggggattctgggcatcattttgagggggggtgggaagttcggatccgggcggtgtcaattatttttctttgcattttatcattaagctcaaagtctataaatggagtggaaaatcgcttcctcggatcatttttgaaaaacctagcgtaggaatcctacgctgactaatgacatagcgtaggattcctacactagcctttcctacactaggctaatgtagttatcatactcgagctcaaagtctataaaagggagtggaaaatcgcttcctcggatcatttttgaaaaactagcgtaggaatcctacgctgactaatgacctagcgtaggattcctacactagcctttcctacactaggctaatgtagttcaaatgcactagcgtagagtatccagtgttttagttaattggcaacctgaataaagcagtcacttttacaggtgctatagtgtagagtgttctatagtgtagagtgtaggtgtgttctatagtgtagagactcactacactacactttacactactctccaaaagtctatataagcgcagcgaaattgcacatccgcagtcacttttacaggtgctatagtgtagagtgttctatagtgtagagtgtaggtgtgttctatagtgtagagactcactacactacactctacactactctccaaaagtctatataagcgcagcgaaattgcacatccgcagtcacttttacacgtgctatagtgtagagtgttctatagtgtagagtgtaggtgtgttctatagtgtattgactcactacactacactctacactactctccaaaagtctatataagcgcaaagaaattgcacagccgcagtcacttttacaggtgctatagtgtagagtgttctatagtgtagagactcactacactacactctacactactctccaaaagtctatataagcgcagcgaaattgcacatccgctgtcacttttacaagtgctatagtgtagagtgttctatagtgtagagtgtaggtgtgttctatagtgtagagactcactacactacactttacactacgctccaaaagtctatataagcgcagcgaaattgcacatccgcagtcacttttacaggtgctatagtgtagagtgttctatagtgtagagtgtagattctgcatttgtactgttactacttgtgttgattatataaaaaaaataaaccttcaaagtctataaaagggagtgcaaaaatcgcttcccggatcatttttgaaaaacctagcgtaggaatcctacgctgactaatgacatagcataggattcctatactagcctttcctaaactaggctaatgtagttagcatactcgagctcaaagtctataaaagggagtggaaaatcgcttcctcggatcatttttgaaaaacctagcgtaggaatcctacgctgactaatgaactagcgtaggattcctacactagcctttcctacactaggctaatgtagttcaaatgcactagcgtagagtatccagtgtaggatatctacaagacattgtgttgatgctacatttttttatatgtttagcaaaatatttagttgacagcgaaattatatttctattccatccgagggcagcacagtcagatggacaacacccacaacaacaacatgtcttctaaacaaattccatccgagggcaaccagccaaccgatgtccaattgtctgtagcccctggcagcagcagttccgttaatggaaaagaccacaaaatcttcgttggcgggtttgccttatgatactttatcttccttatttttttgtatttagtttatctattgataccacagacgcttctttgagtgcttatttttcgaaatgcgagcagccgttgcnggtcttcgttggcggggctgctttcggcccctttttnggtctcttttagttcnttggctccctgtgttttgtgttgccggcgnctgcgcccggtggtgatctttcggcgttggtccttttgccgggcggccgtgttgttgcttcttctgtgggttgtgtgctcgcgcttgtctcccgtttgcgttgctctcttgtttttgngcttcgcgctttcncgtttttcgttntgttccctgttttgccgtgtgtgtcgtgctttctgtttttggtgttcgtncctttngctgnncnncccctttntnttcnntctgttggcctgcttnnnctnctncntccntctnngtttccatccgagggcgagcagctgttgcaggtcttcgttggcggggttcctttcaaaaacttttaaagactattttagttaattggccacctaaataaaatgatgccgaagacagcaccaggaagtgataaatcgacattaatcactttaaccgacgaacaaattgttaactcaactgtgaatagaatggtcgcacttgtcacacgaaatcgtaaccatattgttaataagcagagatctaaagtttttagttatgttccctgaattgctggaagagactatcgaacatcattttataagatattttgcaaaaaaagttttcatgcagaaaattttagtgattgtctagataattgtatggaaaatacttagtaatttaccagaaaaaattttcaaaattttttcttagaaaaataacttagttagtaaatttttcggaattttccggcgctttttgccatgacgacgttttgtcccgacaacgtttcgtcgacgacgttttgtgagtcaccgactggctgtgcaaaaaacgccagttcttgagtttattgccccatttcttaactgtatttgactaaaaatggccaattgtgtggttttcgggctgaatcatggaaaatttagagaattttaacgaaatttgtttgggataaacgatttattttttcaataaatttactttagtaatcaccgattaggattggcactttttaccagccatttccgaccattttgggtcatgccaacattaacaaattttctcacgaattccatagggcaaatgtgccaaaaatatcatgaaattcgggatacaaattttttgccaaaantgtttgcaatgttgtaactcct

SEQ ID NO: 13237 - DNA, 5156 bp, Heterodera glycines
  unsure (1)..(5156): unsure at all n locations
ggtcggtgccatcaaatccaggctaaaaccggcattgtgatttatagaaaaacggaacgctattgtgaacaactcaccaaaattcttgactttcacggaacagtggcggaattttggcaccgaagccaaatgccgggtaggaattggcactgaaacgatttacaaaaatcggatcagtggcgacgcaagaaaggaatacggtaataacgcgtggttttgattatgggggttacggtttttaaattgcataattacgggtaattatgcgtaattagaaagattctgatgattacctccccatactgcttcgtgtgtacaaaaattacctgttaaaatcccttaacgcgctgccaaatgcgccaatcaccagctcaacatctgaacatttatttgctatgacggaatttgggcattcgactgatttttgcacggcacaaaaaaggaaaaagccgagaaaattctaaaattctttcatgattgatcattactaagattatcaagacgagttgggcaaatggctaagtcgatttttctatgcttcgaccaacaatttcggcattggcattttctgtctgaaaactttttcggggcctgccaatggtcgggattcattccttttgaatgccgagtgacttggcttctccggtcaattagtgcaactttcacagtgtaataattataccgttaatgtaatgtttgatcaattgttcgtccacaaaaatgccggaacgagaaaagtcgacggcaaatgccaaattcagcgaagcgcccgcagaaatatactcgagaaaagagggagtgcacacctggggaagggaagacacagaagaatggagatattttaagaagaaggacgacaattaatcactgatcagagcagagaatggatttattatttttttcgaaaatttgaattcaatttttgagaaattttttgacattatttcaacctttttaaaaatataaaaaataaatgttggagaccaaagagtcccaagcattttttagacagaaacacaaaaaagaatttaaattaaaccataatataatttttaattaaaaaatgcataaatccacattttggttttcaaagttttattagctaattaattaattgtccactgggtgccaaattagcttcttaatcaccgcccacctcatggaggcggcacagttcaaaggtgccaccgttctttttttgatgtctcgagttttcataaacaagctgtgtgagatgacgaagaattatactttgatagcgccttaaaagcttacaaaataaatattctcggggccaggaccgcgccgaagcacctgtcaattaaggagaggggtaattaggctaattacacaattaggtaattattttatttgcgcctcccacatgccatgtcaaacagtaccgagtagaacagtgggaattcaccaagtgacacaggcggaaatgctggcgatttggcggtgtcccgttggaagcaaagcatgcgcaattccctgagaaatgccaagaaaaatgccaaaaatatttttggggcttctgcaaattataaaatgccctattccatttcatgtaattattaataaaattggttgatttaaaaaggaaaatttgtattacttgcgcattatgtcggttgattctgaatttcgaattcatacaatttaatgaaaaaataatttattaattataattggtatttacgtaatgtgaaagctctccacgaaacgcgagaagagttccatttaacgccttcacttcgatacaacaaagaaccttaaattgaagaatttgatggggcaacgcaatcaaacaaataagtttaacaggcagataataattttaataaaatggcaaaactaaacaaatgaaaaattattttgcactaattgaaaataattcaaattaatccaaaaacattatatatcaaaggaaattctgatcattaaacaaaattctgatcactttttgaccggcaatgatcagagaaaatttttaaaaaatcataaagaattttaatcaccttccgtttaataattaattacaatgctaatcaaaataatcagatatcataaaaagcacacacctttatgcgacggtgccgtaaacgatgcgccgcccgcctcagccgccgcgcaatcgccaatgtccggcatgagcaccgtgttggacattgatggtggtgccatgttggcccttgcattgttagcaatgccaccgttgcaaattgtcattccgtccaattcgtcggcaatattatcgcccgtcgacagtcgatgaatttcaaaaaacacctggccaatttttaagttttttggtattttgtttcaaattcacttgagccgacgaagcatttgacaaatgctttttgcttaaatttttggccacaaattggagcacaacagcgtgcgattttgagcgaattgtgcaggaaattaatgcgtcggccacttcaaagcccgactcatcattccttaaattgggcgctaatgcaaattagcgggtactgtattatagatgatgctacggtaacacatttagagacgaaaaaggttctgatcattttcgtacatcacttttctctgaattttgcagcccgtggcggagaccaattcggaaacggagaacacacagtagcccatgctgagcacatccttggcgaacagatcacaactgatggaagtgatcagaaataagttgctaccctaattaaatctttgatgagttgcaaattaaatatcatcatttagcttaaattagcttctatttagcatatattaaatatcagactatctgtgaattcagtgaattttatatacttttaaattaattagcttaaatagttgaagttcgattaatgattgatatgatttggtcattgtcggtttttatcgttaatcagtttataatttaattaacaccatcaacagctaattaaaagaaccaattaatacactaattacgaagtgattaattatttcccattggccttacatgtccagccgaatgaatttggccgtattttcgagttgaaattccaccgcaaaaacattgggcaattccgcgctggtgcctttgctcaagagttcgctggcagttgtctttaccgggacaatcatttgcaattaattagatgccattaattaattaatgattagaataaactgaccattcgccacggtctgaatttggcaattatttcaaaaaatcatgccaatttaaaacccgcgatggttgtccgactcgctttcccaagaggcacacgcaattgagccagaagcaagagcaactccaatatttccttttaattggcaaattatgggtaattagcattagagcctggaccggaatcaaggcctggctttttcctggatattgttccaggtccatgctatgtttcggaaagctggtttcctgggtttttgtccaganaatccaggcccaggcncaaaatggaattcatgtccaggctttttttcaaaatgccgagctctaattagcactcaatttgatgaaggcaaacagacactaatcaccaaagacaaaaaaactgactgccaaagaagcttgttcgcaagttaatctttaaaaaaatgattctttgtttggccatgaaagaatttcgaaatatatggttttttattttaatcattttaattgatttaaatttaaaatttgtgtagaaaatggccaaatttttattttcaataattgcttttctgatgcacctcaacttgacgtgaatgtcgacaatttccttctgttgctgactgcttttcttcgcctcatcggccctaaatatgtattaattaatgaattttgggaattttaaaaatttaatttgatttttatatcataaaataattgacattcagtttgtttataaactgttttcgttgcaacatttaaaattggcaccgttttgagctgctctttttgggcggaagcaacggcggtgcgcgggttgacctgcgcaactccaaaatttgccgaagttttgccggtggaatcattccaaaaaataaattaaaatttggtgtgataatattcagtaaataatattattgatgcaaggaaaaatttcaaaggctcgagaattaagattgaacaaagatttgatttgaagcgctgtcgagattctgagactctcgaataacccgggtaatagcggcacagaaactcaacaacaggaatgcccattaccactttaaacagttctctttcagcaggggataaaatgtttattttcaaggatgcccttagggcacgctcaaggacaacccaataaaaagctttcgcttaattatgtatcttatttggaaaaataaattaaaaaatgaatttggattaaaagtgatggtaatatttcaaaattttaaatttaaatttgacagtgaaaaaagtaaaattcgtaaaagaaatgtaaacaaaaagaaagaaaaaacttaaaatgggtagacttttgtcctcaaagcgttgggtaatttgagcacataaaaggacagtaaaaaaggagcgcacattttgtgccaaattttggggacactctcaaaaatgccaaaaaatgaaaaagacgacaaaagtgccgcccaacgaaagtgccgtcgtaccaatattttttaatatccattaaatgtttggtgcgcattgttttttgtcattgaaaatgcaacagaaaaattttgtgggttattcggttcgttttaatcaaattgttttcgtatttttttagttcaataataaaaagtgacaaaattgaacatatgaaggtaatcttatgcttcccatttgccaatttgagaaattttcaagactctcgagcattagaattgcttcgtaaccaatccggcacgacgattcacaacccaaagaaagtaagaaatgtttttgactgttttttaactctcgtttcatgataagttgcattaagaatgccgagagctttccaaatgttttcggttggctcaaaagtctcgatcatttttaattgggtcccccgaaacaattcatttttcgtcgtcgtcggagggtaaaaatgggcggctaccgcacaaaaaaaggaagaaaaaaagagatatgcgagaggcgaagtagggcattgtgtgggtcagcagtttctgtggtgatgcaataaatgccatggcgggggggggggggg

SEQ ID NO: 13238 - DNA, 2233 bp, Heterodera glycines
acgaaaaaattgcgaaatatgtactaaaaagtccaaaatatgtataaaaataggtacataggtatgtagaaaaatcccgaaatatgtaaatatgtaaataaaagtcccaacttttgttcgcaaacacaaaaagaaagtatttttcctactatttagagcatggagaagccaggaaaaaaaaatgtatttacataaaattagcagcccctaataattaaatgttcataattttttgaggcttggtaaattaaattttaatatcttttaaattttttaaatttatttttttcaattccgcaaatcactgatagaaaattagtgaaattttgagctttaattattaaattttaatactctaaaccttttctcatcaagttttacgcattggacgaacgaatcttcaacttcggaaccagtttcgactccggcaccgcttctgtattcggaaccgacttcaactccggcaccgcctctgtcggcaccaccgttcttggcatccctcccgggatcagcgaatgtctcggccgatgccgaatcagacagttttaagacagctgctctgattatggatgcgatcaatttgctgctcatctcaatcgcggtcattctgcttctctgcattatttactgtcatctgccatcattgcctgctgatcggcgttcaatttttccaacaatttggccttcatcaactttgcaaccaccagaaatttcgaattcgcacaattggactgatcggcatgcaacggaaatttttgatcagcatcccatggctgtctttgatcagtgccgttccgcaaaccggtaaccatttagaatatttgtcgaaaccgtaacattttttgcacttttctagtgatcgaaacccgtccactgacagtcagcatttggcaatttctgatcgtcactgtacccatcgcaccattctaatgatcgccaccgtactgcctttcaacagcatgccaatgatcgaagtcgttcaattgatcgaaaccctttgcgaatttctgctcttcctcggcagcgttcggtaatttctgatcagtgatccccactttttttgtctctccactgttcttcaactattcagaatccgccaacatcgcgcccaataccgttttctctggtaccgcagccgcaatttcatttttacgagtacgagtttgtgtcggaacgaagcacgacgagttgggtgagacagacgcgcgtgtgattttaaaaagagagaaatttgtaaattggctttgatttgcatgggataatgtctgactttttgaagtaatccaaattcatgcaaatcaaagccaatgattattggatatttaccataattgggttactgtagagaacactgacgcattttctgctacttaattaattttatttgttactcaaatacttattaattattatctacgaataattctcatatatttttgataaattcccattgccaaattatgcacaataatgtgttaatatttgctaaatgtagataaacttttagttatattttctatttatttccaattataaaatgaataaatttttatgtgaagtatacgtaagtcagagttgtcttgtattagactctagcacggtaattttaacaaattttatgcccaaattgctaatatatgaattaaaaaaattctaagaattgtctcaagtctttgctaaaaattatttttccgtgaaataaaaatttctttttttccaaaatttatcaaaggtccaggaaatgccatcccaaacgcaatgaataatttgatccctctcaacatatttaaattccttttgtcaaaatcaaaagttggcatttttaaagaaaatgattggttggcacacaaaacgagaaaacaaaaatttaatgaaggaacaagaagaaaaagcgggaagagaacaaataatgcaaattcaattcaattccattctattcaaattccatttccgccctctttctcgtctttatggaatttgtaaaaataaaataatttataatccaattcacacaaagacgcatctctccccccccccccccccactcttttggtccctcggcggttggttggttgggcccaaaagcaaattttattcaaaattggcacaaaagcgttgttggttggttggcctgttgtcgtgttgattgatgaaaaatgccccccccccctaactctccaccgccccattattattaaacttttcgcgacacacataagcagcggaggcggaa

SEQ ID NO: 13239 - DNA, 1396 bp, Heterodera glycines
aaaatggaatagctgaaattttatactttatctcgaccgtctggagttgactctcgatgaaattttgtcgagaattggagtcaatgagctcggcgagttgtcgaagaaaatcgagtcccgaaagtccaaccctaaaaactcctcgcggagcgtgggagggagaactatttaattgtattgtaaatacattaataagatcttgagccttagaaattaatccagaaaataattaatttttcccccaaattatgatataaatgccaaaatttatttaacatgtagcgaaggccccaattttatgccctccgtgttacctcttttggtccaacagaatatggtagtggttagagtgctgctgttggaccaataatattaaacaattgaattttgccaaatgcagaaataattcaattccaatccattttatacgatactttcggcttaataacttttccttttttaacaaatttcgcttttttcttagcataatttaatcaacttgagaaattttacaattgctttttaattgaatttaaatttttaatttttcctaattattgaaaaaaaatattaggacgataatttcgttttatttttgccttcatttaattaaacaaaaagaaaaaaactggatttagtgcaagtttgaattttcaacctttagtcattaaaaagttattttaacattttcaaatttaaaaaaaaattcgcatcttttgttttccgtttatttataaataattgttttcctttatgtttaaacttgcttctcatcagcataataggcaacaataattttttttttaatttcctagagcaattttttaagctcaacatttcatttaaatttttgtttaaatttaattcattgtcccaaaaaaaaaaaaaattaaaacagcataaaaaatacacacattttccctttaataaatttcaaaatttcaattcttatgcaataaaaaaaaacccgcgccttttacgtgcacacgcactttttgatggcacacatttaaatcattcaaattcgtcaccatctaactacagtagttcagatttttgtgcagcaaagggattaaatttaatggatctagaaacagtgtgctgccttcaaaattttgacgaaagttttttgcgccaaattcacgcgcaaaatgctggggcacttcataaagtgcgcacggcgaatgaataatatgtacatattgactttctgcacctaatgatgatggtaatgatgaacatgctttttcgctgtggtgatgttgttccattaatactgatgcgggcgcaaaagtggtgggggtggcggatttttaccgcgcgagcgcatttggattcctacccccccccccctccaacatgcccaattctccaattacaaattcacacaaatgca

SEQ ID NO: 13240 - DNA, 1801 bp, Heterodera glycines
  unsure (1)..(1801): unsure at all n locations
catacctatcaaatcctaaattacgtatttaatgaaatagaatatcccccatcaaataaagcttcaatttctagggggttgaaaaatagagccccgagggttccaattcagtaaatacagaattatttgtgcccacttttgccgccttccaccgcctccgctgccaccggctcacaatacggctgcacctccacatacgttggcacctccgctggcacaaagcattcgccgttttcattacaagcgcaaaagttcttcattccgcccaccgttttattccagcaaagcactcgaattgcctgaacaggagaattcgggggacaattagcacgcattcagttttcctccgtggcggcagaaactattttttcaagagaggggccatgttggccaattttttttggatattaaaaattttacaacgctaaaacggaaacatttttggtgagctttggtagcagatattgtaaccaaaaaattttattgttccaaattatttcaaaaattcatatgtttttctcttaattttaaggtaaattttcaaaaacaaattattattgataattgcttcaaataaaaaaaatatgctaactttttctcataaattttttaatttttcatttcgatgccacggaattgccccctggctaataattatagccaattagtggcattaatcacactcgcctcgggctcgtaattgcttggcccccgctgactctcgtaaaacacttttatcagcgaactttttgcgccaacggccaaactttcgtcctcacaattttggaagccttgaacaaactcattaggtgagaagctttaatttttgcaatttaataatacctaaagctgctcggcttcgttgaaagttcgaagttcgtaggctttggccaaaatcgctcctctcaatgccttcaaccacaaaagcaactccgttctttggtggcccgttatttttctgctgatcattttcgtcagctaattttacattgttctacaataatttagtattattattgtatttatatatttttcttaatgccgaaatgagccggtcggttcagtaccacagtacatttgagtgccagacattttagagcattatagcttcagagaatttcttcacgattttccgctaccagtcaatttttggtgttgagtctcggaatcaattctcgatctcgagatatttctcggtctcaagataaattctcgatcttgattttcgggattaattttcgaaatcttgaaatcatttctcggtctagggagcacttatcggtttctgctggaccaattctcgatttcgagaacaattcataggtatatgattctcaagttcaattctatcgatttagatatcaattctctatcttggttttcgagatattcttggtcttgactttcaatactaattattggtttgactggcactcaaatcacatttaaatgaacttaaccaactacctattaccaaacaatgtttattattttttattaattattaaaattatttaattatcacccaccgccaactttactgatggtagagtcagattactatcgtcgtcattggttttgttctgcggttcgtttactgtagcataatgtacggaaattaataaggacaacaagcataggtatattcgcatactaaattttgtcttttgttttttgtatttctatataacatttttattatttataaattttaaatttaaaatcttattggacagaatttatttttctaaaaattggcgagaatttcgaaaatggaaatttatttnaatttaatacaaaa

SEQ ID NO: 13241 - DNA, 2019 bp, Heterodera glycines
caattcgcacattttgttatgatgcacgtgactgaaattcttattgtttgaacagcaaaagccaattttttatgcccatttcaataaattaatgtaaatttaaaattttcataaaaataaaaatcagaatttaagatttgtcaggcggtaggggccggcgggaggcgcgggatcggagccccaaaaatattggattcgggaaatttggcctaaaaagactaaaaaacagaacaaaataataaaaaagaaaataaattaacaaaaaactgaaaaattcggtaattattctaggtttttcatgtcccctgaatttttaaaaaattttccagtctaattttttgcgctgaatacgaatatgccatttgtttttagcttttacgcatttcacgtgagttacgtgaaaatttttgtgaaaatttaagtaaaaacgtgaaaatttaaaatttaaagaaacgatgtttgcaaatctcatcaacttttataatgcagattgatagagaaggcgtaacaaaaatttaaaaaatttcatcatataatctgtgacctggcgattaaaatgcatttgatctgtgactgagatttttaacttcttttttttaccataaattggagttaagccctgaccccggccttttaatccttctctccattcgccgacctttttgggccttctcccgacccatagtagggctgggcgaaacttcggtttcgaaaatatcgcggtgttttttgggcttcgaactttggacttcgccttcgaataaaattgggcttcgccttcgacttcgagtgctaagccgagcttcgcccagccccgtaaaatttttaatgcattttgttaaaaaattgaattttttttttaaatagtcaatttttactggaaaattttttaatttccgggggggggggggggggactgcctcgcccctgtccccgatccctgtgacgtgcccttccccgcgctcccccgacatgcgttctccgacgaggaatttttacactgttaaggattgattgcgttgtaaaattaaaatcaaaggatatttttcaaaaatcaagcttggttctcttccaattaaatattttcttgctcttttttgtctgtaattttatgaaaccgtccaattaagatcggacacgtagttgtccaattaagcatgagtgaaatggccgaactcaaagctattattaatcgcctatctgcaattgagaaactaatttcaacaaacaacaacaacacattggcgaccgaaatgactgcgcagttcagcgccatcgcggaccgcctcggcgaaattgagcgcaaattaaacaacaacaacaatggaattggcagtgcggaggataaggagcgaaaaaggagcctcgtgctcattggtcttccggaatcagaggaggaagtgccatcgcttcgagcgaaggatgacgcgaaaacggtggaggaagtgttggaccggctggacgtggaagtgtgcccgtaaatggtctacaggatgggcaggaggagtgacgaaaagaggaaggggccgcgcttggtgaaggtggtcctgccggcgtccaccttccaacgcttcgcgctgatgcagtgggggcgtcgtcggacggagctgaagaagagggctggttgggagcgtcttctggtcaggccatccctgacgaaggaggagctggaaattgaacgagaacagcgccaaaagaagtggatggaatttggacagaagaaaacggatgaaaacatcacgacgcgacgcggaggcaatgaaaaaaacttttgaggtcacctccttttttaaattgtttatattttaatgcaagaagtttggttaacaaatttgacaagttaaggtttttgttattagaaaataagtttaaaatcatagctgtatctgagagttggttgagtaacaaaatagaaaaccccctaattttggaaaatctacccctattccataataagatcagatagaccaaacaccttgtagggcggtgttgctttaataatatcgaatttaatccttt

SEQ ID NO: 13242 - DNA, 5155 bp, Heterodera glycines
  unsure (1)..(5155): unsure at all n locations
aaagaaagtgccttatgttaattatatgactctccttctcctcctcttgacacaaaagccncaaaatgaaaatgtttgtgtatttatacctggaatttggcaccacttgtctgatcacatcatgttggaagcgtccctcggaaggcagacgaggccctccaaaatgcacttcgtccacaaagtttggtgtccttaaaaacaatggcaaaatgaaatttagaaaataagtattaaatggttagcgtgtaccaaccggcttagcccaaacagcacaaatgggttgtgcaatatgcgatgtgctgtctgtggtagttggcacagctctgtatgccgaaagccctcagcgtccgctgactgctcatcagagtcagccatttgaatggccacacatgcgccatgccacacaattccactgcctgttcaatgcaaaattctattattttgagggaattttaagaaatttttagcgcaaaaataatttctaatgctctttcgaacagtatcaagaaatttacgttggttgagaaagaaccaaaaaactatgatccaaaaatactagtccggcgacgttttgtcatttacttttcttacaattgttgtcggtaaaagtcaccgactctgaccactgactgaccaattttgatttgacgaacgccatttgtgctgtgtgacgacggcaaatactgctgctcacagcatggaccggtgcattcggtgctggtgaacacttgcaccttcagaaaggttgtgtcccccttgtcatcacaacggatgaaattcacgctggaccccttcacttcgtcaaggtattcaacctggtaagaaaatttttaaaattaattatgatacaaaatgagccaactaagaaagacctttttacaaattaaggatgatgtataataataataatatatttaccatcatgtccaaatttccgtcttccttcaagtcaaaaaacgcagacattgtaagcccggacaatttgtcattcaacgggggtaaaatacgttcaggcttcttggtcaattcaaacttcctaaaatttagaatagttttttaagtaaaaaatgatgcaatttgtgcttttttaaggtttttttttaaattttatttttacaaattacaaattttcgttataaaaaaatgttatacaagaaaaaatttgaattgtagggaataaaaaactttttattcttttttttgaggggaaacaaatccatccgcattatttagccaagaccaacctcgggtagctgccgtcgtcgggtatattttcaaaaatcattggcgttttgctgccacccggcggcgtcacggtagcgagcaaatccggaaagccgttctgcgagaaatcaccaattcgaaatggcacaatggtttgtccgtcaatctctggcacaagagtgacttgctaaactagacaaatcaattccagtctatagtaatgaacagacagacagacattgtttccccaccccatgggggggggggatacgcggggtacgtacatccaagaaattcttaaaatccaggactttcgctcacaatacaaattttttgcgttgaatattccggacaatttcccaaccttggggacccattcctcagtcttcccaggcctacaaaccctgaaatcaatttggacagttcgcactgtctgccgactgtagcaccacagtcgagcaacaattgtacatgcagcactggcacagacctgaaaatagcacatatctatattttgccattaaaatatgcaagtatttaaaaaaacgagaaaaaatttttcaatttttgtttaaaaaaatttatcaggagttagggggaatgaagtgcatccataatttaactcaccggcatcaaaatgtccaattggccgtccgagtccacgtcactgaccaatgggctggccaacgcctcaccctccgccagcgctggcagctgaacgctcaacgctttgttttcgctccaaacacctcttgagctacttaaaaatagagtttgggagttagattggattgtaaccattgtcaacggtcattttttatgctttttagagcaaatgttaattttcaaaaacgtaggcatagagttgaaaaaaatcactgtttagatttttacataaattgatcaattttaagcatttttgggtcaaatttttaaaaaatcttgtagtctggcggtgaatttttttgttgttgtaaattttaacaaatttgtcatagagtaacgaggaaggagcaaaacgagatgaacctggactggctccacacgaccaatgaacgtttgtccgctgccagaaacacaaattcggcactcaaatccttgtccaaatcggcgaaaattggtgtaaagccggggaagacaccaccactgggcaccggtggaaattggtgctcacagtgacgaaattttggcaccgatgccgaagattgatgccgaacgccctcaaggcagaacagctccgtaaattccttggcgttgtccgctaaattttgtcacgtaaaatcaggcaaaaaaatgcgaaaattggtaaaattttgatttttttttttacccaccactctttcgctgcacaaatccgagcaaatcggtgacaccgtcgccattgatgtccacaagagttggatggtccaaaaatttggttggacaatgcagcggtggggtcggcggaccagggtcaggagaaacgggggtggtgccttccaaacctaagaataagcaaaaatttaaaaaatagtacccaagttcgaatttataataattttaaaaatgaaattcgacacatcattaaaccaagctagttttttcttaaaatctcaattctataccaaaattaaaatttttttcagaaaaatagaaaacttttttcaatctcttttaaccaaaaattttgaataaaatttgaaaacccccaattaatcattaaacgttgtttttataggattttctagattttaataagttgaacaataaggaaaaattttctaataattttttctgaaatttattaaataccaaaaagaaaaacgtaactgttttcatcgcaaacttggtgctcagtgaatgtgtcgttgccgtcattcaggtacaaaatggcagcgtactgcgattcggctgtagtggtgaacaatgccttaactttgtcgatgatgttcaggtcggcttggaacgtctaaaagaacgacaaaagacaaacactgtgcacgggcacaaaagcgacaaggacaaagccaaaaacaaacaaataaagacaaataattataaaaatgtttttgtaatttgtattaccactggttttagcaaaaagtcttttgtggtccgaaatgaaaaattcgttaactttaattttcgtcgagaccaaattcgggaaaactttaaagttatgcaaaagcaaaaatatatctcaaaatacgaaacgaaacaaaaaaggctagatagaaaataacaaatgactaatgcgaaacattgtccatttattgcatacctggatgacaagcaggtcgggacacgtgtctccgttgaaatcacccacggcacaggaaacttggccaacgccggccggcaatgtcagctccgttttggacctcctaaattggaccaatagctgacaatgaagatttttggatcttttttttcaaattaaatttttttttccaattttgagccattagcctatccaataatatcgaattggttcggattcggacactttgttgaaccaacaattttaaatattagcatgtcaaactccttaaaaaactcgcttaaattcgctgccgtcgtttgcttgcaggtaaactaccaacacatcgttttgctgcaccaccaagtccgtgttgccgtccttgtccatgtcggcaatggcacaaacccgtccaggaatgggttgcattggcttgtcaccaatgctgactatggaagcagcggtcacactagccaacagggacatgaccaacgatttcggcatttttaatgcaaagttaggacaataaatgaaaaataactaaaataaaggggagaagggcatgaaaaaacatgacaaattcaataaacaaagactgtcatttggatttttgaaatttttttgaaaatattataacaaacaggtaaaatgaaaccattttcatagaacaagtttcaacaataaaatttggaaataaaaaaatatgatattgttttgtatttcataacaaaaaatgattcccgcacaaattcgaacaatattttaaccacaataaaatggcaaagtgctgaaagtatcatcaaacaaaacaaaaaatcaaatcaaatcctatgagcttttcttcaaaaatgtgacaattcggtcttttaatttgggcaaatgtttgacatgttcgtccatgcaaacgccagcgcacttggccaaattgtcactgaactgcttccgctgctgctcggacagcttactgaagtcggtgccaaattgctgatgctgcttgtcctggctgtaaaattgcaagaattagtgcgctccactttttatgaaacaaccgacaattttaattggaaaacatgttcctagaattttcgaggtcgttaatcatgactctgataatttattcgccctatttcgggtccaaaaccaaactagaacaaaaaatttggaaacaaaatccaaaatttgaccttttcagaatttgggttaagaattggtccaatttggtttttataatttgaaatttactgataacaaatggcacgaaaatttaccaagtgcttatgcatcggttaagttgatcctgtgaaaattttttaggtttttacaaaaatttttgttttattttcgtcacctgccaagccgaaaactcatcgtccactttggcaaccaccgcttggtactttattcggcattgctcctcacagtcatcaatttgtttgcggttcaaagcgcctcgtccttcataacagccggcagagcacaaatgcatctcgcattgcatcttccgaatataactgaaatagttacttaaattaaaaacttaaagcattcagttggtaccaaaaatgtagactttgacaaagtaagaaaaagttttggcctaagaaactgagaaaggtcattgattggacgcgtacactgcagagtcttgtaaaagtgccaaaaacagtggttgggtcgggaatttttgagggg

SEQ ID NO: 13243 - DNA, 1781 bp, Heterodera glycines
  unsure (1)..(1781): unsure at all n locations
aaatcaaaaatttgaaaacgaaaataccgttnccatagcgagacaagcgctttcgatttgcaaacaagcgccagcgaaaagagtgtatgagtttgccaacagactgaatgaggcaatcagaactgccctcgctgggaaagtgaggagcccatacggaaaaggctatgaggggagttcatggaaagactcattcntgagctccaattgagggtaaaggcgggaagaccaaacagttattcggtgcctacgaactcgcacaacatttgaactgctttggcatcccggagaacaatcaaatttctgtagccgactctgtgncagaattatcctcaaaagttgaggcattgagccttgggcaatatcaaagagaaaatgtcaaaggagggcccgacagacgaagatgctattattgccgtcgccctgggcatttggtgagggactgcaaaacaaagaaaagagatgaaaggcaaaatagccgcgggccacaaagaaataacgaatattatgggaatgagagacattggaacaaagggccaaatggtggagaaaattctcgttttgtgaacggaagggaacaaagaaatgaacgagaattccgccggtcaccaactccgaatacgcgccctagggggtacagtaataattcgggatcccccgggagaagagtgagctttggtggaagatttgctgcggcaagaattgccagcccaattttaatggcatttattgcaattctgtctctctctgccccaaatatagctgctaatactgcagttagcccaatgatttgcctatcggatgctccctcaagtctctggtctattccttctgaccccttttgcccaacttggaccccaacagtggaaccgattcccgcaaattttgccatttttaggcaaaatacaatacagtacaaaactgaggctacggcttgtaaatgtgtgaaaacaagcatttcaagaagaattggtttctttggagggaaaatcgaagaaataagtacaagcccagtggaagtcccaacagcgatttgccaccaaatgaaagaaatgaagcattcacccgccggagacttaaatttttacgagggaaacaaaacatttagggcgacaaataattcccttgaggtgggatggtcaagctggcctactggcattttttggagaacaaatgaagtgacaaattgttatgtctatgggacagttgtgttcacccggcacggaagagtagtttacaatatgaccaaatgacaggtgaaatgactcatattccgtacgggtcattacaccagctctcgagacacggaaaaatcgattttccagaatttccagtgcaatttttcaaaagcaaagtcatggcaaatttaaccgaattgtattccccagagaatttcaatgaaacaatggaagtggccaaatttgcccaagaaatagcccgtctctctaagcccaatgcatgggaaagtccatcagaaaagtctgaacaaatggctgcaaatattgtatccagtggattgtttgccttcctcaaaggtggaatttttacaataaatcagctttgggtttttatgtgttgttgttatgtgactattacggttttgattcaaattttgctgccccaacgaattgcccaggccattcagtacctaaatttgtttggccaagctttgaatgttttcaaaaataacagaaaaaacagagacgaaaataacaatgttattgaattaaaaaatgacgaaagggcagtagaagaccgattctgaaaaaaagagaagtgcgaag

SEQ ID NO: 13244 - DNA, 2307 bp, Heterodera glycines
  unsure (1)..(2307): unsure at all n locations
atacaattgtgaaaatttcaatgaaagagacgttatttttatgagccgnaaaatacnagagaaaatggtggaaaaatcagagaagaattggaaattgtttnggacagaaataaaagtgtttttgctaggcatgaatatgaccttggcacatgtgcctattgcgctccgcctattctaacaacctccgaccttccggagagggttcggccttaccccgtacctgaaaagtatgaggaggaattgaaggcacaaattgaaaaaatgttaaaatccgaggtgatcagagaaagttgcaccccgtgggctcacaacattgtccttgtcaaaaagtctaatgggcagttaagaccgtgtgtggatttccggccgttaaataaagtcacggtcccagacccttatccaattccccgaatggataaaacaattttacgggcagctggcaaaaagtggtacagtaccttggatttggcctcagggttttggcaaatcccattggaccacggacgcatccgcagtcgcatatgcaggcgcactaatgcaatcagctgatgagaatcaaatgcacgctgtcggtttttggtctaggactctaaactcgacagaagctaaatttcctccaacacatgtagagttggctgccatcgtccatgcagtccaaaatttcaaacccataatttatggagcagaactgattattttaactgatcacagaccgctcactttcctattttccaagtcaagctcaaaccccaagctgaatcggtggttaatgtcattacaggaatttgaacccaaggttgtatatttggaagggaaagcaaatcgggtggcggatgccttgtccagagtcccgattaaatgggaccaaattgaatcaaaatgtaaagaagacattccctttttgctggtgacagatgaagaaaatggttttgaaattaaccgggagaaaattgagaaagaaaccagtttagacccaattttgtcacaaattgtctcaaaaataaaggaaaattgggccgaaccaattcaggaggagcttaatgtgtattataagcaaagagatcaattatatttggagggaaatttgatcagaaaaaagccactgagacaaattgtaatcccggagaaaatgcgaaattcggtactaaaattggtgcacagggcacattttggaattgtacgaaataaggcaagggcaagaaaccagatttggtggcccgaaattggagatgatgtcgaaaattttgtaaaaagttgttggatttgtcaaaagaatggatctatctaatccacccaaaacggatgctgcttataaatggcctgattccaagttcccattcgaacgggtccatgccgacttagccgggccaatttggggaacgaatttttttattttggttgatgcgtattcaaaatttccattcgtttaccaaatgaattcgactcattcatcggcacttattaattcgctccgtgaattatttggaatttttggatcaccaaaaacgttggtgaccgacaacggcactcagtttgtgtcaaatgagatggagacgttccttcagggggaagggatacgccatttgacatctccgacataccatccttcatcaaacggcgaagccgagcggtttgttcgcaccttcaaagaaggaatgggcaaaatgttggaagatggaaagagcatcaaaattgcgcaatttattttcctgcaggagtacagagcgaccccttgctctgcggcagaaggacaaagcccttctcaaaaatttttgggaagagaattgcgtacggagttggacaaaataaaaatgtcagcaagtgccattgaacgaaaaaggcgtctgttgcccgaggcaaatcgtgaaaagaatttggttacgaaaaactttaagcccggagacttggtttgggtaaaagagccaaatggcaaatggacgcctggtgttttattgcgcccaattggtgaaagaatttggaaggtggagcctgagggatgcaccattagcaaaagtgcccatttggaccagttaaaagcgcgacgcgcagtcactcgacatcattaatacagcacgtaaatgcaatttgtatatattcaattcctcccaaaaaaataaaaataaaaaataaagaaaaaaaatttttgtttttgtgttccaattttaaagcaaaagcatttctccaatttgaaaactaattaaatgagcaacgaaaacactccgcccacgaatgacctggaggccatggaaaagaagctcttggaggggaaaagctgcgcggaacgctggaggagttgaagcgcaattt

SEQ ID NO: 13245 - DNA, 1964 bp, Heterodera glycines
gtaaaaataattccgttaccaaaatggtccgtcgttcgtcccatccgaccgacccaaaatcgaactcattttgtttgtgcgcgtacagacggacctgtgaaaatgaggcaaaacatcaaaaatagggagcaaaaaatttgggaaaaaaatactgacaaaaaaaaaatataccaaaagttcgccgtcaaaaacggcgattggcagcgaaaaagtggtgacatttgtgtgcagaatgagctgagagacgaagttggccggctgtttttgggcgtaagtgagcaaaaggacgggcagcgattggcccggggagagagtgaccgccggatgagaaacaatcgaagcctgaaaatggagaaattcagaaaaggaggaaaattcaaaaatgatcattgaatgtctatctacaggccaaattcgccgaattttactttattcgctatgaggtaaagttgggtcaaaattgaattttaaaaataattttgaaaaaatgggaattggaaaattttaaatttcttaattcttagaatattacgaaaaatttgtaaattcccgagaaacacaatttaaagtctcgaaaagatttgtttgagcaaattccgaaaatgggcaacgtgcctgaaacgccgttgtcgcgttctcggccagttcgacgccccaaacggccaggccgaagggcaacgaattggtgacggtcacttcccggcggacaatgggctccaacgcgtggtgaaaggcggtggcctccgtctcgtgctccaaatcgctgaaaaatgggaaaaattcaattcgaattttaaattttttgttagattttaaaaatttatgtctaaaacccattaacaaaatgcgtcatttaaaataatttcgggtcggaccctgtgtagatgagtgcccggaacgggatggacactttgtagttgccgccccgcgtctccgccaccaccgtgccgcgccgaaccgaaaccatcggtgccagctgagcaccaccaattgtttcagctttggcattgtgccgtccccgtcgttcaattcccatcccattgtcctcttcttcctccccctcttttgccactgtttcttcgccgcccttctgttgatcctccccgtcctctccatcatcattagcatcatcaaatttgccgtcgttctcccggttttcgtcgtcgtttgaatgtttggcgtcggtgtgccgcgtgcgcagcaaagtgtccgtgtcaatgttcacacttgcaacagtcactggtgcgcctgaggggtaaaaaatcatggcaaaaaaaacgaaaaataaataaataaaaatccaatgaaagtatttttttaaattttccaaaaagagttcacagattttttttttacttttttgttaaaatttagaaaactcagatttttcattaaaattttaaaaaatacattcatttttattgtgctatccttttccaattcaacatattttggtattcaaagtttgaaatgccatttctgggagaagagaaatgcccccatgccaccaaaattgtgtttgtctgtcgtccggcactcaccgggcattcctcgggcgtcgcttcggaccgaaatgggcggccgtgactcgaactgcaggtacacgccacggctctggccctccacataaaccgactcaatttccacgccacgctccagcgagctgaacacgctgaacgcgcgcggacgcaccggcccaccgcccgcccggacgaggccaaagtcgagcagatcgaagctgggaaataggccacgccgacgggtcacctgtgtttggggcaaatctgtacataaagcagtgcccgtcggcaccggccgtccgctagtcgcttcttttttctcgaaaagtgtcatagaccccggtaaacgcatgacatgctggccctacgcgacattacccggacaggcaaaccccactcccatgaaaaacaagaaatttttaaaaataaatattagaaaatttt

SEQ ID NO: 13246 - DNA, 1923 bp, Heterodera glycines
ataagaaaaatttcaagaaaaaaaatgtttggaataatttttggaaatcagagtaatcaccaaaaaaaaaattttagaaaaatttctgtttggaaattttaaacaaatttttgggggtggaatgaaatgcacccagacattacacttggctcacctgcactccgattgcgacaaccaacaattgggcaaatgggtcgtccccttccccctcctccccggcgttcggttgtttcttgcgatggttgtgccaaagttgaccttgctgctcttttggcaccgcctttttggcatcgctatcatcgccgcccatttttctgtcgtcggacccatcgtttttttgctggcgttgtgccgtggcatcgtttggtgccgatggcgaggacggggaatgtgttgtcctccaaccatcgccgctgcccattctgcgcagttttgccacaataaacgcggtgctgttccgttccaagttgcccaacactttggcgtgtccaatttcgcgtgtttcaaagggacgaaagcgctgaaaattaggcaaaaggatgacaaaattccaaccaaatgcattcataaaagccatggtaaaaatatgtaaaaaaaagttatttaacgaaacgaaggaattcgtttcccgggtttggtaccaaattgaatttgtgttaaccaattccttgcacaaagaatggcattttaattagcaaacttccaacttaacatgccctggtaaaaaaagagtccagcattttgggaattcatgtcaaattctcaatgataaaatacgccacgtttcttgctcagtaacctctggaagttttttaaaatttcaaacagaaatttttccaataaaagttttttgaaaaacaaaaaaaaactccaggtgggggagagggacgacttgctccgaatttatactctgtaaatcgtaaatccgcatggtaaatagtccccatgttttactcggttaaatggttaaatcccccatggtaaattgtccaacaagttaagtttctacccaatccatcgcttctcttctgccgccacttttgtccccgccgtcccatcgtcgcttttgcattgccaccgttgtgccatcgttcagttcaatgcgcacgttgcagtcgctgacaaacagctcggagacgaccatcgtttttgtgtgcggattgtgcagactcagcggagccgaaaaagtggcattcagaggaagatgaatgcccaaaaaggaccttaattaggggcatcaatttggtggatatatgtaatctagcaataaattcagccccaaataaaccgaaaagaagccattttgtgggaaattcgaaaattttttaaatttaaaatactttaaatcctaaagaaaaattcaaaacaaaaaatggcacttttgtttttttatgatttaaaaagcaacatattttggtatatttttcattcatgaacattttcttatgtatttttcgggggaccaaacagcaaaagtgtcaaaaagtgaatggatggataagaaatttttgttaccctcaagccaaattcggatatttgcaatgagttaatactgctcaatcctagtgttaccgtatccggtacgggtttccgcccgtctcgccctggacgcggtgggcaaatgtgccgacggacgtgtgcactttgatcagttcccgttgcgggccgaactgctcgaggactggcagaaaatagacgcgaaaagaagtgcgttgtcccgatgatagtgactgaaaacaatttgttgttggtaattcaatggtgaaaaatatgacagttttggcacaaattttattttttgcctctgcaaaaaaaaatggggaaatttgacacaaatataaaaaaagctggaaattggatttgtaaaagtcatccccagtttcaaatgaaatttgcaggttatctttgatcctgaactctgga

SEQ ID NO: 13247 - DNA, 2217 bp, Heterodera glycines
cgtcagattaattaatgttgaagggagggaaaagaacaaatggcaaggaaatgatgacaatggccggggaaattgaaatttaaaaacggaaaataatcaaaattacattttcctgaaaattggaatttttttggatttttattttttattttcagtacaaaggcaaaaataagaaaaagcacctaattaggaagggaaagctgcattttacgccagcatcacaagacgacggtcaatttatataagtcttttgaatggcacaaaaaatgtaaatttaccaaaaaaaataacagacatttttaataatggaacttaaaaaataaaaagggatttttagtttaattttcattccaaaaaatggacaattttcaaaatgaatcaaaaaatgaaacatattatcaaaacggataaattgatgaattatttgtgattttttgtcaaagaggtaatccgttaatggaaggcacagacaaattttgaagagagaaaaaaaattgaataaaattatttgaattatttcattttgtcgagataatcagccgcggattttgatagattcacttcgaattttgggggattaataattaatgtcgtcgaaatcccatgacggttaatacaaaatgcaaatcgcaaaagcattggattttgtcgacgtcatttcttgcaccgacggaatgcgaaggatcagaaaaaagtggaaattcaatcgaccgaataacgccaaatgaatacgataatccaagtaacatactgtagcgaccaaattgttgaaatatttaaaaatttgggatagaaagagggattttagtgatttatttaataatatttatgctcgtaaattctccgttggatttgcaaatgttcgccaattttttcccttatttttaggcaaaaacaaaaacaaataaaattaacaatattcatcatgattttctgctcaattctccactgattgtttggcatttggccgaaaatttgtccctttcttttggcattgtttttcgcttttcattcattcgattcactgattttaatttcgaaatttatttttggcatttctttttttctcggcaaatttcatattctcgggacaaagaaaaaagagaaagaaacggcaaaatgttaaggaaagcccagccaaaaaaccaaaaaaaaaacatttaatggttttgtgaaaaattatttttatttttttatttggcattttttctgagtttattaaaaatctaaacttttatgtcttttcgaattctttcttaaaaacagaaatttgtggtcaaaatgagatcaattaatggctgcttctccccgcctttcgctttatcgtcggccaaatccgacattaaacaaatttctgtccaatcgcttcggggaaatgccggccgcctcccatccaccgctggccggagcccacaacgcgcggaattggtggttggcaccgaagttggcattctgttgaggcggggggggggaggggagttcaattagcgttcttcgaattcccttaccattcgctcgccactgccgtcactgatcggcattcgcttgccaaaactcatccgaaaagcattccgatcgatgtccaacggacgcgggacggaagaacgaaccgcagggaatggcaaaagcaaagcctgggaggaaaagcggcaatttattggcttattaaggcatttgttggccttaccgcgttgcgcttgccgaaactcatccgaaaggcatttctgtccattttgaagctcagtgggacggtgccatcgcgcatctctcttttggccattacaaattcctgaaaaatgctcttcttagcagaagatggccatgggccaaagaatttcgcagggaattaattcattttgatgaattgccaattcaaaagtgtcattctccagggaatgccattctccgttcccttggctttaccttttcggaattggccattctcaaaatcagcagctgaacaccgacggcgaacagaagggacaaagcgaaggagcagcgcatcgaacgaaggaaaagtgagaataaatttaatctattaatttgtaaaaaaatgaattttgccagaaaattataagaaattggcgtactctttcatttttgagactaattatagttttctgcttttgatcggaagcacattattgtaaaagtgaagtgataattatgcctcagagaattaattcatttttaggttaataattggcactacggaaa

SEQ ID NO: 13248 - DNA, 1283 bp, Heterodera glycines
aaaaaacatccctctaaatctttgagataaaaaaaatgtattttaattaacttttctttataatttcctgacaaaagagatttataatcaattaattgctctaattactttaattaactcattatttgataaattaatttgcatattttgccatcactttcaatgcccccggaggggatgagtccgttaatttctatcggaaattaattaaaatattatttaaaaagattcaactgttcttcctattaatcactattgcttccccacaccgccaaaatgaccccccgctgagacagaatgccatttcagatgaataaggaaatggcatggcaccatcgaagcaaacacaacgccaaaaatcattgccaccgacaaattgggctcaaattgccggaaggaaaattgtgccgacatcaaaggcaaacaaagtggaaaataattaatggaaaatgaaacattttccaaaatatagcaaaaaaaaggcgggagggaatgctgtgatttaaaatcataattttatttgaaaatagttgtactctttatcggcaaaatatcacataaatacaatattaaaaaatgggaaagtacagtaattaaaaaagatggttatggtagcacaacccaatggtaggggggataaggatacggtaatagggatgggacgaatacggtaaattgcctcatatcacaagagaattaagaggcgattaggttgtagttgatgaaatcagagtaaagcataacaacagtagaattagacagcacaataataaaatatgattctgaagaaataacccttaccataagcaattaatgttggccaatgatcagaaacaaaaaagcattgccaatttgccatgtttttgtcattttgtccgatcgtttatcccccacccctcccccctaatttgtgccaatttccccctccaattagtctgatcagtatatccctgctgcacttctgctgggctgatcacactcgcctcatcagcggcagcacattctccgtgtagccattgcccgggtacgcttggttgccgatcgggtcgtaccgaatgtccacgtagaacatccacgcttgcggccgattgtacccgtagccataggcgtaaggaacgcatgggccggcgccggaggggagagccttagagcaaaaaatgtaatggcaaaccaaccgatagaaaattaaagtcggctcgttagtccagattaaacggattgccgcggggtgtgccatgtcttaggcgcaattgatcacctgaatagacacgccgactccgatg

SEQ ID NO: 13249 - DNA, 756 bp, Heterodera glycines
ctcttcttccccccccctttcccctctctctctttccctctccctgtcgaccttcgtctttcgcgccccatccttctcaaaatcttccggtggccaaagattgcaaattaaatgaccaacaaaaactcagaaagttatgaatgtgtaaaaatgggtggtcgaggccaatgatgacgcgaaatgcgcgacagatcatagaataattcagacagtgactgatcaccaaagtcaacaacagtgaaaggaaagagacagacgaaggcggagaagagaatgaatgggaaaagaaaagtgagaaaatcggagagatttccccgggggtttttttgagggatcacccgccgatttcatttttctgatcagtactttcacaaacttcttctgctgatcggaaattgaataattttcattatgaaccaaccgctcttttgaagcgttctttgtcgaattgatttggatgaattcgcttttctcgcgcgtctttttggatgaattgccgaatttggtaccacttaaaacggcataatttgtactttcttcgagtgtttggctcacatcgtcgcccatccgcgaaagttcccacggctccgagccgtacgccgcgccaaaaatggacaaaggcggagaagtgaccggcggacggacggtaatgtgcgacggagcggcggttgaataccgcgggacattgtttatccgacgggacgcatatcgcgaagagaaactgccatatccgtaagtgccatagccgtaactaag

SEQ ID NO: 13250 - DNA, 4099 bp, Heterodera glycines
gcaacatctggccaatgctcggaaaaaacattcatggcattgaattgcccgtcggaatttttcatcgtttgcgtcaattcaccccgtcacttctcaatgaatgtccatcacttcgcatttccaatgcatattacttttgtttcttccccgaattcccatgcaatgacaatgccgcggcatcggatggacaagcggtggccaaatggcttttcactccacttcaagacaatgtgccaaaggtgttcaactgttggttgcaaaatgatgaagcgaatttgacgtccaaagttgaagttttgattgatttggcacttttatgggcgttgggattttctgacaaaaacattaataactacataattaaaaattgtgcggacaaaaatggtcttttcctaagagaaaagtgccacattttaccatttcatttctttatcaatttgctccatattttaggcttttgcctcggcttcatctccgtccaatttcatcatttccatttcgtttcctttgccttttgcttcctccgttgtaccatttgctctaaccaacgaattgactcgggagcaattggtgttgaaaagaactgacaataaccgccgttttctgctgattcgggctctactccagtttatgcgtccaatcgacttttatgcgtccaatcgctttttatgtatcaaattatgtttttttgccaaaataaaggttttatgctttcatgagtcaaaagtttgccacactttttatgggcagccgctgcctttttccattagtcggcattgagggcagtcgccgtttttccattagccagactttgtcgaccctcgtgacagacaagtgcatacccaaggcattgaggctacgtgggggtctctgaagacatctcttcgccatttgcgtggctcaaatgaggatatgttgccgacatatttgtatcagtatatgttcagacgatttcacggaaattccaaaatatatcagcatattttggaagaaatgagacgcaattatcccgtgtagtgtaaaagagatttttttacaaaaactggcaagggataataattttcacatggtaaatattattggatacataaaaaatgattggacgcataaaacattgattggacgcataaaactttgtttggacgcataaaacgtgattggacgcataaaagtcgattggacgcataaaaaacaattggacgcataaactgaagtagagccaaatccggtatcttttttgcataaaaattccttattagcctcattctttatcattttcgcccgcacaattgtaaatcaaatacattccaaggtgttcgcccccgaaaatgcatcatggaaattatttttaaaatatttatttctgtaacgttaattattgtaatagatcgagcccggatttttcagcaccaaaaaatgacagcacttaattcagcatcaaaaatgctaaattaagcacgaaatatgcatgaaaatggcaaaataagcattaaaaattgaaaaaagcataaaaactggtttttagacaaaaaaatttgtcagataacaataaattcaattttccttttcgtactgacaattataattttttttagcaaaaattgacattttaagtcaaaaattttgtcaaaaaaaatttggggtgaatttttgagaaaattattcattttcttagtgatgtatttttggaaaattaagtcgattcttaagagggtatctttgaaaatttttaggtccgttctaaggggtgtatttttttctgggagacggtgttttcaaaaacatactattgtataaagggatcctagtaaatttgtttccatatagaaagggaatgtgccaggcccgaataattaaatggtgtccttcccgaatttaggattccccgggattattgcgatttccccaatttcctattccacatttaattgcccagttccctttaagtaattctccgctctttatatttccatgtccttttctttaacttctccattatccaattaatacgatcgatttatttatttaaaaatggaaaatggttgtgattgaaatgtgaaaatggaattgcgaatttaatatgaaatcggtaaaaacggaattatgagtttaatgtgaaatcggtgagaacgaaaaagatttgagttccaaatgtattttagtgaaaaatagccaaaaagcaaaatcctgagggacggcctgggatgggagtgggaaggaaaaccaaaggggaattttatccggaatcgaaaaagggactcgggataacgataaaaaagggacggagaagaattccttctccggagttgctagggaaagatgtccggggagcgccaactgattctccattttccacgggggaaagaatcagcgaaaatgctgatccttaaccccgccttttttaggggtactgtaggttacaatagcgacaaatacaaaactcaaattcaatcttcatcacaagtttaatcatttctttctaacaccgtcattcggcctaagcctaaagcctaggcctaaccaaagcaattgtaagagttatcgttgtaatgggagcaaatgtaaattatattgaagaacaaaaaaattaattaaatcatatttctacagaattttccgttccccagtttttttttttatattttttgttgtagaaaagatataaattaacaaaaacgaatgataaataattcacatttaaaattgtattattatacatataatacaaataaatattcaagtttaaacgatccaacgaatcagaaatattttatgattttttttttattacctcttttactttttctttgtcatttggtgtgaatgattcacgctaaaattaaatttgtattttgaataattaaaacaatatcacttatcaattagaaaatatttttgtaattactcataaaatcaaaaaagtaaaacatttacctatttttattttaaaacttcaaaatcgactcatttgtcagctgcttaattaaaaatcctaccatcttttattaatataattttagcttttacctgtccaaaatcttctctgtgattgagtggaaaaccattctaaaaatatttttttaacaaaattaatcgaatttttatttcaatttttataactgcatctgaaaatgacaccgaatttttatttcaaataagaaaattaaataattttaatttgaaaattatttttaaaatttgccatttgaattatattgaattttgaataattaaaaactaaattttcaatattccgggtttaatggtcaaacacatcatggccaaagctcactcatttctatttcgagaatctcgtgaattccaaatttgctattttaagcctttgcaacaattagaattaattcaaaaatatataaataccattaatgttgatgtgagaatagctatccgttcttggcatggaattggtcgactgatattttttcgatggcatttgctcacttatcatcggatcgtattttgaaacgcaaaccccaccaaaagtgccattggtgttaaagaaacaaataaaaatgaagactaaaagcatgtttagcatcatttgaaccgcttaaataaaaaagatatttttaattttagaaaatttagtaattaaaattaatagagctgcttgagataaaattttcgggacaagacaagcaaaacgagaaacaaaaagtcgagcaattttcagctcgagaattgagagcgaaaatttaccccgggatttcaagaatctcggtcagcctttaatcggcatcagattagaaatttgtttttctttttattgtcccagagttattataatgttatcagaaattttgctctgttaagaatttttttttaatgtattatgaagaaagaaataatacgaccaaaaaaaggctaaatttttttataaatttttgtttatgataaatattaatagaaagctataatgttaaaatttatctagcataaattaaggaaaaaataaagctttagaattattatacatacaaaaatttttaaagtaatctttggcttctcaaatcaaaattttttattaataaaggagaaaaaaatgaaaaatattttctggagttatcccaaatccgac

SEQ ID NO: 13251 - DNA, 2856 bp, Heterodera glycines
tattatttttataaaatactttttcagaacagagttctgaatttttttctgaaaaatcgaatttttccagaaattctggaataacttatttattttggaagatagaaattccaaatgaatctcataaaattctcctaattttttgctatttttcaaactttattccactaaatttgaccaaaagcgaagtgagttatgaattttcaaaatttcactggattttccagggcccaaattgtgaggatttttcaaaaatttttaaccaccttccaaaaagtctgaaaccaaaaataaagtatatattcgtcttcagcaccataaattaggccataaaaatgcattttggctaatttaggagcaaaaaaatttttcatgaaatgcaaaaccatggggtcccccctatggttttgaatttcaaaatcacaattaattttataactttttttagactcgtgataatgagatgatataaagcacattatatagggcttaaaattccctacaaaaattgtctaagaagattttttgctaaaatcaactcctgccaagttatagacccaaaactgaaataagcgctcatttccagaaaattttctatttctaaaaaatttttgaaaaatttttctgaaaatgccaccaatcgatagagcgtgaaaaacggttgcttgaaagtggtcttggttttcccgagaaaaatctacaaaaaataataaaattcaaaaacggaaaattttcgagggggcctagctcgaaaatttctgaaaattttcaaaatccgaaaacacggatggatagagctcgtcgagctgcacaaaaaagtaattagcaccatcacgctcagatcaaaacacaccgagttattcgcgaaattcaaaaaatgccaaaattggttttcaaaattcgccgaagtgtacaggccaggcctttgatgctagggcctcgcccaagaagaaaaaaatttcccaaacattccaacttagtcgcctcccagcagaagttttttgctccgggttcccagaaaaaagttttggcccaaaaaccgcatgcattttttataaaaaagccatttcagcgccgctggcgctcagttggcctccggaccggaatgccattatttttcctggatgcgcctcaaaaagttgcttaagcaatgccacattcccgagcccctcccgccagcggttcccgagatttttgttttagcaatgagttgccttgtttctttagtagtatataaactagcgggtgcgtgaaccgtcggctatttagctgggaaaaagcgcttcgcgctttcggagcttcgctacctagataagctatggttgtggagattttgaatttttaaaaaattatctggggacttttaggccgcttcgcggcctcgaacgggcgctttgcgcccgttttttaaattttgttgggcttatacgtgcgcttcgcgcccgtttctaaatttgttgggctattaaggcagcttcgcggcctcagacgggcgcttcgcgcctgattcaaagaggtacatcagtgattaaaaaacgtacaaacgtgaacaaaaaatcctgaattttcaaagcacttgtaaaagtgacagcggatgtgcaatttcgctgcgcttatatagacttttggagagtagtgtagagtgtagtgtagtgagtctctacactatagaacacacctacactctacactatagaacactctacactatagcacttgtaaaagtgacagcggatgtgcaatttcgctgcgcttatatagacttttggagagtagtgtagtgtagtgagtctctacactatagaacactctacactctacactatagaacactctacactatagcacttgtaaaagtgacagcggatgtgcaatttcgctgcgcttatatagacgtttggagagtagtgtagagtgtagtgtagtgagtctctacactatagaacacacctacactctacactatagaacactctacactatagcacttgtaaaagtgacagcggatgtgcaatttcgctgcgcttatatagacttttggagagtagtgtagagtgtagtgtagtgagtctctacactatagaacacacctacactctacactatagaacactctacactatagcacctgtaaaagtgactgcggatgtgcaatttcgctgcgcttatatagacttttggagagtagtgtagagtgtagtgtagtgagtctctacactatagaacacacctccttgcaattttccaccttaccaaatttcgaaaaataagcactcaaagaagcgtctgtggtatcaatagataaactaaatacaaaaaaataaggaagataaagtatcataaggcaaacccgccaacgaagaacttttatttttataacttttttctaataaattataaaaatgccaaataaaatttataaaatagagaaaaaaactgcggaaaataatacgtaaaatttccttaagtttaacatataacacatttaaatattaaaataattgaaatttaaaaaaaagtggtagagtaattattgggaggaagcggtggttgttgcaaccttagatgtaacataacatgtaacatgtaacatattaaattagaaaataaataaacaataaataaaaatttgtgggttatttatattgaggggacagttgaagtaacatgtaacatataataaacataaaaagcattaacttcatcttatttttctcaatttttgttgttttattgcatataaaatgaccaattctattttgagttatgaattttcaaattttaacccaaattcccaagggcaaaaaattgcaaatttttgcaaaatttttttaaaaattctgagacgcaaaacaa

SEQ ID NO: 13252 - DNA, 1217 bp, Heterodera glycines
tgtgattacttctgcgcccgtcccccggacaaaaagcactttttgcaaattgtccgaaatcacctaaacactttcattttgttgcgtttaaaatgtcaaagtacacctccaaatactgaatgtagtcgtccacttcgtcctcaaagaaaggcggcttcggaagagaaaaaagcaccaattgactgcagcgcgagtgttccaaaataagctcattgagtcggattgccccgtgcattttatggacctttagagaaaaatgcggtgacggaccatcccatttttatatttctaatatatttcgcatttcggtttccagttttgatgacttttctcttttggcttcgataatttccccgccccccccccacttattgtcaaagttcgtccattcgttgacctttcttcggtccaatgcctttaatattcgctgtctcctctcagtgtcaacgcatgtctccgcttgtgcactttctttcctggaaaaagaacggtcaattggctgtgccgtcacttcgttgggtggacattgtctctgccacttggactccctccgtcgtcccttgcccttccttccgtcctttcgtctccgtttgctcttccgatgcgtcttcatcagtcgatgcctttgtctgttcctcttgcgtctcctcttcctgactttgcgtgttaggctgaaatgcaacagataaagggagtccatttgctccaaatgggtcggtcagtcactccaatgttcgcttcgtcgttcagttgggtcgattggagcgagggcattcctcgtcgttgcatttgcttcagcattttggtcctttcctccataagcaaagtccgttcgtaagcagtagtcgacagttctgggtcattgagttctgtcacctgacaatgaacgcacaaaatgaaccgtccgatcgctttcccgcgcccccaccaaaatttcggcatcgattcgcaattggtaaacgtagtgttggagctgtttcttcagttttgcgctgttttcttgcggacgagcgactgcaacgattcgagttttgcaactgcgccaaactttgctctgtttcagcagaaaagtgatcagcacacacagtccgccatctcggacaatccaataaacgtccaaatagccactcaatttaacgttgctcggaaattcggttattcccttcgccaccaaaagtgccattccattgaccgcgccagccaacaatttgtcttaa

SEQ ID NO: 13253 - DNA, 1285 bp, Heterodera glycines
cgccttcagttgcgacgcaaagtcccacaatttcaggtaacgcaggtcgaccaattcctttgaccagggcatcgactgaaggatgagcagttgcggtctaaatgaaacggcaatgtccgattgtgtgatggcacgcatcccgaacctccaattcttcggatgcgggtccttctcgggaatctgcatgagactgtattgtgccgtactcagtgccaaaccgcgaatgccatcgccccattcttttttggcacttgggggtaatcggaattagaaaattgaactatcaaccaaacgaattaccctttccattcgacatatttgtaaatgacaatgcaaaaaacaatagacaaaatggcatagtgccaatgtgtgctgaacataatgaagaagcaaagagcggccccgaggacggacaacgacctaaaagaaaagaaagtgtcgccaattttggctaatatgggaccagtgatagtaaacgaaacgaggacgccaattaggagcacccaaaatggaatgcaaagcacaaatgatgttaacgaaggcgtaacacatcagaaagaaaaagtcgagcacagccgcgatagtgtccattgcgcccatcaaaatgccaagttcggcgatgagagtggtgagcagcaagccgaagaagggctaaaactgtccaagtggaagacaacccgggcaatcggcatgcctcatttttcttggtcactttggcgaatggctggaggaagggaatgacgtcatctttggcaatgctctgcaaaagacgaggcgcacctatttgggatggacaaatggtgacgagcaaaaaacatttccatactgcaaagacattgaagagcagcaccgaaagtggacaggaaggacccgaccaggacaacccattcagtgggccatgccaacaacgcaacgaccattcgcccgtccaatgagaggccggtcctttggacgagttaagcgtgaatgggaagtgggcctacccccgaacaattttatccaaacattcattcgaaaaatgaattgcttttaaaaaaggacgcgggggagaaaagcagcgagagagggggcgagggaatgaaatgattttagtttttacctattttcccattttcaccacctattttcgcatttttagcacctaaaaatcgtatccccataaatgaccatttccccgccctttgtccacgctcttctcccacatcgtcctgagaaattcgctcacgaaaggtgaaatttcagtgaaatatatctcccacttgtctctgatcagctcgggtttgat

SEQ ID NO: 13254 - DNA, 931 bp, Heterodera glycines
ttcctaagctcgggcagtgccccccccccccattcgttactgtgtcatatggccccatcctttcttatcggtccatgcaaatgctctttcttcgctttaccttcggtgctcgtcgcactcaattcggaatcactgcgattttttccattgctgttaaatgggaagaggaaatgaatttaaaaatgatggaacgaatttgtgagaatgcattgcctttttcgaggccaaaggatgcccatcccatcgccccggtaaccaatccgaaccccaaacaatggacggagtgccaataatgaattcccgtggcactgtccgattttaccttttgtctttgccattcgccgccactttcggtggacagattaaattgctgtttcgttctgccactttcttccgcatgaatgtctttccttgaaggccttgtctgaaagaaaaaaagaggaaaagtataaattatcgaagggcgggcggcaaggccaacagaatgaattttcaatgatagtaattgggtaattaatttacaaattgatactttcatttgaaaaatgcgtgtgctttttgtgggggtggcaatgggtgcaaataaataaataaatgcgcactatgcaacgaatgcatccaattcactcatctcaactcatcctcgccctgctttggttaattgatggactaatcaaccgatcaaacgtcgattttcctttttgagcgctcgttgcggtgatcaatcgctgccccgccccaattgattaataattatacattttgtacctcacgctgtttattcaaccaactctgtatttctaaaggttggctagcagatgattgatctggtggttaattgctgatccataacaccaatgggccccccgcccacgccggtggggggggggggggaaggaggaggaaagaagcgattgtgaagcgtctgaca

SEQ ID NO: 13255 - DNA, 952 bp, Heterodera glycines
attttgtaatttaaaattttgttgaaaaagatttaatttttattaaataaaataaaaatctgaaatttcaatttattaaaaaattttataagctgtttttgtcaggttttctaaagcaatcacataaaaataattaatttattcattaattaaccaattaattttactcgctcaaatatttatatatttcgaatataaattaatataattttttttttaatatttttttgaccactattatatatttgtttcatacaatgttgtggacaacaacatttccgctcaactcaaatccatcattatttttggcaattttatgccaccatttttcatgtcattaataaaaagcttggtggacggacacacattagcacagcggcggagaattgtccacccaaaattgatgactttatagggggaaagcgatattttggagattaagcatgggacgcgtaatgggagggacattaagcctatttagccgttggtaggggaaacataggcgaaaaaataatagaaattggaataaaaggaatcgtgaaatttagaatttaaaaaaattctttattagctaagctaattaaaaaaattagtgaaaaaatttaaaaaattaaaattttttttttgcaattaaaaattataaatttttaaaaagaattattcttttagttttggaacggcaaaattaaaaaaaaaattattatgctaatgattaatcttttataaacctttcttacacagtcattgtcatattttttggtcaccccataaaattttcgaaaattttaaaattgatccaaaaaactttttaacattgagagcacagaaaaatctaaatacttcctgcaaacttaatgtttggaatttttaaattaattttgctcttttaattcgaaaaaataaacttaaaatgaattttcattttacgatcttccactgaaaaaagtaaaaa

SEQ ID NO: 13256 - DNA, 1860 bp, Heterodera glycines
attcattatgattctcagcatcaatttgcattgatgttgacgcaccgttttgctagcaaaataatttaaatcattaattgattaattagtgaatggatttatttatggtcgggcgggcactcaccgcccccatttgtaccaacaattttgtccaaaattgcctttctgacacaatggtacaattgaaatttttgaaactcattttgaactttttcaaatttggcattttcattacaccaataagtgtaaaattgctgatttgcttcttcttgacgctttttctctacttcaagctcagtcttcaccttttcaagttcaataattttggcttttaaactgcttatataagaatcagtgctttgtcccgcaacaaatgaagtgcctaataaattttaaaaaattaaattttcttgaagcctagaattttttgtaaataaaaaaacgtgtaaaaaaacttgaacaaaaagtctcacaaattttcacttcaagtgaattttcaggtaactcgctggaaaaaattttcaaggcgggatggtgacaaaacctacaagttccctgacattaataacatggctagaaaaatctcttgatatcaaaagatccgcccccattcgtttttgataattttaaatcaatcaaattttaaaattttatttaaattttttcttctaacatttattacgtaattaaattattaattaaaaaatttttattataaataaattgtaaatttccaacttgcacttccctgccctgagttttcttttccatctgaatcggatgagtccgggccaattatgaaatcaccaacgccaatgcttccatgcatatttatatttaataaagatataataaaaattagttttttcatttttttttttttttgcaattttatttcttacgatataaaattatgtaaataaatattttttataaattattttttgtagattaaacacgtaggcggaaattacaacaatataatcaatagtaaatatgcagaatagtttatgtaaaatgaatagtgttttaaaaaaaaaatttttttgtggcaaaacgagagttccgacggggaaaattttgaaaatttgttctgatttattaaatttctaaaaatggccaaattttgcaattttggcgcaattttttagatttttggggaggaaaatctttgaggtgctaccaataaggaaaaatcacaaaaaaattcttagcaaaaatactaatgaaacaaaaattgcaattcattgaaaaaatattaaataaatgactttttaaaatcaaattagtttgtttttcccatacaaaactgtaaaaaattaattaaaataataattttttttgttcatattgtaataaattaataataattattatattgtatattattcttttaaaaatcaataaaactcagtgtgtgtttcgcatatatcagactaatttatctcaaaaaaaattattattttattcatttttaataaaaatgatttttttttcaagttcgtcctcccgtgccaccaaagcccacagtgatcaggcacactgatcgatcagccactttacagtgggacaaatatgccagctcagcagcccaccaaccgatcattcgtttctcaattttggttgccaaaatagaggacagttcgcttcgtgttgtttccacgccggacaacagaacggtgggagaaaaacaatttataaattgtaaaaattatttttatttaatttaaaaatttttttttttatttctcataattttattgtgccaatttgaaaatgattttcatgattgtgattgaattttaagctgttaatataaagtaatttattattgatacataaatattttcacaaatatat

SEQ ID NO: 13257 - DNA, 4317 bp, Heterodera glycines
aagactgactgacttcgttgtagaacaaattccagtccacttgaacggcgacgtccaacggcacacaattgtaaagcaaatggaagtgcgaaattagcacgatgcctttgcccaaattggcgccgaggtcgttgcacatgtcaagtgccatttgggggttaaaattcgcgttgaaagtggccgagccgatttgtgtggcttcgaacatgtcctaaaatggatgaattagggtttccatttgaaatggaagaacggaacaatttcttgtcgaacaatcatctttttgtcgagcaacgattggacagtccgttccacaaaggacaacaattccgtgtcgtcagtgtgctgaacaccgaacagagaatggcgtagaaatcggaagagatcgtcgagtgaggagcaaagctgagaaaaggaggagcaattggacaatggaagacgaatgacccacacactttgagcacaatcaaatccaagaagaagccttccaattggacttggtcactgagtccgcttagacacggctcaatgggtccctcgtgcattttcttgaactaaaagatttctcatgatattttaattgccaattgcccaccgtttgtgcctctgtcccgtggtgcaatatcacaatgctgtcccctttgtcgtccaaccccgccctgcccgcccggccaatcatttgcaaatattgtgccttcttcagctgctctcttccaacatgaggacttcgaatgatcactcgtctcgcgggcaaattgacgccggcggcgagcgttgaagtgcagcaaatgacggaaataatgccactctgacaaggaaatggagaatataaaatggacagacataaagaagtggtggccaactttgtacgccccctccaccaattggcgttcgtcgctggacagtcccgagtggtggtaagccacgccgttgcgaatgcacgcactgagcaccggacagatgaggccctcgtgttcgtccataagtcgaccgatcagtgcatttctctcatcggctctatggtcacgcaattgtctgaaaatgggaaattacaaaaaaaaaacaaataataatgtaaatgccaacttcggactgaaattggacagcatttggcacacgttttcgcagctttgtttggtcggacagaaaatgagcacagatcccttgagcaaattgcccaacaatttgaacagtccgtccgggtctctcctctcgagttcctccaaatgaattcgttttttgtgacccccctccccccgcaattgtccgactttgttgcccttctccaattccttctccatcctccactcgccctgctcgtccaccctgaacagtttgtcgtgcaattttatcctttcaatcagcgcaacgggtcgaaaatgagttcggaagagattggcaccaagaaaacggcacagttcagaagcattgccaagtgttgcggacattccaatgagctgaactcgttcctgttgctgttcattggtgggacggaagagcaatttgcacagacactgctccagcaaagcgccccttccgccctgctcacccaacatgtgaatctaaggaggacataatgactcgtaaggtcattagggcatttccatttatgacaaattgggtgccaaacaatcatttatttgttttgtttttacattttcacctcgtccacaatgaccaggcccaattcgtgtgcccttccgttctcaatcaacgaattgaccagcccattagctttttcgatggtgcaaatgtaaatggatttggccgtccgtcgtcggatgggtgggaaacgccctttcgccgcggcgtattcctccacaattattcccaatttttcttcgaaagaagacagggaaataacctaaagggtaagatggaataatcggaagggaaaacggattttacatacggaaattataaggaattaattgcacaccttttcctgcacaattgccacatatggcaaaatgagcaaacagttgcgtcgccaccgcacacattccctgagcatcatcagttccgcgaccaccgttttcccggcccccgtcggcagccataaaacgaaattttccctcccttcgaccagtcgctcatcctccaaacattcacgttgccaagctaaaacaaaaacaaataaatattaaagtaaaaaaacaaaaaccgaaccgtaaagcgagtcaaagtccctaatgttctgatacgtatccaaaacgtccatcgcgttggacactccaacatttatattattgacccagaaaaacagcaaatgacaaaaaggtaggattaagtttaagcaacaaattaaaaatcaagaaaaaagcgaaataaaaaatacttccgaatgactgaaaagaattgaaaggaaaacagaaaaacggagtgtttaagcccagcaaccaaagaatgagggaaagaaactaaaggggcaaaaagtgagggacaatggcaaaggaataagcgcactttggacgatagaaaaagggaaaaatacgatgaaagatgaaaaagagacaatgttttacacaaatgagaaaaggtaaatatgtaaatgcattgtgaaaatagaaaggtaaaaacaatgcaaagtgacaaaagagaagaaaaaagggggaaaatggacgaatggccataaaatcacttgaacatcggcacgacaatgagaattgggaaagtgatcagcaacagcagcaactgccccgcttctccagctcgacctcctcagcaagtccaaagtatcggatcagtcccggatggagtctaaaaacaaacacttattgttagtaagtgattcgagaaacttgtcaaaataatttggaatggaaaccgaacaaaacccacctgaaatgcaatggtcggtccgatggctgaagcagaatttccccatccaaattccaagcacccgagtgctgcccctgctccgcggctttgtccgtgtcctcccctgacggaacgatgagcgcctcgggcgtgaacttccaacgggacacccggtacactttgacgtcggggtactcatcgggaatgaaacgagcgccgtacatggccacctcgaataaaaagcgagtaaaaaagaaacaattcgcaattcgcaatacctttcttataatttgtaagttggtgaaacgggagactttggggactggcggaaaatttctttttgattatttaaagtaaaatggacaactcactcaatgccaaatccatggtgccgtcattaagcccggtgtatggcgcaagaccatagggagtgaatggcgaaacgcacggaataacacagcaaatgacatgggtaaagttggcttgccaatggaatgggaaatgctcatccggagggatgcgcctgaaacaaagacgatcaaattcaaataggaaatgtccatggaattgttttaccccgagcaaatgtcgcaatggccgacgcatggcggaatgttggcgggggaggagggaacgtcgacgacggtcgaattgacagtcaaaggcggttgggaggagctgagagcgaaggaaacacgaccgaagtatgtcgggttgcggacggaggtgcgcagtgcggaatatacgtagcggacgggccccaaacatcggtagctttccgagtcgcgcaacacatcgccaagcctaaaaaaacggacaaaagcattggccactcaaaaccatttcgtcttaccatccgcacgaaatcgcatcgccagaaaatcgtgaaagcagcccattttcgtagaccgcacaaatgtccaccatccgttcgtttcctaccgccacgtgaatggcagcggtttggtagtcgttgactccatgcactgtcgacacaatcgaattggccgagccggccccaattatgcccagccgaatgcgtggcctctccaacacggtttcgatgttgttgtaattcttcccatgctcaatttgtgtgctaaaaaagatgttaaacttcttgtttatgttaaccaaaaccgaatgactgtggcggagagaatttcgttgaaaaggccgtcgccaccgaccgaaacgatgccgtcaatgccttcccatgggtcgacgctgaactcgcgcacaatttccaacgcgtggtcggccctttccgtcttgcgcacttcgtattggatgttggccaatttgaaaattggctcaacctttattgtttggaagggtttaacagtaagccattcattataaattcgacctccttctcccaaatggaaattgcgtgtcctttgccaccgaatgggttgatgaacaccaacagacgtttcggtcggtgtttttgggctaaaacttttcagttttggcgtttttattaaaaaccaaaaa

SEQ ID NO: 13258 - DNA, 2669 bp, Heterodera glycines
  unsure (1)..(2669): unsure at all n locations
aggtcgccgatgggttcaccgggtgaaaccgatgcgagtggaggcgctgtttgtgttcccgggcgaacgttacgacattctaatcaggtacatgggccaaacgaacacttattagccggattgatcagcataaaacgaattccccccaattcagaggactcatttcccctcgtcggcgtttataccgaataattgtcgagacgatggaatacattaattgggattggactcatacgaaagcaccgaccgtagggcttgccaatttgtactatgaagactttgttggcacagaaaaggcagtagatgttgacataggttggcaattagcgttattttccaatttaatttcaaattatctaaaagtggattggacacatcgccaatgcacgcccgaggcaaaatgcaatgtgctgaattgtccctttgagcagtttccgccatctttgaatttgacttgtgtgtccgcccatctgttggagagtgcggaaccaatcgaagacaccgaacttttggaacaaaaagtgttccccaaggactcgtttcacgtaaacatgcgtaattaattaattaattaattaccctcatagtattcatcaattaaaccgtcattaatccgaaagagtcgtccaacggaccactcccccctcgtcactaattgttaaattattatttaaaatgatttcctcacggcacaccggtggtatttgagcagtctttgtgccttctcttttcaggaagtgttcgccaatatgcacgcggacaatcacttcgacggttggctgtttgagcatccgtttggaattgtgcgagtttggcacaaaattcgcacagaattgcgcacgggcagcggcaagggctgaaaacttacggcccggaaggcaaaagacacgaaaattttccagaatttagatttttctttttactaattatcctgagttgtggtttccttaaaaatttttgtgtccggacgggtagaaatttcgggtcggggtcacttcagcgcggaccatttcggctccgccaattttgaactgccataacttttttgtttgacagttaactgtagccaattaggcattttgaaagctttatttgttctcgacatttacatgtcaaatttgaaaggaattttcaaaagtaaataagttatggcacgcggtgccgaaaagccaagtttttttggccataactcttttgtaaaccgacaaaaaatttttaaattttgcatgctaataaagaaccttaagagctatcgaatgataccaaaaatatttaatttgatgataatgagaaaagttattagcaacggcgccgaagtgggcggtccttgaagtttttgggttcattgcgctgcatttccataagtttaaaattatgaatgtcctccccccccccaaatttaagccgtatttcaaccgtgacaatttgagtcgtattgcacggctttgcgacacgagcgaaagctgcagcccaaaaacgaacgcacattgggtgttttaactgacaatttcggcactttttatcactttttttgtcaaggaccgttcctgcgattgttttgttcacttcaacttcacattgggctccgtcgttcagatcaccatttacaacatgggcgacatgggcaacccccacgggccggtacgatttcttagggccaaaatgcccccaccccgaaatttgttgcagggctattcgcacccactccatttgcatgggactcatttctacctggtcaaagttggcttcggcggataccacgcgaacaatggcagcatttggacaatgaacaaagacatcccatgcatcgacgataaagtacataataatctgagataactcgtatcaatgccttcaatttgtatcaggagcgttgcgtgggactgaaatgggccaactcgacttggctgggtggtaatgtgccggccatgcgccaaaggccgtcctcgcgggacacggtcaacatcccggtcggcggatatataactatacggtaagcgcgcgcgtccctttctttgactgaatgccaaatttatttccgatttcgcgctttaaatgccggctggtggttttcccactgtcatctgatgctgcacaatatggtcagttgattttctaattgtaagagacccattttaattttaaattaataaagggcggcaccgcttttgcttttcgtgtcggcaccgacgaacaaatgccgaaaccgccggacgcatacccacactcatgcggaatataaagacgaaaagtcaaattggggacgccatttttggcattctctgggtgtcaattccaaatgtttttttaatgaatttaatgaccatcaatatgtttaattgcccaaatattgtattttacatacctttttttacaattaaaatattttcatttaaataaaagtccaatgactgagtgaccgtttggccagcaatttaataattccattaataatacgttgttttgactttcaaatgccaatctccctctctctttttctttccaaatcctccaatcgcattttccttttgcgcatgagtgaatgagtgccgccgcctctaagagtgccaaaaggagcaaagtgggccaattaagcagaagggcgcaaagagaaaagctgggtgacgatggttttgccgantggtggtcggcaggatggatgnaataat

SEQ ID NO: 13259 - DNA, 2212 bp, Heterodera glycines
  unsure (1)..(2212): unsure at all n locations
aaaactttttggtttaaattttttttttcgtggtgggcgaggcgaattgctagaggcctcctactgtaacagtatgcctgggttaaatgacaaattccagaatactggctctatgtatgaatgccctccgtttttttttctttttcacattttcgccttctgtagatgtatgaagtgccattcccgtcgccggctcgtcctcgcgtgttggttgagcttggcagcgacatgatcgcttttgaaagcagcgatgacagtcaaacgccattgacgggtgctaattttgtggagacgttgaagtgccttggcacggaaaatttgctctacgccatgctgctgacactgcttgaacaaaaggtgtttttgttttccttcacagcgaatagagcaaacatcttacaattaacaatacattttgtcgaatccgtggcattcccaagatttaaagtttcctaggccttttttttgaaaaattctttgtttttgtaaattttcacaatttttcggtaactaacgacgggggatgccatatttgaaaacaaatatttatataaatttataccactttcttttgctcattgtcagcttcttgtccattctcttcgtccttggctgctcacctgtgtggcggagacactctgtgccctgatgttcccattctcatggaatttgccctacatacctcagtgcccgttgccgttgggcttcgttttcaacgcaccactttcattcatggccggcgtcgattcacggtcaaaatttgtaacttctcctttttattccgtaaaaattctatttcctagacccatttttagtaaaatttaaaaaaaaagaaggatgccttaacattcatttcattaacacaatgtttgctgaacattttaagctattttgatctctacgaggagcctccgtcggatgtgacctgtttcgacttggacactgcaacaatcagccaatcagcggttcgcaaattgtaccaactgtccatgttgccgaaaaagccgctgaagcgtctgcgtgccgcgttggacgaaattggcacaaaaattagtgaaaaacagcccaagaaaggcagcggcgctggcggcggtgccatggactacgagcaaacacatgcccgacgaatgcactccgaactggcaattcgggatgcttttttgaggtaggaaaatttgtgataggtctctttggagaggnggggggggggggggtttggaaattttttaataattttgtacagatttatgtgttgcttgatggacggctacacggattttctctgtccaatcatggattcgccgtggaaaaagggtgccaccgacgtgtgcaaactgtttgattgggaacactttatgcaatcgcgggacaaaaattccatggaattttatgcaaaatttcgcgagaccacctgcttcaatcggttcatcgaggaacggtcgggcgcaattggcggcgcggaaccaaatgaacaaaatagtgagtggcacagtagttggttatgtacatgtataggaacaactatgatcaaaaactatgaaaattttttttgagcgatgagcaaaaaaagtagggatgaaaatttcgggaaaattactgtaatcttacccaaaaataaaggctattttttaatactggtattattctgaaattcaaaaggcgaggacgcacacaatgagaacggcagtagcaaggaagcaccaacggtggaggacaaaagtgttttctatgtgttctttgacgattgcatcgcaaaactgcgagcaggtaagagggaaatgattttgaaaaaggtgctaactataaaaataaaatttggtgaagattgacaacatttttgagcgaattcgatttttttttttaataaataatttgcttaaacaaacagaggcaatgattgctgaggcagtaagggagaaaggagcacagcacacaatgccgacacgcttgttgctggacaccgaatcaatgatggccaatcgaactgttgtatggatacaattaattaattataaaaagtaaaaaaaaataataaaaaaaataaaactanaaatataaaaggaaaagaaaaagaaaaaaagataaactanaaattaaaaaatccatttataaaacgaaaacaanaaattngcctaacatnnntgtgcttggtatttttctaaaaaaatataattctaaatggaaaataaattaaattttaaaaaatctcttt

SEQ ID NO: 13260 - DNA, 2033 bp, Heterodera glycines
  unsure (1)..(2033): unsure at all n locations
ctctnnagagtcggaagaagttaagtgaattgtgaaatgatactagacaaaaaaaatatcaataataattcaccaccatcgatgggatctgaaccataacagagatctaattaagcgttttcttttacgttcagttttttatataaaaatttcgtcaatttctcttctaaaaattaatttacgaatgtgagtaacatgtcggtttttttaatgaaatagcatatacttttttttaatattttgtttttcaatttagaattatttttttacatcaatagaatttcggaaatttgatatggttttggaatcttctataaaataatttttctattttaattgctttctattaacaggttgtcaaaagttcttcctgcaacgaactcggcaagaggtgcgcaaagcattgactgatgccgcttttttgcatcaacaaaatgcttcgtattggccccgttccgtgctgttttttgcctacacattgtggttcatgcaattgcctgcgctgttggccgtcaccaaaaacaaacgcaaaatgctgctactcggattacgggtgagcgagccattttggtacttttaggtcgtgcactacattccccggatttttacaatttttttatatgtatttttcttataaaaataatttataaaattttctacgaaggcaattgactatctaataaaaccaatggggggggggctcaatttttgcttctcggtgaaagctttattagagggggagctgtacattagacattagtagaaatactttattttactaaattattttgcaaatgtaaggtccttacacggatggagcaaattggagtgcctttccatgaccaagtgtgctaccgtttgttgatgcatctgtgcggcgcctatggacgccctgaaatggcgatcattgtcctgaaaagaatgctcaacatggggatcatcccaaatgcaatcacatacaaagtgtaccacaaagcactgatccaagtgggtgttttattttgtgcgtgttcagtgcccttggttagggttagaaagaaaattcagaaaaatctctagaaaaaggaaatttttctttttacaaaattttcaacgtttaaatattggccttttcgccgcctttcagagcgaatggccctccgaactgagtttgtcggcaattgctgcttggcgtcgtgtgcagtttaggctggacgtttgtgcccgctttcgtgcaatgttgcccaattcagcgaacattttgccaccaccggcaacgcatgaacaaaagctgaacgacatgacaacattgtcaaccacgaataccacggcattggaggaggaagaagaggacgatgataacagcaaggactgctcaaacattgtgcaagaaatcggtaataatttttaaaagaatccttaaaaatttaaaaaaacagacttttaaatacgtatgcaccttttaacatcaaaataaaaaaattcaaaggaattatttagaaaaatttattgttaatatttatactaaaacaaaattaagagaaaaaaaaaatttttttttttaatgaattctggtgaaactttaaggaaatttgacattacaaaatgtgcacaccctaacaaattcagtaccaatgaaaattgttgaaattgacgagcccatttgtgagcagcagcagcaactcctcaccaatcatcacttctgtaataacaacaacaacaacaataataataaaatcacaaaagggaaatcgacaacgatggcaaatgccaatttgtttgatccattgggtgcctctgttgaattggagaccgccctcaacaatgtttctattgttggcaatggcacgccagtatccaggccgccacaacaccaacacaatccaccgccaaaaccaccgagggcgtgggaaaaggttgacaaacgaagaaaaattttttggtagatagatgtaataaagatttacgcgccaacggattaggacaaaaaattcgctgcaaattatttttttaattttgaaaaaaaaaacaagaaatgtccaaaatttcggtta

SEQ ID NO: 13261 - DNA, 1541 bp, Heterodera glycines
ggggggtaatttaagcgagttttttttttgaaaatttatttaatttcccataaatgtcattgcaattggttcgaaacccaaaaaacatttaagatgatatgtcaatttatgttaaaactatgggaaaacatggattttgtttgttggaaaaaaaatttcgttttattttatttgataatttacagaaaatttggacactgtgagtcgggatgatagccttgtttcggatgcacgatcagcgtcaacatcatcagcagcagttggctcaccaagcatcctttcgttggcaaacaaaatgcgtaaacgagcaatgagaagtgagttgaatttgctgaagcagtttaacccctcgcccacaaaataagaattttttgcaatttatctatttaaatgttagttttaaaaatcatcaagaaaagcttttaactttaaaattctagcatacaacgaagtggttggtcaaggtgtcatcaacgatctgctggaacggtccggactgaacagtccggcgcaaattttcaaggaagccaagctgaacctgagccgatcatatcgcgctgctgatcagtccggtctgtcaacaatgtcctcatcggacgacaatttgttcgccagtgatcaaaccggagcaatggacttattttttgtaggcacatatttatttgtacgccttatttttgattaatattcgccataactgttttgcttgttgttagatttgtgctcaacggacacgagatccagtgtcaattcactattggatgaatgacattttgccagatgatgacgctgaactcagggatgtttggttgcggtacagtgctgggccagtcagttcacctgaagaatatttgggtattttttaaattttttttcaaaaaattaatttccaagaaaaatattataatatattttaaaaaattcaaatttaactcacaaaatttttttgtgagtgcaaaggatttttttggaatggtagcgggaagccaattcgttgttaattcaattgaaaatttttttggttgtaaaagaatgcatatagatagaagacatgctgtaatgtgaatcatcatacactcgacagcataagacaggcatttacaagaagaaaatatctaagacgagaatactaagaacagaagccaaaaatcaccactgattatgggtgagcgagagagagacctgcgcgctgaggaaatttgcagacaagcacgggcgagtaaatgaacacaatgaaattgcgcatccaagaagcccaaggactacacagtgaagtagtgccacaatgaaatcgaaaatgatctacagattttgcccacctgtgatgagatgaaacgccacaactgtgcctatttgcttgtccagcagcagagtatggcttgacccgatctccaacttgtcaatgacttccattcagtcagaagaggcctaatcgcgcgactgacgccctgccacacgcgcaccaccagtcaatccggcgcccaaaatcgaccaggccgaccctttgttgacctaaggaccggacgagtaggaatttactt

SEQ ID NO: 13262 - DNA, 2277 bp, Heterodera glycines
taacttcgtctttccgtagcgcgcagcacagtaccttttcgctatataaaagcacgcaaatatgatgcaaaacttcattttaatcagacgattttttgcaaaataaaatgaatacttttaataatgttcagcaaaacatgccggaagaatctaacaacaacaacaacaacaccagcaacaataacagcgtcaatgctaatgctcaattatggaaacttttacgaaaaaagtatattctaacttttaatctttgtcattgctgctcacaaaaattgttcaattcgacaaaaaacaataacaacagcggcggtaattaagcttttgaaactgatcagtttggaggcgttaaggtgcaatttgttatgtgcagtgggtgtgtttcgcttaatatgaggttgagcgacatgaattgtgcaaataaaaacaacgattacaacaacaacaatcgctttagaagcagcttcactaataataactcaacatttggcaatttcgaaaacaatcgcacgcactttgacactgggaataatcaaagcaacgcatacaacaacaacaacagcaatgaaagtggacaaatggtacataacaacaatgccggatggatgaattgattacctattttataacagactaataattttgctaaatagttcattgcatttaatcaccatttcatattgttctaataaatttaaatattaatcattataaatttctttaatcccctttggtgtttgaatacacccgtaaatgtgacaagcgcatcgccggtagcggcatgatgcattagtttctcttttgtgccggttcagaaatgccgcacatccctttgttatttgaatttgaccccgttcgcatcggtcaccgaagcgtcggaccttggctacacagatggccacgatcccgtctcatataaaagggcacatgggaaagtcgccctctttttttttcaccattcacccccaaaaatgaattcccagcagcgccaggcagaacgtgcccaactccgtgcaaggttaaacttgcttgtcgacgaggtcgactttgtggtccaagggctcatcaacaattatcaggccgatggattgatcaacgcggtaagttttcttttcatttcttttgctgtctttttgttttttttgaattttaattctcgattgaacaggcgccggctgatgtacagctaatggagatggataatgggcatgagcaacagcagcagccgtgggaactggacccgccaatgcctgcacagcaattggaaattgggccacagctcccggatgcgtgggaactggttccctatcagccaccacaatgggaccaagttgtgcatgtggaacaacaacaacaacaacaacaccaccagcaacaacaacagcatcagcaaggcgcgtgggacgagggatgggaggagcagctttcgccaaatgcgttagcgcagatccaggacgaggcggatgggttgcgccaggatttgagtaagaatttcgggtcggggtccctcccataaaacgaaaattaagtggttgagagatttgttcgtgtggggcagccgcagcctacgtggcccggttaccatagatgttcggaaaatttttttttattatgcactaattaataattaatttagcattttggctcgacgagggcacggcaggcattcctgaccaacaacaacaacaacagcatccgatgcagggatgggaaactccgcgcacccactttgagcggcccgtgccgcagagaacgcccagcccttcgggagatgcgccggcggcactgatcagagaattaaatttctccgatcagtgcctcctgtgcatgggtgagcacgggttggactgcgaagtgaccgttcgcggcaacaactgcgggtgtgtcacaatttgtgacacgtgctgcgaaaatggctggtgggcgaggtatgcggatgctgcgcgcgagcagtccgcgcggcagctcgaggacagcctcgacccgtggactgggctagtccgcttagatgaggacagtcagaggcgttgggtaaacacacaaaacattgattttctgataaaatttaatttggttcatgttttcaggtcgaggggcacgatgtgcgccccaagtgtctcggctgccagacgagccgaatcgactacttgatcggggtaacgcggccgcgccgctcgcaacgcacgcgcaaggccacccactgcgccttttgctgttgatggatagtgatgcattttgtaggatcacacaattgatagtatttggtgatttaaaaataaa

SEQ ID NO: 13263 - DNA, 2076 bp, Heterodera glycines
  unsure (1)..(2076): unsure at all n locations
agtaccaatgaaacaaacctccaaatatgccgtttggtcttcctgcaggtggaggacgatctttgtcccgcgggtgacttcaggatcggcacaattgcgaatgatgaacgagccaccagctgagctctcccattggtagcaatcgtcgtcattgtgctttgatgtgacgcggtcggccacagagaaagccgagtagaaagcggcgccaaaatgcccgggcattaaagcgccaatgccagtcttaagaaacaaaagtgttttttagatttggggggggggatcaaacgaaaaacaaaacctgaagagcctccatgaacgccttcgttccggatttggcgatggcgccaagattgttgacgaggtcggctttggtcatgccaatgccagtgtcaatgatggtccatgttttatcggctttgctcgggtcgttttcgatgtcatgcgcctttaaaaaaagtttcacaaaaattatgtaaaaaattagccaccaattctgtcaaacaaaccttgcccgtagtgttgtccaactttggcatcaactgcgcgatatccgattgaaacgcaaaggtttccccggattttccagcaaaaatggcgaacacgatgaaaagcagtgcggcatgggaaaaagacatttttggaatatctaaattaaaaacaattaaatacaataaaaataacacatttaaataatatatatttaaataaattttaatgtgccaaagcaacacttaaaccctacggcattgttcctcctccccagcaagcgtccctccacccaccgagtatcgacgcgaaaattcaaatttgaatttagcgccaaaaattgtaacaaaagtacaggggtcactactgatatcgttggggtaaatagcatttcttttatttttcaaatattactagttatttacaattaatgagactctgagaatttataataaatgtattttatttttattttataatttggtgattgttacaaatttattgattgcagtaaagatttaaataagattaaaacattaaaatatgctaataaattcaatatttggtaaattttttcgcttcactttgaaaaataacggcatcaaccgttcaaaatctgctgggtgccaatttgattgacactgtgctattatgttaaattctttttgatttttttcaattgattaatgtccagcctttctgtcgaaacccttccatcccaactanataatttttaatatttttaaaataaatatttactttatttatctttttatacaatagtacatttttcttttttctatcatatgatactatatcaaattgattacatatattatgtttaagcagtgacgatttaaataaaatttctttttgaataatatgttttattttttttgaagattggcaattacaggtttcgacgattggttggttatatgcgccaaatattattaaaaatatgcacctaatttttttcttttatgatgttttatgcctttttttgtaaaataactttgataattactgattttgtgtcattttaattgtttttttccagaatgcgggcctatcaaccctctcaccctagacaatattgacatagctttttaataaatattcattttttaaatattttttggtatttctttctgttaattatttttaattaaaacattttatttccttttttttatatccattcttttattcaatagtgtcacatgaatttttgatattttctttcaatttaattatctttaattaaaacaatattcctattaaaaaatttatatagtgaatttaaataattacgacagtaatgtatttaaaattgaaggatttgcaaagatcgcaagcgggaaagtgtaaatccatttattgattagttttaaattattaacatttaatgcgttattttgaaatatattaccatggtacaatttcttaatatggtatttgtaatatttaaattgtaacatttcattaaagctcaaaaattatttaaattattttgaggttttgtttaaatgttctgatataattaattgtggaactggtaaggataaaaaaataatattaatgtaaatt

SEQ ID NO: 13264 - DNA, 4241 bp, Heterodera glycines
cctttttgttaagtgcgccgttcgttcgttcgttcagtccaacttttttgtcctcttttgcgccttttccttcagaagtgccgctcaccaatgcctttttttcctttttttacattaatttcccaatttttgatttgatccctttcatttctcctcatcccatatccctcttccccttattctctcacctctccctcctttctttctctctctctctctcctctttctctctctcctctccctcattatctctctttctctctctctctctcctctttctctctctcctctccctcattatctctctttctctctcttctatctcagtttgtctttcttttctttctcactttgctttttggcacattcgctgcgcttgattcctccgattggacttctttcagtgcacaaacattccgataaaagtccacttgttcactcttctgcatcgcccccgacactgtgcccaattgtccgatcactgcgcatgtgccatttcgccgattgtaattaagtccttcacaactgaaatgtatttcataaattttaatgtttttaatcaaaaaccgttgtccggcaccggcacacaaattcaaacatttggagagaggcacagaatgcaattctttgctcagttcgcccccgacccattgggaatacaaatggcgactttgtgggtaaaattggtatagtttgtcatttccgaaattggaaattgtcacctgaacgcggccccctcggggtcgacgcatcccattgattggccctcgggcgatgtctccaaacagtggaggtcataaagatcgaccttcagcagaacaaagcatgatcaatctcgaccagtcagcacttggccagcccacctgtcccttcggctcggggcgcagcgaaccgcggccgtccaaataaagcaaattgcaaatgccggacgatttgtcgaagttgaaggaacggcatttgtcgggagagtgagcggcacatctaagaaaggcaaatcattcgttggccggagaaagtgccggtcattcactcacttttgggcacattcgcgcacattcgcctgcaccgtttccactacgtgaatggcaccgtccccttcgggcagtgctgcatttaatgtccgcacgattttcggacttcgcgccccctctccggcgctgcactgttccgactccaagcgacagtttatgtcgaaatagtcgaccacaaagtcgtcctcctcaggaatgaacaggtccggcttagaatggcgcgactccgcgttcaaaatgcattcttgcctagggggacaaattggaagaggaaaggaggggggggggcgggggacggactcactcgttgtaataatacatcaccgatttacacacaaagttttgtcccgtctcaggaggagggctgaacaatgaacagcttcgactcgtcaattaattaatgaatattcattggctgactttgtgcattggtccaaacacattgtcactgacggcacattttccatcacaaaagaggcaaagcccaccaaaagcatttgcggcactcgcgtaaacgacggaacgccgcggcacgtacgcggggctaagaaaggagcgcatttgaggctgggaatagcgaactcacaggcaaagcatttcttctcgaaataagtccatcccggcacttcggccaaattggcacggcccaaagggcgcgagcgttcgtccgacaaaacgcaactgcgcgtcaagttactgtacatgaacgatttgcagttgaagtcgtttgccttttgagggaaggggtcatccaacacttcctcatttgtccattttcattgattcgtttgtccgtttttcgttgctttttctctcttttcgcccaattgtccgttttttgttcctttttctcttttttcgtccatttttcggtttttttgttaccgtaacacttaaccgttgcgtgcacaactcttcacattcgctcagctccaacccttcaaaactgtggtccaattcgtccgacaattggcgtccttccaccgccacgtattgcgttacgtacggtgcgtaacattgtgctgcaattgcgaattgttggtcgttcaaaatgccgcttgttttgaaattgtcaaaatgccaatggcactcacatccggcgcaattgttgtccaagtagatgaccgtgtcctcgtgctcgtccacgaaaaggtcaggccgatccaatcggtcctccgtgttcaaaatgcattccgcgtccacagggtaatacatgaccgactcgcattcgaagccgaacgtatcgaacgcattcagacaagcggacagacagcggtggactgagtcggcggagaccacctcacgcgcgaaacccaccaaaatcttttgttcatgaacgtcgaaatggaaaggcgaggaacagatgcgctcactctgcagaaaatttgggggaggaatcagtggcataatgaaaacggattgagatgtgaccgaggggactctgccaaaaccaaaacaaacgccccagggatggaatggcatggcccttcccattaataccatttggcaatttcccttggtattttggcactttcacccaccttcacacaattcttcgtcaccgtccgtgtcgtcatttcttcaccaaattctgccacggcaccttcagatgccgacttcggaccgaccaattggcattgtcctcccccgccggcggccaattgggtgtaacggacgccaacgcaatcctaaagagggacaaacaaaacaatgaacttacgccagtggattaaacatacatttgcgacggaacaaagttcggtacattcgagaaaccctccggggacgggcgccgatcggagagggacagtgccggaggcgacggaagtgttgtggtggaggaggaaaacaggcgaatcgcccgcagggcattccgacaaaagtgctaaacgcacaaaatggccattcaacaagagaccctcataatcaatcaattggattattttggcatttcatttttaccttttgtttttgctccattaattaagttaattacccctccccccaattataatgctttgttttcagtgttttccgttcgacccatagaatttgctttgtgaaaagcaattcaggtgaaggtcacccgcaagagtgtctcctcttcttcgtcaagataatgatgattaagatgacggtccgccaaaccgccgtcactggcgatggaaaaggcggcggagaacacaaatcaaaaagcaaaccccccagggctattcaaagaggaaagacattggcacatcaaaaaaaacttacgaatggactgatcggcggagatggcaatgacaaatgagagaaaaaagagagggaaaagcgatcggacggaaggaaggccaaggcgaagacaatgcctttctcttctgtgggggaaaggccaactggacaaagagaggcgcatgcttaaggaaaaatgggggaaaagccaataaaagggaaaagcgagggaaaggaaagaaaaagggaaaagcgaatattttacgaggaatttgatcggaggcttttgctttgatttgaccatatacaaacggcgaaagtggctttctcttctccgtttgattcgcctcagaagaaagcgtcaaagaggaaaaagggatggaaaatgtggaaggattgagggggggggggcaattcatcggaggaatgaaaaggattttggggggggggggagggaattgggatggacggacgagggggggggggaaatgccttcgttagcggtaaccggcggtgattctcccaatacttatgagtctactatgactatttaatcaaattttcatctctctggactattaccttacaccaaagcatggaaaacaattgtgctttttcgcatttaatttctatgcgttttcccttttcttaattttttacctgaccatagcttattctgcaaaaaaaaattgaaattctttgctcaggtatgttctgcaagaattggtgaaatccgagcgcacttacttccaggacctggcctctatctcaggttctaatcccttcgaatgccggaccaattcgagaaatcgcaaaatgcgctcctttcatacggctacatcgcctccctgcggcaaatgggactgagcgacgaggacagagagaaagtgaagatcattttcgccaacatcgagcacattctcgactttcaaaaactttcttcttgaagaaattgaaaagagtcgaacgatcacgaaccggcgggccattcttcattaa

SEQ ID NO: 13265 - DNA, 3455 bp, Heterodera glycines
cattcggctgagtcctaccgtttttatagcgcttgctttaacaagaacgaattttttgcgcttgctccgcttactaccaccctctccccgttgggaatggaaaaatttcatcatttgcgggtcgctgccaattttttgaacaaaaaatcgatgacctttcggcacatctgctctctgtcctgtcaagtacatcagtgagtcaatgtagttggacctaatcaccggctttttgaagtttgttagaatttcgccggacgacttatcgactccgtacttttcggggtttcgttcaatcatttcgtgcagcttatcataatgctctgggcctgttttaagctccaaaaatttttgttgtctctttttggttagccgcaaatcggtctcaggcgcagacgtatccgtttcttcaccaaagctggcaccattgggagtttgaaatctgaaagcctggaccgattttcgtcctatttatttatttatttttttgccatcctgcccgttcaattcttcaagcttgttgaggtttggtttctgtatgcccatatacggggcaatgttttgtggcgctgtgcctgtagcgttttccacaatcaccttttgtggtttgttctcaatcatgtccttgatctgatgcctctgtttgtacaaccacgagtggcgtttcattttcacgtccgcacccgttttattgtcatttagatttttttggatgctggcatcgatcgctgctttttcggcttgaagtgagtccgttccacctgcgccccctttcagcaggttgataagcgccaaatattcactctccggtacaagtagcatctttttagtgtgcttcattttattgttgtgccgatggagttgcaacaattttctggaccagatgttcagctaaaacgctcaaaattggcgccaaaatagctcctaaagctattccgctgccctgttgtagcctctgcctggctgtgcgctcactacgtgaacgtgcaattgctcggtaatagtctgcgtacacggccaatcgtctcctctgtcgccggttgaggcgaaagttaaattttaaaatatttgcacaaatctcaaccaatccgagaatttgttctacggatgcgcctttcagcaaatcgtttttccttttatccgattttgttgaggctaattttttgaaaaaatccgaatttgcgcgaatgtatggactgaactcgtacattttgcgaaccaaaaaaatttcccttccttaaatagttttttagcgcacttgtttcgttcattacacttattctacaggtaaatatacctcacgactctccccggggaatattttgcttgtcaaccgctcattttccggagcatttgggtgcatgtttataaccaagtaactgaacggttgactagtcgcttcattgtacgcctccataaagtaattgagtcgttttgggaaaagttgtgacccaaccgttctgacctggagttgaccagacgggttccttgtcagcaccaaataatggctgttagctcgcgctgttctaatgttacgcccgtataggctttgggtgacaaaaataacgctgacattccagttatgtgaaccacgtgtgaacagcagatccagaaaatcgcttcctacattcaacattaaatcatcaagcacgaggagcagtggtttcggttggctctggatcaacgcttggtctggcaaaccgttgtacgtctcaattccccgcttcatcagatcaagaaccgactcattcatctccgagtagcagtacagaatttttgcaggcggcgggtctattagttccctgtaatttctcaacaatttcatcaaccattgcgttttgccactaccagtggcccccgacaaaattagagtgaatggcgcaataaacatttttatgcatacgttaatgcatcttcctctttatttatatagagatgttgacacccaatttgaccccattttatccccacttcgacttaatcatataattaaattgttcttctacttttagcaaggaacaataatcaatgtcccaccaaccatttgctaatttcgaaattgtacggcttgaagcgatgatcattgggttagaaatcgacaaggaacaactccaacgagatgtttatcatcttaaaaataggaaaacacaaatccataataaaaaatttgaattgctacaacaaaaggaacaattaataagagaaataaatgtgctgagagagacgaaggcaactctggtcaacgagacgaaagatctgagagaagaaatattggaattacgagatacggatggttccactgatgacccactttgcgccgtttgttataccagaaaagtcgtcagcgtttaatgcaaaactaattttggatattttagcgaaattatgcatgcatcccatgtggccatcgtgccctctgcaaccgatgcgccgaaactgtttcaattgatgggcgttgcccgttttgtcgtgaagaacttattggggtgtttaaaatattcagtccctaatttttcgtgaccgaacacacacacacccacacacattgttaattgatgaatttctagacttaataattacaaaatgtttttaatgaataaattttagcataaattataagataattatgtttgtctggttggcctaatggttagtgtgatgggctgacctgtcgaaggttcggatccgctagatggataatgaattaaaagcaatataataaggttgggacaaatggtcgacaaaatggtcgacacttcggacaaatggtcgacagggatgggggcgggccatttgagcgccagtcactggtgttcaaatgggaccgcagttttccatggcgctcaaatggccggctgagcgctgggactgaaatgtcccggcgctcagatggccaggggcgcctgtccttacactactcctcttcaatcacgaagttaataatttttttcaaaaaaaataataaacaaaaaaatatgattattatttattgttgttgaacgcgattaatcaaataaagacaaataaaagaacctcacatatttgaagtccaacaatttttgaaagaataatttttgtccgactaaacatgggggcatcaagttgaaaaaataaagaaaatcatgaatgttttacaaaaaatgtgggactgatcagaaaaatgtccttgattatagcaatttttcatattgaactttgctttaagagcgtgtgatttttcaaacaaataaaaaagagacttacaatagaaaaccagttagttctacataaaaactatttatttaaagaataatttacacaattaactgcaattaaaaattccattataaagaattttaaatattttttcataaaaaagatacgtaaagtcaaaaaaaaaattaaaaattaaaaaaccaattaatttataatgaatttttgagtatttcatattactatgaataaataattaacattaa

SEQ ID NO: 13266 - DNA, 1823 bp, Heterodera glycines
ctcacatttcgtccgcatattcttccatccgtttctccatgctttgtataataaataataataaatattcggctagaaaaaattaatttaatcaaattacgtaaaagtaaaaaatgcattaaaaaaagaaaagcgtaaaatatgaaagtgcttggccctcttcaattgataaaacaacattttgtaaataaaaatgtacatgtaagaaatgaactgtataccatttcaaaattttaatcaaaaagaaaacagtgtggtgatcaattaggcgacaaaaaacgcattaaaaaatcagactgggcagagcgagagaaagagagaggggaagacacaaaaaggggtatcattatccggtgggggtcgattgggccccgccggttgggccccgccgattgggccccggtacgattgggccccgccgattgggccccggtacgattgggccccatggggcagtcacttttttagtcgacttttggtttactttcactaaagaaaaattattacctatgtatatttttaaataaaaaatggtttttttaatcgttaactttgttgcacattaattaaaatgtatttttttgcatgttgggttcgaacctggacctccgaaaaataggaatttaacccactgatccaccgttttgtccgtcattatcgccctaattacccacaccaattcatttaatgggctttttaaaaaaaaagaaaatgggggattaataggtgaaagagatcgtaaaaaattttcgttgagtttttaaaaaaaagttattgccataacactagagttagacctggacctggatccaggtccaggtcattttttgacaacctggatttttcctggacctggattttcctggatttttgtccaggaaatccagtccaggtcaaatgtgaaaaaaaatccagatccaggtccaggcaaaacaggaaaaaacctggattttcctggacaaaattttagaatttattatttcaagtgaccgatattttttcaagttttcaaaaaatgattaaatatatttaaaaacaaattattattgtaaattagatatttttagatgttcccaagcaattaattgaatttttcaaacatttttttgatttttaaaattggtttaaaaaaatccaggtccgggcctggatccaggtctcgagaagcctggatttttcctggacctggatttttgtccaggaaatccaggtccaggtccaacatggaatccaggtccaggtccaggcatttttcaaaatgtcgatctctacataacacttcaaaaaactggttgtataaaaacaatttttggcataacttttttgaaacaacacagcgaaattttgcaatctaatagaggccttttgaggctattgaatgatatccaataatgatgaatttagaggcttctagaaaaaagtatagtgcattaaatttaccaaattattttcattgtcgtcgtttccttttttatggtcgtttaaactgcaacagagccgccacaaaatttaatttttgaggggggggggggtcaatgaattgagaaaaacgaacccaaaaattccacggaatttttacaacttttttttttacaaaatttctgcccagcaattagataggtgtgtgattttccattttcagtaaagcgcctcacaaacaaagaattgtttttcaaaaaaaagcgcgtcattggccctcaatggtgcgtttccgggtccattcaacaaattcgtcaatcagcaccggccaggcgccctccgcgtcgtagttgctcatgtcacactcgattttctcccaagaattcgaggaacaggttccaggt

SEQ ID NO: 13267 - DNA, 771 bp, Heterodera glycines
cgagttgttttaagaaatttattacctttgataatagattcgtgattagcgacctcaaaagccaccaacaattagttttctcgactttttatgacaaaaaaatttgcaaatcaaaagggtcccccctatgggttttccggggtgtgtaaactggaaaagtgccaaaatcacagtaatatatgcccaagtgtaacgttttccaaaaaaaaaaaattgcaccacaaaaaccgaaccacaaatttggattcgaacataatcggacattaaaattcgaaatccgagtctaaaatcatttttcgtactgatggtggtacaaaagtccatttttaccgtaaattcgtcgggggtaaaagcacaaatttaacggatttcagaccaattgtttaatttaaattttctaaccttttctttttgatcccttctaagcctgttcattgctcgtgtttctttggcgattaatttttgaattatctcgatgaagacttttgctgcaaataaaaaaattggattaaatttacatgtgaggctacgtaaagttcccgtactttgcgtataatctgtaaggagattaaaaaaaaagcttttttttttgataaacttttttagggtcggggaaaaatgtgaattttgtttaaacaattaattttgactttcttttcgatccgggttcgggattcgaattggaacccaaatggatgccataatcggttttccgaccctgttcgactaaatgtgacagcaatttaaaatgtcagagtaggaggagatgtt

SEQ ID NO: 13268 - DNA, 3217 bp, Heterodera glycines
tgcgagaaagccgcaattgattgggggcagaatgccaagtgtcccgcttttagggttttacaatttcgaaaattttgtgaagccaagaggaagcggattgtggaaaaaatggaataaaggagcacatgggagaacctcaaagggagcgcccgtagttcagtcgtgttagagcattcatgtggaaaggccgtgggttcgagtcccaccggggggttaaccttttatgttctaaaatttatcttggcacccattcagacttggaaactctgttaaacccatatatttttaagggcattgagggcccgcgtggtgcctccggcaatgtcggcccggctggcccgcccggcttgcccggccccatgggggcggccggataccaaggcacgccgggaaacgagggcgaggaggggcgcgagggcgcccagggacggacggggcccgatgccgcatactggtaagcctattttggctggcacatggcttttcgtgccatcttttgggtcaaattcgaatttgcagcccctgcccaaaccggtacggccacggcggtggtggtggcggcggcgttcatggtcgctcaggtaaaacgcccgaagaatccgatgaaaaattatcccgccgatcagagatcagcatgggttaggatattatctcatcagatcaagttgactagaacacagcttaaacgcggattagcgtcgttcttttatggtttgatcagttgttatcccgatcatttgggaagttaataatgccctgatcagatgcccacacttaaatgattaaatgtgggctgcgattattttctgggttatcagttgaaaaatcaattgggcattatcagatgttttggaaagtgtcccgagaatcggctaattcgcattttaattgttttaattttaattcgtttttaaagctggcggcaacgctggcgatcgcttccaccaaaggcgccgaaagtgacgttgaatttcacttcgacggtggaagaaggcgaagaaaataacggagagacggggaatgtgacgacgaaaatgacgacattagcaaatgatcaaacgaaacgaaaagtcggaccgaaaaagttgtgattaaaagagaaaaataaacggaggaaggaaaaatcgaaaattatggacgaaaccgaagcaattcgcataaagtgaaggtattggctattataagccaagtcccaaacattaattacattcttcggattgatattttaggcctatgtcggaatgccgatttccgatatttttggctcggaattccgatttcctattgcgaaattttttgatggcgttggcacatctctctggtttaggcctaacgatatttgatgtgccattttgtttttttaaaaagaaaagtctgacatttttgtagcctctgacgaggtctcctttccctcagaggtccataccaacgccaaaaccaaaaaagcagcaaaatttgcaacaaaaaagattaaatatttttcatgtttttaattcagttgcaacttctttttttggctcattatgctgaatttactcaatttattctcctttttgtggttgtattttgctctttttcggcttagttcaaagggatgattaaataaattagccaaatgtgggcttaattagctcaaaggtgctgcggaggaatgcatctgctgctgatgcacatgtgtgactcgcttcaaaagtggaaccaaattagcagaaggaaacgggggacacactttttgggggggggggggggtgggcttatactcccccaattatgatcgaagatggacaactattagccactgatcagatgggaaatgacatgacaaccaccccaattatatggtcaatggctcttaaaagggaattatcagcaaaaattggcaagtaattaaaaaatgtaaaagggaaaacaaagggaaacaatcaaacaaacaaactataacctactaattagtggatgtaagagcggcttatccgccacatcaaaaagaaaagtttcgggcaataaaaaataatttgcaattatttttttcgactttttacataaaaatcggttccattcaaaaaacagagatggaagaggcatttctctgtttgttttttgtcaaaaaaaaggaaaagcaaacgcgaagagccgacaaatgagatgaaatgtctgatcggatcagcaggatcactgatcaaaagttggcgaccttttgctgtgcaatggcgatgttcgtcttccctttggcttattccctcggcttttccctttccatcggttgtcccccttaaaagtttagcagaagcagcagcaggaccttcaaacggttagcagattattaacgcccgataagccccgccccgtgcgccgccgtcgaatgattaagcgactgattaatcgcataaatcaaagcgacgacaaatgccctcgttgttgcggaatccgtgctgctagctgctgatgggaatgacacgaagctgctttgcttcgcctatttaaatgctgtcgccctggggaattaatctcacaatcagtaaacaaatgcatttttttcaattttcattaatttttcattccccctgagggttatcggcttaaataattttttgttttttgggtaaatttttacaatgtccgtccaatacgccacaatcggtgccatagccttttccggcaccactgtgctgctttgcctgctcgcaatactcatggtgcacaatgatctgcaacaaatttggctggaattggacacggaggtgggaaatgggaatttgatcaaaaaatcgaacgaacaccgtataccagacggtatggtattaaattgattacagatggaccagatcaagttggagacggacgacctgtggacggatttgttggcgatgggtgccgggacaccgtcaaatagggaacgccgccaagtaaaaagcagagaaaaagcagcaaatttacaaatttgggtcaattcaaattaaataatcactaccaaaaatgttaattgatctgtttttgctctgagtttgaatacgcaattaatccgatcatttaaccttcacaattgtacgatagatacctaataattaaagatcggatttctaggtactaaaaatactgaaataggtactaaaataggtgaaaaaagtacaaaaaaatggaaaaatccagtgtcattatgcacaaaaatgactcatttaaggcaatttcgcccgcacaatagcaattgtcaagaaaa

SEQ ID NO: 13269 - DNA, 3319 bp, Heterodera glycines
tttcagatgtttaaaataatcataatttttaaaaattcaaaggcacgcgtgccaagtggtcaaacatattcgggtggcgccacacagtcaatatccaatcctagccaaactcatcaaactcgagctggtaaaaataaaatatcaattgtttaaactcacaggttttgggtttgtacttgaattgggaagtatgtacttgaaaaaaggacagcagcatacatgaaacattagaattgtgcttgaatttaaatatatatataaaaaaagtgccaaatgctgaaggtcaaaaaattcggctattttaatgcaaaacaggaaatggtaaattgttgagaaattttttttttttgaaaaaaattaaaattctctttaaatttggcgttttggacggaaaataggtccaagaaaacaagaaagttctttaattcgttatgctgtagaaatcgatggagaaacatggttttctctaaaagctcttaatgttggtacaaattcctatttacttacatttaattcatttttcattatttaaaataagttcctgttttatatccattaatattattttattttttatttttagcaatttataaaatacaaatacatttgttttgtataggatacaattgatatacttccgtgttatttctttatatagaagctatctataaaaattttctgttatataactcagggccaaaatgtttaaaaaaaacttggttttgtgttcttctacccataaattactgaaaattaatgaaatttctgtgcataagacaatcgaaagacataaagaattaaaaatctaattaattttgagcaaagttatgaatatttttctttttgcctaaatattcatttgattccaagccacccatcctcaatttcagggcgaacccatcaaccatcatcttctggacatgcatcgaattcatcagcaaatcggggtataatatataaattgcatcaaatggttgttgcttttgtaaaatgttcaagtttttcaggtcatccgcctccaactcatccaaatgaatatgatcttggtcaataataaaaaaattattattaaaaataattaatttatcataaaaatcaggcaaatattctataatttaataatttgtggtatgtaaatattaaaacaattaaattagcaaagaaatggtagatcagctgctggtcagaatgcttgcttgtctgtcacgttgaaagtcatcggggttcaactccgtgtaaagataacaaaaatttgcaattttttgttactgtcatggtgccaaaatttgattgccctaatttactgagtgcccaaattttaagcgaaaaaaaatattatataaaatttagcattccaaaaaattgcctttgcttttatttttaatttgcctttttttcttaatacattgtgccgtaaataaaatgcattccacggcgccgggcttggcgccggcactgaagacttttgcacgacattaaaattttgaattaatttctttgcaaatttatgattcaatttcttgctctttactgttttgtgttttgttttgttatcttattaaaaatgcacttaatttcaatttcataaatttaagaattgcaatttgcccttggcgcatcgtattatgatgatgatgctcaaatggttccaatgacaacggcaaatgactcacaaattgcggaggatctgcaaaaaaagtggcagctggaagaagatgcagaattagctagacgtttggctgctgaaccataggtagaagacgaatttaactaaatgggttttccctattagtcagcaaaatttcaaaaaaaattttgtcaattttcaaaaaagttgtatgcaaaatgtttgattgcttttaagcaaaattatgccatattttgtcaaaaaattagctgaattggttgggattttacgaaacgacctagcacactaagaaaaaaatgccaaaataatgacaaaataagagaagtcggaaaaaattttccacaatacgcaatcatcagaattagataaatgaagtttatggataaaaatgtgtattttttaaatataattaattagaaaacctaaatttccatattagggtgggatttttaggcacaaaaaatcacaaaataggcattgaataggcatgaaaaccctcgaagattggcttacatttacggagctgagatttgcggcgcccagccaaagcgacacttgcggcgccgacatttgcggcgcagacacttgcggcgatgacacttgcggcgctgacatttacggagctgagatttgcggcgcccagccaaagcgacacttgcggcgccgacatttgcggcgcagacacttgcggcgatgacacttgcggcgctgacatttgcggcgcagacatttgcggcgcccagccaaagcgacacttgcggcgccgacatttgcggcgcagacacttgcttcgatgacacttgcggcgctgacatttgcggcgcagacatttgcggcgcccagccaaagcgacatttgcggcgcagacacttgcggcgatgacacttgcggcgctgacatttacggagctgagatttgcggcgcccagccaaagcgacacttgcggcgccgacatttgcggcgcagacacttgcggcgatgacacttgcggcgctgacatttgcggcgcagacatttgcggcgcccagccaaagcgacacttgcggcgccgacatttgcggcgcagacacttgcttcgatgacacttgcggcgctgacatttgcggcgcagacatttgcggcgcccagccaaagcgacacttgcggcgccgacatttgcggcgcagacacttgcggatgacacttgcggcgcagacacttgcggcgcccagtcaaaatgacatttgcggcgcctccataattaatgctcaaaattaaatctcgaacacccttttgttttcctaatgtcataagaaattattttcaagtgtaataacgaaccacagaatgttcatttttaaaatatttttttcagcctggtctttaagaaatcttttgaattttgccgaattcataaatttttaaggcagggccgcgacgggatattgtaatgaagaagtcaagctatacgctaaagcaagtaaagcggcggttgataagaggcggatttgcctcggaacgcaatggccaagtcaaaagattggatttcgcccaaggcttaacatttcgcccaatttttttttattaaacgaaggaaatacataaaataaaaaaatttatttgttttggggtaatttaattctgcgccgcaaaagtcgtttttactggccgccgcaagtgtcggcgccgcaa

SEQ ID NO: 13270 - DNA, 1536 bp, Heterodera glycines
  unsure (1)..(1536): unsure at all n locations
ttttgatatttttctgagaagttttatatgtgaaaatcgatctataaacctataaattttcaaaaatcctataagttgaaaaagtcttagaaagaacagaaaatataaatttatctcaaatctttgaaaaagaaaaaattatcgcaaatttttcgaaaaaaaaatacttaattttgaaggcttaaaaagcgtagggatgcctaatgattccctgtaacacaggcatgcttctaaaaaatttatgacacttttttttcaaaaaacgcaaaatttaacgaatttacgaagcgtccgtccgtatttaactctatttttttcctagaaacctttctctattaaagtattaacctgtctcattattgtaagttattttacactttataaagaaagctttatttttcgaaatttcatttttttcaaatttataattaaaaaaatgtaataaagtcaattaatctaaaaaaacgaaatcgaatttaaaatttatatgtaatttttatttttgattttatttggtggaatattttttgaaaaaattatcataaatttataatttttatacataaacaataaaaaatgtagtgttcctattcgtaattaatgaaatttgtaaaaaaaccgaaaacgagtgacttagcttaaactttttcaaattaattgatcttggtattggaagttagctttacgtatcctctactatattaaaatttttaaaaaatcttgcaaaattcacaaatccgaaaaatttagactcactaattttgtcgctaacttttttgaaactcaataaatttttttgaaatttaacagaataatagagaaaatatttttctttctttgttatggcttaattgaagtttgaacaattttcatgcatttaaaacaaccttactttttttgtatgaccataaaaactttgttggttaggacttttttgtaaaaaaatttttaggtttttaaaaattaaaattaccaagtttaaataattagattatatttgagctaattatgatttatttttagcaattaagattaaaacaataattaaatttaaatattatgatcattgacactttttcacttcgtcacatncaccatttcggcgctagttacaaagagtaaccttttgaaattttttttcacctatttaatgcccaattattttatttgcatatttaattaatgttataatagtatttaaaacattcactacatcgttattattaaatcaataattataaacttatcattagatatttattctgtattggacttaaaacaattacctgcatttcatgccataaccaagtcatgaaaaaatagatatttgataaaaaatcacatccctatttcttatatatttccgcacaattgatttgacaataactacaatttatatttattttttagatcattcgttaaaattgggagttttgaccaaatattagcagattttcattaaaaaattattaattatgtcatctttttgacaaattgggtcttttctgtttaatataaaaaatttaccagaatttt

SEQ ID NO: 13271 - DNA, 2560 bp, Heterodera glycines
ctttttgttccgttttcaagtcaattaattgtcaatggcttcatcttggcctttattaacagaattaattaactaatttcaattattttattcgaaatattaaatttaattaattttgtttttcaaaattttcgttaagtcaatcggtctcggtcaaataaaatgtgtttcgaatatataagaacacccgaattttcttgagcttattctaactgaaattttattatatgcatgttaatttttggaaaatatttaaattcagcaaatgtgtggctaaatcacaaaaattaaccatttttaaaaaatgcttttatattatagctagggtggggatttttagttttttaactattttttctgcggctttatttcgacgagaaatgcaagaaaaacataattttagctcggaaattcttcgttttaacgccactattcatcactaggaatcactattttggagctttgccattaaaaaaaaattattttggatgttggccactaaaatagttttttgccactattttggcgtttctccactattttggtattttttagaaaatttcccaaaaaatggaataaaaaacctaaaaagtaactggaatcagtgaataaaattgtttgcttaagtttaaaattatttgcaaattaaaaaacagctatttaaaaaattacatccctaaaattacttaagaaaaactatttttaaccactaaaaatcctatgcattaccagaagcactgattttgtgcgatttgtttggtggttttaaatgacatttgcacaaacgctggtcagatccgaagccaagttgagcagctttatccatgcaaaacttggaaacatttgaaaagctcgaagtacagccccactcttggacaaatttgtttggctgattacctttagacaaaaaaagggatttggaccgaattctgaatgaaacaaattattaattggcagattaactgtcatcgcatttgattgcatagcataaatcagcgtctgaagaacattggccaactgaggttttgttgcccagagtttcatgaccaattttgcatttgtttgcaatgcctgaggacatttaaaaaaattaaattatgttaaaaaatgaaagcaaatttaaattaaaaaatgaaagacttggagttggaagcacaaggccattgtttgagccgcttacaacagcggaaacgcacaaggaattgtccgggattgggccgatgtaagcctgggccaatgctcgtcccgtgccatgaatgaggtcatcagtgtcataattggcatcagtgcagccccactcagtgatcagttcaatttggttgttattgttcactgaaaattgttggtttcaaataaaaaaagtacagttccttatttgataatcaattaaaatctttttctttttttgcaaaaaaataaatctaaagcattgttaattgattacttgtagaacaattaagcatataacaatagcgctgaaattgactgcatgaactgtcggagctttcataataagtgagcaacttggaaaggtacgctttcttgcacaattggactgcaaatgaattcggaaattattttacatttaaatcaaaaataataatattaattttttgattaattttttttaatggcacaaaacagaaaaataaataatattaatttacccggaattgggaccgtaatatgtgcatttgacattggcacgtccattttcccaaaattgtgatagcattgtttgttgatgatttgtttggcttccttttcgtcgacaaattgttcgggattgtccatgcgaaattcattgagttttttctccgtacatccccattttgtcaaaaatttgaactccaatgattgcttactccctaaatattatttagaaacctattttggcattttgaaaatttattttcgggattttacaggattaagaaacgtattttggcattttgcaaatttattttcgggattttacaggattaagacacctattttggcattttgaaaatttattttcgggattttacaggattaagaaacgtattttggcattttgcaaatttattttcgggattttacaggattaagacacctattttggcattttgcaaatttattttcgggattttacaggattaagacatggcattttcgttggagaaaaggcaaaaaaaatttataaaaaatttgaattttttaaacattttgccaaatttttattaaataaagtaatgttaaacaaaaatgcccataaaaacgatcatccttggcataatatgttaacaaattaacccaaattttttttttaaaattttcttttcgttgaaattaaaaaattcaattttctttgacgaaatcatgaaaatttaatatctttcaaaatatttttgaccaaatatcgaagaataacaaaaattatcggaaattcaaaaatttttgttgttaaaacccgttcgaaaatagagctgaattttaaaattcacctggcgctgccttccggcattgcctggcccaaaaatttgtaaatcttattaaaaaaaccgaaaattttcaaaat

SEQ ID NO: 13272 - DNA, 993 bp, Heterodera glycines
  unsure (1)..(993): unsure at all n locations
attttacgggattttacaggattaagaaacctattttgtctttttgcactttttattagtacatgcaccaaaaatgaaatttatcagaatttttgtcgtacatccccactttgtaaaaaatttgaactccagtgatttctcacttcataggtattacaataaatttttttgaaatttagttgattgttttcttgagggcgaaattgtctgattttcgctggggtgttcagatttccgattttgtgccaatgtccgggacgcattgccaacaaagaaacagaaaataattgctggaaaattataattttttgacaatttgttttaacctaggtgaaaaaagaattttcgagtcacgtgtagtcctaagttgggccccgacccctccccaaccccgaactccaacttttttggccatttttcgggttaatcccgaccccgacgcttccgaccccgacaaaccccgaccccgattttaactcaaacttggggccgggttaaatatacactcctaagaatggcattttcgttggagaaaaggcaaaaaaaatttataaaaaatttgaattttttaaacattttgccaaatttttattaaataaagtaatgttaaacaaaaatgcccataaaaacgatcatccttggcataatatgttaacaaattaacccaatttttttaattttaattttcttttcgttgaaattaaaaaattcaattttctttgacgaaatcatgaaaatttaatatctttcaaaatatttttgaccaaatatcgaagaataacaaaaattatcggaaattcaaaaatttttgttgttaaaacccgttcgaaaatagagctgaattttaaaattcacctgccgctgccttccggcattgcttggcccaaaaatttgtaaatcttattaaaaaacccaaattttcaaaattttttccggcagcgccttttttggcactgccggtcccganattattttgttatacagccagtttat

SEQ ID NO: 13273 - DNA, 2663 bp, Heterodera glycines
  unsure (1)..(2663): unsure at all n locations
atcatctagcgtttcagcatcttcatctgaaaccctcgttcgttttttattcattgcttccaagtttagcagggttccttgtatattttttaactgtatttcaatatttcttgtttgtgtttctttttgcaaagatgcagaacaggaatgttcaaaatcattttcagtgtcaaaaaattcgccctcctccataaatgaatcactatcatttccatcactttcaattacacctaggttttcgaaccctacatgtttgatctttttttttgacaaatttcaatttcggggccttaaataaagtcattgcaaggcttacaaatgtattaacctgtgcaaatgttggcttccttaggtgtgggtgctgccatttttggaatagtctctgaataaatcggcgtcttggctttgtgatataacaaaaaaatttctttttccatgctttattcgtaaattcacaggaacatatgacttccgcattgttttcgttaattgatttaagaattaaaagcccatattcattcagatcgggtattgtatttccgcatccacgatgcgtcagctcaataaatgcgctcgaatcgtttttcgtgatattgttattaatttcattcaaaattacacggcatgtggacaaaattttaaataacgtaaaaaggaataatataaatattagtcattttgattatttttttatttttttatcagcttatattagaataagcgatatgtttgaatgagttggcaaacatccttgtttcgttggcaaactcaacgtataggaggatgtttgccaacctggcattattagatttattcgtttttcattattttatttatttagaaatgtttcaaaacattagaaaattttgtaataagtgctgctttaataatacggccgttgccgtctctgttgtgccacccgtcgaaaccctattccccaattcaacactttataaacggagaattttatgcgcatgcgaaaaaaggaaaacttttctgtgatgagcaaaaaaaaggtcgtcaaaattttttgaccccccccccatcgtaaaaaaattggccctggcgcaccccccgtgcgccgatcgtacatcgtaaggggtcgggcctggcgcaccccttgatcatgtatgatccaactttgtttagtattttgcccaatttgcaaggcgcggaacaaacatttaatattttgtggaaacaaagatggccgaacaaattatcgaatgctttaaggccaaaaatgggcggcgaatgaccgttctgggtgcagtgccggaggcgacagcggctggtggcacggcgggagcggcgcgaaacgcgggcgaccggtcgagaagcgccgggagtggcgtggcaccaccaacggcgaacaacggcccaattcttagggtgaatggcatgcacccgtcgattttcaggtgggcgaactgtgagacaatcgtagtctaacgctaagcgcacctgaattttttaatgaaaaataacgggattttcctataaatgggacatgggggagtgaaaacaggacgcactcgaattcgttcaaatatacaaaatttctttcttgacatgaaaacaaaaaaaaaaggggtgaccaaccttactattgccggtatgccgcccgtaaaatggcaatttaagaatttgttggccttgttttatacagactaaacgaaaaactgctatttttttggcaaatttgggttctattctggatccattccaatgttatcattaaaaacgaccataaaccgattaaatatgttttggattttccaggccgaccatcaacgaggtggccacgcgtcacattgccagcaatttggccgtctttctgcaacatgttaacgcgaagaacagccgggcctgatcgcgattgtatgacaatcaaggataattaaggctgagccctccctccctttcactcactcccccatttataaaaattctctacgaatttgttgttgtttgattatgttgtgtccttcccttcctcaatttgtccccattcatctgatcaattgaattttgtttgtcaatgaacgatggtggtgaatgtgcttcttttttgcccatttgtcgtgttaattatgaccacaagatctgttcctgctggctttattctatcatgtttctccctccctctttcatgttcccttttgtttattggataaattgaatttcctcctcattatgattgtctgtcataaacccatttaggtattaaaaacaatgagttatggttgctaaaaatcttaaaaattgttgtattcattctctaattcaaaaggcaatttggtaaacacttttgtgctttttctgacagacctaatatactaaaattggaacgatacagaggaaatcggggctttagttcaaacaaatagtttgctttaattttaaattgtttttattcaaaaaacagcaaaataaattcaccactaaattttttaaacttttcgcccttattttcgctaattttcgcccttatttaagtccttatacaaagtggactttttcaagtccacccctactcattacgaaggcccttcccttggtcagcaaacatcaataaattnctgtntgttttcttttgcctgttctctccctggncgtctttctttcattttttctctgtctgctgctgcttaatgaatgaa

SEQ ID NO: 13274 - DNA, 1460 bp, Heterodera glycines
tctattatttttgcaaaagaaacataaaacaattgcaaactgataagggggcctgtggttttttcatcgggtccataaaactgcgaatgtcctaaaattgttctggaacattcggctttatcaaaaaagccaagatctgctagccggtgaaaaaagctaaattaactcaatcatttcatgaatcacaaagtgattttccattcttctagactcaagccaatttcttactcattttcattctaatggctttcccttacgtcgtcaatttgtgtgccaacgaagtatgttcaaatctaattttaactaaatcaggcaatttaaatatcacatcataacctttgacccaaatttatttcagaagcctaattggtcctttttattaacacttggcccaaaactaatgaaattcatcaaaattaacaccaaacttccccctgaactgaacaacgaactgctccattttgttcccgagttttactatcgaagggttttaatcagctctaattttttagtttattacttttttaataacggaaaacgaggcaaacgattgaaatgcaaagtatgccaaaatcgaaagttaacaaaaaatcagttattgttaaatctaattttctatccaatttaatttaaatgttatgctttttaaggatgtagcagagagagaggccgggacgacttacacatttggcgcaggcacacccattcgctcttttctgccactggatgaacgtcatcgcgttgcaaactttttggcaactatgaatatctaccagttttttcatcctgcggaaggcggcggacattacgctctcgtttcattgcgaatgagcggaccggacgaggtgaaacaccattattttgatactttcagcttttttttggacgagaaaaatgaaaggaaatttggaaatagcacaaataatttgctttccaaaaaatatgaaattattaaattgatttctaatccctaactcaaacgcgaataaaaagtcgtaacgaaaaacttgaattttcgactttttccgagtttgggtacgcgactgatcaaagttagtgtcgcatccatgatcagcaactacgaaaaccccctataaaagaaaagttccatctggtttctgttcttccatgaccaaaatttgcctaaaatccatttttataattttaaacacagcgacagcagataagaagctactttcaacgagagggcattgcaatgaatttcgacaaccgtttttgcaccagtggaattcgtctgtttctgatgaacaatttggtaattatacaatatacataaaaagggaaagaagacgagctaaaggttttacatccagtggcaacccccctggctgctaacggagaatagaaagaggaaaactagaaaaaaattatgctcgcatattgaagagtacaacaaataaagttcatccttaatttaaaatttatttaaagagagtggg

SEQ ID NO: 13275 - DNA, 1159 bp, Heterodera glycines
  unsure (1)..(1159): unsure at all n locations
ttccaagtttgacgtcccaattcaccgaacatcgaaagaaggaaaaaataatttttttgcatttttatttgggacaatagggcaataattgaacgaatcaataaaagtgcaccaataaataggttgaattataattaaaaatcgtcatttttttttaccaaaatatgttaacaaagaaatagaagaaaaagcaacaacgaaatgtggtgaaaattacatgagaataacggattgtttagcgaattcgcacactttgcgctttgtcattgtccctccctttgtctttcctttttcagctggcgaccgccgacggctgtttccgattgcgaggagagcccaatttgggggatttcttttctgaaatttacgaacatccgaatattttttgaattttcccagttcattttacccaaatgattccgcggaatccattcaaagtcgacgtcgtttttgttggtgcccatttcatacgctttggtcttcgtttggtacgattgggcggaacttttgccggtgcctttggtcagctgagaaattaaaaaatatattaattgaaaaatgctattcgaacttttgagaaaaaatgctgggcaataagcaaaagcacaacgataaatccgagcagaacgatgtacatgaaatagctaaatgaaaatgcgaaaaatgcagttaaattgcatattattgaaaatagatttttttaaaagaataaaatactttttttattatgttaaaaatgctgtcttttaaaaattatatcaggagaacccgataaaatatcatttctatcttggtaaaaacatgaagaaacgtacgtttccgtgttgaagccactttcgtcttcttggattgtaacggtttcattgaaaacggcactcacaaaataattgccatcctaaattgaaggaaggtaaaaaagcatgcatttttaaccaactgaataatcatttatcccattttggccaagaaagatcgacccaccgtgtccacatagtgcaaattgacgaccaaaccgaggggacggccaacgaatgcgtcggagggaataaaggcgtaatcgaatgacgcctcctctttaggctgaatctttcgttcataacgtacggcggagaactgaaattgttttcatttactcngtctcttcattttcgatgactac

SEQ ID NO: 13276 - DNA, 1384 bp, Heterodera glycines
  unsure (1)..(1384): unsure at all n locations
aaaaaatttttgcttaagacaatcttaaaaacaagcacatttacanagttataatttgtgttttttnttattttttttgtntaaattaaaggttttttacaatgtcaaatctcgacaacccgcgcattttctaccaagaccgtgtgttcagcaatgatgcagcggacaatgtgttggatggagcacgtgaaatggtcgctgagtataagcgactcgatgaaatttaccaacgctttattcgcgagtttagcatcggtggattaaacttcaaatatcggtccatttagtttgtctttgcatttgaatgcctaaatattcgcttacagtgaagaattgaagctcaattacactctgggcaattattcgctgattgtcgactttaatgacctcgcaactttcgacgaagatgccgcgggcaaaatcaaacgctacccaaccacatttttaccagcggtttttacccatcagaaaattgaaaagataacggttcaattacagctcgagtctgccgtgaaaagagtcgtcgacgacattacacacccgcgtccgcctggagaggaggaaatccacgacatccaagtcattgtgaacctcagcgacaaagcactcggaattcgcaaaattaaggtactctctcatcatcctttattcgttttattacaatgccatgttcagtcctcagatgtctctcaactcgtcaaagtttcgggcattgttgtggctgcgtctcaagcgcgttcccgagccaccaaagtcacgttgcaatgccggacctgccgacatacaattgtggaccgcgaaattcgtgccggtctcgagggctttcaattgccacggcaatgtcaatcagcgtaaaaactgaccaaaaaaaattacttacacgtcttcgacttgcattcttagcaatcagcaggctgccgtgggtggccaacgatgtccgctcgatccgtacatggtgttgccagacaaatgccgctgcatcgatttccaaactctgaagcttcaggaattgcctgaggacgtgccgcacagcgaaatgccacggcacatgcaaatttatgtggataggtaaatttggaaattgtgcagttttacggctttgattataaaacgcattttgcagatatttaacggacaaagtttctcccggcaatcgcatcacagtcactggcatttactcaatcaaaagagttactggagggaaaaaggtcaattgtgtgtcattacgatttgtcgttattcaattcttaaatgtttagggcggtaaagaagacggaaaggcgggcatgtccggcattcgaactccgtacattcgagcggttggcatccaaagtgcaatgactgggcttggtcgtgccgaccaaatgcactttgcacctgagga

SEQ ID NO: 13277 - DNA, 2416 bp, Heterodera glycines
gcagtgcgcgggggctaaccgcggctatcattcgggacccgcactcgggcaagtgccatcgggacgggctgacggaaggaggatttgtttagcgctctttcataatggaaggtggcgcaatggttttggcggacggcggagtcgtgtgcattgacgaattgacaacaatgagagaggacgaccgagttgccatccatgaggcgatggagcagcagacaatttccattgccaaggtgcggtcggactgtccccccccctggtcaaatgatggctaattttttgagttttcgcccattaggcaggaattacgaccacgctgaactcgcgctgttcagtccttgcggccgctaattccgtttttgggcgttgggacgacagccgaggggacgaaaacatcgattttatgttcgaattcccttcggtgaaatgacagtcaaaatactgcttttaggccaactattctgtcgcggtttgattgtatttttgtggtcaaagaccaacacgatcgggccaaggattcggtgcgttgtcatacttttttcattttttgttcatttccgtttagcaattggccagacacgttgtttctgtgcatgtccgtgccatggacccccaggcgcaagtcctcacttctgaaaacgacgcaaccgcttcccaaacgcccctttcgcagccaatcgcagctaatggggtgaagaacttacaaacacaacctaagctaatgttgtgaaaaaggaactttcattggacttcctaaaacgtttcatcgcttacgctcgcgccaattgcgcgccgcgcatttccgagtcggcgagtcagaagctgatcaatcagtacgtgcaaatgcgaaacataccgaaggatcaccagcagaaacagcaaatgcgatccaaaagtaaggagaccgaccgactttctaattacaatgcatttagttttatgggtgatcaatttttccgtaatttttttgcagagcatccgcaatcggccattccgatcactgtgcgtcaactcgaggcggtggtccgcctcagcgaggcgcttgccaaaatggaattggctccgtttgcggaagaacgccacgtggacgaagcactccgactgttcaaagtgtcgaccattgctgcggcgcagagcggcaatctgtcgggtacggaagcacaacaaaatattcttgcaataataaatattcaacaatttcctcaaccttttttcattttccaacactgaccggaataaggaatatttctaattttgtatttatgaggcctttttccgtaggagtcgaagggtttacttctgccgaggaccaggaatcattcacccgagtggagaagcagctgaagaagcgcttccaagtgggcacttacgcatcggaacagctgatcattgaggaatttgctcgccagggataccccgagggattggtcagaaaggtgttttgttcgcaccaaatgagaagaaacggattaattattcgtttttaggctatcgatttttatgtgagaaggggcgatttgcaataccggatgcaacgcaaattgctctaccgatttaaataaacatgttattgcgacttacaaccttgaaattttattcgatttatttaacttttctcttgataaatttgaaaacttttttcattcaccatgactgttttttgaattgaaacaaaaattaaaaaatcgaatgtggcagtcgattttacatttgacttggtgatcaagtcctcgacttgattaattgcaacaaaaaaataggacttgatgccaaaatcaagtgcgacactcgattttttcgatttaattgaaacaggatttttgcagtccatttcgcaaaaatcaagtcgaggacctggtccgaattgaaataggtccctggatatgagccctttaatatatttgtcaagataaattcaagatttatattaatacatttataatttatgagaaagtttcggaaaattgaagtggtccaaatgagtgttaaaatggggggtggtgcgtcgtgcacaaattgatgctgtgtaaacccattgaaattgtgatcaattttacaagattaatcttcttcatcgctaaggatttcgccctcgctcaattccgcctcgtccaccactctttttggtcgcttttgcggtggcggctgctgcgcttcaccagctgaaaattgtgcgattaatcgactcagggcaaatttcggtcgtttacttgacgacttcctctggacagaaggcgcggtcgttgccttcggagttggcgaagccgcatttgtcgacatgcccttttgatgagatgctctctgataggacggcggcgccctggacaaaatgtcaaacagaataaaacgaaaaaaataatcaaataaaaaatcaactaatatgatcaattggagacttccattcatacattaaaaa

SEQ ID NO: 13278 - DNA, 2546 bp, Heterodera glycines
agctcatcaagcttcggaaaattaggaaaattttcgctcttgttcgcaaatttggaaagagctaaagtgatgacggagtaaggatggatattcaaaaatttaattaaattggtaaaattattattaatttgcgaacatttctcttaccgcggtacacacatctggcactggtccgcatttcatggtcattttctttcgccataatggcgtcgttcaattcgtaaatgttcgaacggcacttggtaatctgaaaacagaaaatttcaataaaaacggatttaaatttatttatttcacagcactgtgtttttcatcagaattaagcaatcgccgatattttccagcaaaaattggtcaaaaacaattgatactcggcaatttgtccatttcaaattaaatgggataaagcagaccaattccaagatgagctcattgggaagtaatctttttggcattttcgaaagcggagagagagcccagaaagaatttgaatggcaaaatcattttaagagaattatatatacagacgaaagccttatcttcataagatttgaccatgggggtggagagacaaaatttaagaggatcaacaaaatgtggggcggcccttttgggcggcaaaatcaaagagaatcagaaaacggcattttagataattgtggcagcgaaagaaggaggcaattaagacaccaaatttcatatattaaaatgcaaatttatcatttgcattgcgctactcaccatttgctgtttggacggcattgtctgctggtggcagtgacaaacggcgagcaggttaatagattagagtaataaggtaaaataaaataatataaaataatataaaaatgccttttgttgggcagggagggaccaaataaaaatgtcaatctctgcctgagaaaagttttggggtttcaagcctcggactcgtgcaaatatgccactttttacatcccctaaagaaaaacttcggcactctcttttaaaacggcccctaagcatcacaatgcccaaaatttcataaaaaattaaataatttaacacaatttgcaaactgtataaaacaaggttcgaaactgtgcttgtttcaatgaattatgcttaggtatttttgaaatttaatatgtgcaaaaaaggtaattttgagaagcaaaaaaacgggccatcgaattaatctttgtaaaattttattttaaatttttaatcttatttatagttatttaaaaaaattacgaacatttgtgtaaaatagcagaaaatccttaaatttctcacaagaaaaatcatataaattagaaaaggacaaaaaagaaagaaattagaaattcattctaagaaatttaatttttaaaaaattcattttgaatgaatgcatattacatatttagtccgccttaatcattgccagtacaaagaaggggggacacgggtaaatatgtaataacattaattaactgattggcttaaattgattccgagttgaaaaagcataagtacgggaaattccaccgactcttgaaaaagccgggtatccgatctgaattcggtcgggaacccggaggacctaatcgggacgaaagccaccaattctcatgcatttttcatttaattccaagccctaaaaaactaaatcgtgttaaataaattcattaaacaaattagtaatacgattagtaccttccccaattaacaaaaggaaaaacaaatttaagtaaagagcttaagagttttccactctgtatttagtataggcaagatgggatcagcaacacggcaaaaagtaaaaataacattaagccgctattttcatagttcttttaagaaaaatatttgaaaaatattatgggttacaaaattagatagagatgcgatacaaaatgttactactttttcgttctttttttattactctttttcttttccattacctaatgctctctccctttttcccattgcctctccctcccccaatcaccaaaaaaatgtcttttttttttgtacaatacttcgaacgctcttttgcagctatattctgtgtcgagaaaaattggtaaaacgtttttagaattttcatattttttaattgaataataagtataaatttatttatttttttgccctgacttggtcactttgattgtgcctttgtcaacttttgtcatttttgcatatctcctgtaatgatacttatctacatatacagtttgtcaacatttttttaatacatttcattagttcatttttacgatgtcatattttttgtgttttggcaacgtatgaaattcattgaaaaaggccaattttggcgaataatttgctacaaaatgcaaaagatcccatgtctctacgactactgtacgctgacaatttacctgttcagcaaaaaagtactgtataattcttaagaaaacagtgcattttacagttatttttgtgacttcgaaatttcatattgtctccggaatcccagcgtacagaagtcgttgggacatgcggttttttgcttttttgtagcattcagatcaccctgaagcagggctgca

SEQ ID NO: 13279 - DNA, 1651 bp, Heterodera glycines
gagcctactctacttgtgcatcttttcccaatatggcactgcttccgaattattgaactgtttcacgactgattgttgagataatttttttttccgattcctttatctccaagcatgagccttataagtgattgttcatatccttctcttgaaaaaaattgtcagtaaaaaaaacacgttttctgaatattaacaacaaaaatttttagacactttctaaagaggaaggaaaaaaatttttcatttgcctaatatttatttatactgttgaactgttggaaatgcagctgatgccgtcggaaaagctccgattttttggggaagtttttttctttcagtttcaccactgattgttgaggcaatttttttcgccaatttcttttgtctacaaacattatttattgcgtttcatcctgtagtgtgtaaaaaattttcagtaaaaaaaacttgttatctgaatatttacaagcaaaatttaagaccatttccaaagaggaaggaacaaaaatttttgcctaaattttatattatcccccccccccctcccccgcccaaaatgaaaaattaaaaatttttacaggaaaaattgggacttttaaattttttttgtcgatttttcttaataaaatcattaaaatttaaaaaaaaaatttgcccggcggcacctatcggcaccgccggaccacgatttactcgattttacggtgctaggacgaagtgacaaaaatatcagtgtggcgaagtgacaaaaatatcagtgagagactttcagaggggtggggtcatttcagtacgaagaaattaatttaattaattaataatattatagttcatttaaaaacttgaaataattcatgcttgcacaacttttggtgctgatcaaaaaagtctcttacatcaacttgatcagatcactcctttgtagtgaacggggacacctaaaatacactgaaaatcggggaaattttcaaaatccctagggggttgggaaattttttctagagaaaatgggcaagcccactggcaagagcacaaaatttgctaccgaattgttattggaatagtggttctacgatttgtatatagaaagttatacttggttgaataattgatcaccataaaagatcaatttttgatcaacgccataactttttccagaagcatccaaattaagcatacttggtatcatttgatagcccgaagtgtcttctatttgcctttaaaattttaaaaaatttggttatggttcaaaaaagttgtggcttgtaaatttcataaatgatttggtaaacctttgtgaccacaacttttttgaaactcaacgaaattttttgaaattttacaggaaaatagagaacacttagggctaccaaaagataccaaaatgtataattttgatggttttagaaaaagttatgatgcatgaaatttatcaagaaattaggtggtcgtgtattttttgtggccgtataaactgaaatagagaacaaatatatttattattattagcttattattcaattttaaattatgttattaattaattaaattaatttattcgtactgaaatgaccccacccctctgaaagtctctcactgatatttttgtcacttcgccacactgatatttttgtcacttcgtcctagcacc

SEQ ID NO: 13280 - DNA, 3258 bp, Heterodera glycines
acagaattttgtgttcacagaaagggtaaatttttgagttgatgccggggcagagaatggttcacaaaaaggcaacatttgaacaaaaagatgctccagtgcgatccatttcgaataggcgaatggccatggttactccgacattccctgaatgaaaatttggcgcacaactcaaatatttcttctttaaaatgcatgcaaaatcaaatggataaagagcaattaaattagcaatacattcgatatataaaatgacaactatatcattgaaaactttgcgaaatgacatgtgagataaatgcgctaactgggcccttatttaactacccattcaggcatatataataatattacttaatttcgtaaaaatttacatttagtacgagtccatcaatgtaataactgattcgaaagctattcacatatgtatatgattttgtaaatccgacaaattttcttaaaattttgaaaaaaaatcaagtacttgataaaagtcataaacaaaatcaatgattttgcaaaatctgagctaagattcgtgatcagcgtattttttaaccctagaaaaaatgtaaaaaaaaaattgaaatttaactattttttttacatattttgactgaaaattgtccattttaaaaatgccttatgcgtttttaattaattctatgcaaaaatatttaatgttaaaaagaaataaaaaagcatataaaatattattatgaataataaaaaaaataaactaaaataatataaaattttttgactatatgggataaggcaaaaattgaaaaaccctgaccccgaacgatttgtcaaccccgaattttccaaccccgacgtcgtaatttcaattaaattttttgaaatttaacagaaaacagcatatttttatggtcatccaaaaatgtaagatcgttcaaatgcattaaaattaattcacaatgcccttgataagaagatatcccaaagaattttctgttattctgttaaatttctttcaaaaaattttatcgagctttaaaaaaagttagcacaaaaatatgagtctaattttttcagaatttttgggtaaaagattttgtaaattttgctacatttataaaaaattaaataagaccgtaaataagggcgaaaaaatcgcgaaataaggtccaaaaagttccaaatttaggggtatattttttaaattgcttttttaatgaaaataatttaaattaaagtaataattttattcttacagttgcaaacaattcgccaaaaaatgtaaagaatatttttttcactgtatttttaaaaagaattttgaatttcacattaaaaattaaaaaatcgcgaaataagggcgaaatgcctaaatatggacaaaaacttattttaagggcgaacatctaaaataaggatttctaaggtcataagggcgttaaaacgcaaaattttcgaacaaaaaatgtgtttttcgtgcatttctcgtcgagttaagccgcagaaaaaataaggataaacttaaaaatccgttccctaatctggacagatattcaacattatatcaaaaaaatgattattccaatttttgcaagaggtaactgaatttaacttaccttattctcctccttaatttgaaagacacgagccgtcaaatatttggttgaatatagttgtcgttcacaatcgtaacaaaacatatttttgtttttgccaaaaaattctttattttcgtccaataatatttgccaaagcgataaattcaattcccgacgagtctcgttgctttcgctaaaaatggtatttttggtatatatttcatttttttatattttagatttagaaatttaaaaattcttgaaaaatgaaggactgactatccgtcagtaatggacaattcgtcaatcttttctcgacaactcagaaatttacagtatttttcaaaaccctatgtagttggaggaggcagtgcctacaggcaccgccagaagaaaatccatttttggtccagctgtgccgataggcgtccgctggagaggtttttgaaaaactaggcttaatttttaaacgtttttcttccaagggttaaaatataggttaaaaaaggagaagaaaacgacaattttgtaatctttgccaacaagattttgtattaaaaacatccctttttgggttatttaaattaaaaaaaaagtaaattgtgtgggttcatatattaaaatatgcttgaaatgaaagccgagaaatttgcaaataattaattaaattaaaaaatttgtaacctacataacaaatcaataaaattaaaagaaaaataaaatatatttaattactacatgggaaatgaaccatgggaaagccaaagaaatcgagatgactcatccataagcaattttaagattaaaatttagataaaataattattcatttaaaaaagcatgaattacaattttattatttaaatttatctcaatttaagtttatttaatgctcactcgttgtgtggccctcgagataattctatgtccacttttgtattcaaatatctggcactaaaacgaagttcatactgatacaccttgttaggtgctttttccaaattgatttcaaaggcatttgttatcactttcactgaatcgctgatggtaggaaaacttccattgttgctgattttgtctgttaaaatgggttaattattaattaatacgttctttttgcgttagtagtttttttggtgatattctgttgttattgttatccttacaagacctaacttagtcaaatttctaaaaatttcgctaaatttttctaaaatcacaataggaattttttagtgaagcttttataaatggtaaaaatttcataaaattactagagaaaaagtaacaacaatgaatctcctgactcagaatgtgttggatgtagagttgcacgggaccggcaattttgacaaaaaccgggaccgggacttgccgttaccagaaaagtcgggaccgggaccaagtttttcaaccgggaggaccgggacttttccaagagaacattttttgaaaaagttttgaaaaattacaaaaattttaaactaaattcatagattattaatatttatgattctgtaaggaactttaaaattgagcattttaaacggggatattttgaaattttgacatttcatttactgagtttgcccccaggcgactggtttcttttttttaagcgcactttttaaaagccactttggcgcgagggaggggaatcgggcggtttggcgccgcc

SEQ ID NO: 13281 - DNA, 5248 bp, Heterodera glycines
tttattgtaatttatatttggttatttttgtattgtttgtttataatttttatgtttaataaaaatcccctttagtatttcgatgaaaattgatttagtttggttggtacgcatataaattcatcttatttaaaattgacagcctataattaattggtaattgttttaataaaatttataaataactcttgcaaaataatctttaattgtaatttacaaaaatatttttgttatacctgaatttataattcataattttattagttaactaattgtagattattgtagatattttgcattaataaattgtttttgattttttcctaaatacttatttttttctatgatttgtttatttaaattgaattctatttatgaaaaatatttagtttgataaaagtcattatttagttatttaatttttttcatttctccttcactaatgacttattaaattatacgcaacgatcctgttacattaaaattacaccttctaaaaaagaataagtcagcctatttatttacttattttcttgattctatgaaaggatgaataacatttaatacatatttgtttctttcggatttatttattatatattttttttcttgcctccattcaaattccatattcattaataagattccaataatgtgaactttaagttagaaattacattaatttattttttatcttttatatcttttttagattcgttttacagatactgtttgaatttttgctcaaatataattattctaattcgataactaaaatttttggttaatacttatcactgttgattttatttttaccattttttctaatttaatataattatttcattttaattataattagaagcaaaaatattttattccaacgcaacatgaattcgaactaaatcgcatgtcttaagcacaatagttgtgtaaagaaatattattacataattcataatttttttgtaagaatctaattctgttgttcaatgtatattaagtaactatgtttcttctatatataatatttgtgtccctcatataattacactatactaccatgctttatattattaattcttcttttgtagcttttgaattcaaatctaatacatgtgtgaaaaaatgattctaatttatttctaaattaattattaatttgaattttatttaaaaataattttaaaaatttcatttacattttacatgattaatatttaaaatataaacataaataataccctagcaccaacttgcactcagagccaacttgactttttattatacaaaagaattttaatagaaagttttttgttttaacttgcattaattatttcatcactaattgatgcaatattatgggttgcttacttatgacggtcgaaatatcatttttaaaatgtttagttcattgtctaacatattaattaatgcgcgcttttattgaattttatcacgaaaactcattttgatggttatcattattaaaattatttatttctgaatcattcttctatatttgctttttgtggaaaggttattgaatatttgtgttatattattaatttattaatgcattgcttccaactgaaattttatgatctaaaatttgtccatctataatcaacgaagtcaaactcgcaataataatagataatattttctttaaataaattaaatagtttattttttacaaacattatatttttaatttcattcaaaatataatgataaatctcgtttaatctgagattaaatgccgtaataattattcaaacttaacataaaaaataaataatatttcaaatattacattctatttataaagaaataatcgcacaactgcactggataatgtttgatggaataagcaaaaaaatagttcatttactcattttttacgaaaccaattttgtatttgatctttctttatacttgaaaaactttctatttgaatataacatttataaatcacgggggattagcaggacaaaacatcgtcgaccgaaacgtagtcgaatgaatttttggaccatttcttttttctttctcaaccaaattaaacattcttgctgttattcgaaagaatttgaaaaacgctattaaattgcaaattttcaaaaattttattcatacgggtaaaatttgattgacaatgaacaaagtattggttcaataagtctgcaccgttcacggggtgggggtgagaccaaaaatcctgtcctgcccacgttcccctggacgggggcgggggagatttcgaaccctagtcctaacaactacgaaattattgacaattttcaagaaagaatttattgaacgaagattattatgcttccgtgaaagatgatgctgaggctatttaatatctgagtgtaatctgtttttatcaattattttatttattgcttttgtttgatattttttatgttttaagcttctcattactcaaaaccaaaacacttgcgaaatcaaatgatttcttttgtattcgtatttagttttctttattggagctccagttaactgtttcggtcctccggtttaaatttgtttataagtttaataattaaaaataaatgtttttatatgtataatatagaattatttttaataatttttctgccatcattcatttatttaaattaacttattttcatgtgcggattaaagcattgccaattccgataaattaattacatggtgattaatttcgaagccattattattttagggatttttttcagaaaaagtgttttcttttaaatatcatattcattaaacaatgaattaagttaagatttatatttatatcaatttgtcttataattacttttaagcatttcttttttcttgtcaatttcatttcattagttgttttgtttcaattttcgattttaccatttaataaattttgaatattttaaaacactattttatttttacaatttttatattataaattttatatgcctttttgaattatttataaacatctttttaatttcagtatcgtgaggatggaaattagtttcaatcaaaaaatcaaacgtgtatttagtcacaaaacacataattcgcattgagttcattataatttcttgaacatttttgtgtttataaattatttagtaattattttaatttgtctatgtttttttgattatatttttaaaattaatattttatttaaaaagtttgattagactctttgggcggaaaatgcaatgcatttggaagatattttttaattaacaatatttgattttggtttatttaattcaattttgattttttattaatttttatcttttgattttgaaataattacgatttatttttatcttttttaattagaatttgtaattcgcaattcgtattttgattacaatatcattgtgctcataattgaattctcatttaatgagctgggctaatggtgttattgttattaattattttagtaaagtactaaagtttttccttttaattgtttattaaatatttaatttttttataaaattcactttaaaatgtgttcaaatattaatctattaaattttatttaatcaagtgccaccaatgctaaaagacgtaccattttattatgccgtttaaaattagttgtttattaagatagaaaagagaaattttgaattaatttttcatactatgtcatttaatattattttaaattatattttcaaaataaaattatttaataatttatgaaaaattaatgcacacaaatttttcaagcaaaaaagaaaggtgtttttttttatattgccaagaaaaatttttggtttttatcaattaaatatttttattatcattaatttatatatataatgatacattttgtgtgctactaagcgaaataaattgaaatcaacattgatctgaagagtaccttttgattaactggtccggatgattactattccttttttaaattattattattatttcgttttgtttttgggtttgtaagtattttttataatacattaattaaaccagtgccaaaaattcaaaattattttaaatatataaaatattttcagtcatctcgtttataaatagaaaagggattgggatgaaaattcttcattgtttaatagattattaaatatttaaagaaaactttgaattattaatatttataccaaatcatttcatttatttttgagaatgggatacaatatattaataacatgttgtattgctcatctgaagttatattggttaagccccagaattaaattagtgaataaattttaatttagatagatatttagttatttaaaataaattattataataaatctttattatttaatatttcttagcaaatttaatttattcttttccataatatttaattgtttaagaatttatatttaaattcacagcaaattgttgaagtaatgaaaattggatgtataaggagaattcattcaaaatttacttgcttatttctctctgcgacgctcggtattatgctcatgcatagatttgaatagttttaatatatttagattttaaacaacttcattattttgtcctataatattttttaaaggaatttatattaaatttcatcttttctgttactgaaaacattcacaaatcatcgtgatggattgaccatttatcgaaacgatccctttttgcgttcattttacatttaaattatattgtgttttatttatttttcccactttattcacttcgttttggactcagatttccctcctcttcaattaggttttaattttacttcgcttttcttcaatcaatttccctcgtctcgtctatgtcttttcccaaggcccaaattttcaacaaaactattcctaccaatctcagcccgttcaaaatttttctcatcacagccaaatgaatcaaatcaacaaaatttcccccaaaatcaatatcgacaagcgcctaaaaatcaattttcgaatttttctccatctgctctttcaccccaacttttccaagaagaaccaatggctaggaggaataaagcctccgaatttcaaaatgttcactatttgggcgaaaattattgtgacatggaaaatcggcaaccagttcgagaccgattttcgcaaaattatttccaaaatgattatgatgaagagctttcttatgctaattggaattcagatcgaagccaattttcccaaaaagttttcatcaaacgcaaattcccccaaacaatttcaattcactgaaa

SEQ ID NO: 13282 - DNA, 1439 bp, Heterodera glycines
ctctcaggtgccgaaatgcatttattctttccgaccttttgattttgtttctttcgactcgacagatgtgtgactttcttgaggacaaatacctccgtgagcaggtcgaatcaattgaggaaattgggttagttttccaactttttagttgccatttttgtatttatttttagcaaaatcatcaccaatctcaagcgtgttggaaagggtttgggcgagtttctttttgacaaggaatttgccgagaccgactgaatgaatgtgcattttggacacattcaatgggttgccactgactgaatccaataactttgcagattgtcagtcatttacgaattttattaatctctccaatggcgttcattctcctttttctccgacatttataaacacgtggataaattaatgaatgcgcactttttgacgaacaaaagctttgctaatttgaccgaaatcatttttgcttttgattgcccatttcccatttggtttcattaaaattaaatttaaatggtcgacgtcgaacgtttgaaagttgccttcgaaacggtttttgtttattttcattatgagaattcttgggtttgaaccggttgactttttcagtgtcccccttcgtcggttcgcaatgtttgcattatcgctcacgttgatcatggaaaaacgactttggctgattttttggtgtcgtccaacggagttatttcgggtaactgcaaaatgttgtagtgattttatttatttatggcatgtttgttattttccttttgtctttcatttgcgttttcagctcggttggcgggcaaattgcgttacatggactgtcgggaggacgagcaaatgcgcggaataacaatgaagtccagctccatatcacttttttatgaaccccttctgctgaatttgatcgacaggtttgagaggacggcagatgaggaatcagaagactgcgttatttttcggacttttgttttgttttcacttttggaaccctcatttattattttcagtccaggccatgttgactttgtggccgaagtcagttcggccgtcaatttggccgacattgccatcctcgtcgtggatgcggtcggtttgactaacaatactatgaaaaaccaactcattattgctaatccatggcatctttcgaggtggaaggcgtctgttcccaaaccgagtcgctcatccgccaggcgctgtcctgcaaattggacattttattggtgctgaataaattagaccgactggtggtggagctgaagatgcgcgagcaggaggcccatcgccacttacagcgactgctcgaatctgtgaactcgtgcctttctcaggcgatccacggccaattgctggaggaagactggcacactttcgagcaggtcgagcggacaattaaggagaatcaatttatagcacgtagtttgacagtcattctg

SEQ ID NO: 13283 - DNA, 3651 bp, Heterodera glycines
  unsure (1)..(3651): unsure at all n locations
tggtttcattaaaattaaatttaaatggtcgacgtcccctattgaaagnggccttcgaaacggnncnagcggatgnctcttttgagaattcttgggtttgaaccggttgactttttcagtgtcccccttcgtcggttcgcaatgtttgcattatcgctcacgttgatcatggaaaaacgactttggctgattttttggtgtcgtccaacggagttatttcgggtaactgcaaaatgttgtagtgattttatttatttatggcatgtttgttattttccttttgtctttcatttgcgttttcagctcggttggcgggcaaattgcgttacatggactgtcgggaggacgagcaaatgcgcggaataacaatgaagtccagctccatatcactcctttatgaaccccttctgctgaatttgatcgacaggtttgggagggcggcagatgaggaatcagaagactgcgttatttttcggacttttgttttgttttcacttttggaaccctcatttactattttcagtccaggccatgttgactttgtggccgaagtcagttcggccgtcaatttggccgacattgccatcctcgtagtggatgcggtcggtttgactaacaatactatgaaaaaccaactcattattgctaatccatggcatctttcgaggtggaaggcgtctgttcccaaaccgagtcgctcatccgccaggcgctgtcctgcaaattggacattttattggtgctgaataaattagaccgactggtggtggagctgaagatgcgcgagcaggaggcccatcgccacttacagcgactgctcgaatctgtgaactcgtgcctttctcaggcgatccacggccaattgctggaggaagactggcacactttcgagcaggtcgagcggacaatttaaggagaattcaatttataagcacgtagtttgaccagtcattctgaaggtttcagatggaaagtctgctccatttcgacccttccaaaggcaatgttctgtttgcttcggcattgtacggatacgcttttgcgtcggaagactttgccgacctttggaccaaacgaatctttggacagcaaaaaattggggataaatcgccgaatgaccaccgagaaattgtcaaggcacagcttaacgccaatctcttttcttccgatcacttttttgccacaaattctaaacaaattttaccgggcgcagaacagcgcggaaaaaagccactcttgggttttatattgcttattatttacctttgctatttccacccttttcagagcaatttgtgctggagccgttgtgggaattgcacaggtgcgcattggttgaaggagacatggacaaattgcgacaaatggctgcgaaattgtctcttcctttgctgaaagggaggagagccgaagaggtggcaaagggagggcgggtgggtttaggaaagaatgaccgatgtgagaattgatattaagtatttaaataaaaattttaatttataaaaaaccaaaataacccctaaaagtcgaatttctgaattagcctcccccaaagccaagagtttggctacgcccttaatggagactgtcattgcttggactccgctttgttttcctttactcaattttccatgcctttttttttaaaggcttttaccgaaatgatgcgtcaatggcttccgcttagttcggccgtcgtccgcgcctgcgcccgaatgcgttcggctcagaaggctttccaaacaaacaaccgacttgagcagctgttgcccatcggatgcgaagttggcccggcccgtctttgcttttgccattcattctatgccctttcctcttttcgttctcttcgtcccctgtcatcgatgccttacgcaactgcgaccccatggacgaattgactttggtattttgtgcgaaggctttcaaagtggagaagcaccgattgtctctttgtcgtgtgatgagcgggactctgagaattggtataattaagaatttaagaagtacattttaaccgactttttcaggtgatcagcttaatgtcctccgacattcggcgtcctccgaagatgtttggcattctgtgaaaattggcactctttttcttttgatgggccgtgaactgctccccgtagagtgtgttcctgctgggcggatttgcggcgtcgaagtatccgacgggcgttggataggcggacaaacgctttgctcgagggctctggccgtcactgaagtgccgcggatgagttggcatcaaaagttcgccgaaccactcgtccgcgtgacggtaaggccgacaaatgccggaatggccgaaatggaggaattgcgaagtgcactgcgacaattatccgtgttggactcagcagtgcgcattatcgagcaggaagacggagatttggcgatgcttacggctggcgaagtgcatttgcagaagtgtctggaggtggataagggataaaaagcattttatgtcattttaatcgattgatcgcttcagtgattcattaaggatttgaaattactcggccaaaccgaaattgttgtctcagagccaatcgtcccatttttggagacactaatcccagacattcgtttgcccttctccagaattttaaaagatcatgaaacagtaaacctttcgttgtttttttaatttaattaatttttcccatttgaggaatgttttttgcgacaattttcccttcgcataactctaagggctgttcctctccatgatcaaattgtcgaactaatcaaacaaaacgataaactcattgactcattcgtcgaaggttctgtagtcattttcactggtttaattacattagctttaaggtgcttttgactccaacacacgttccaatttgactacgtttcgttcccaattgtctctttgtgcttccgattgtctttccaaaatgaagggttcctggtgggccaaacgttctgtggctgaaattcaaggacttttttcgcgtattttggccttcggcccatcacgtgccaaaacgaacattctcttcaacggatgttccgaagaacaaaagaatatttcatgttgcgaaggtggccaaacggggaaaacattatatcaaataatgacgaaacgatttaggtaatttgagcccgctggaccaagcagtcattgcgggattccatttggcaatgtcccatggtccgttatgcgatgagcccatgcaaagtgttggcattgtgttagaagggtgggaggaggaggaaagagtggcggagggtacgaatggcattggcactttagaaggggaggaaacggtggagaaatgcgacgatggtacacgtttagaaatagtaaatgttccaacaattcttttttagcagcgaactcattggcaggtgcccaacttcaaggacagcttatttcagccattcgtcagacttgccgcgccgcactcaaaaaacacattggctctcttcgtctgctcgccgctttgtatcggtgcgccgttcaaacgccgacccaatcgcttgggaaagtgcaaacagttttggcacaaaaacgggcaaaggtgggcgacataacatatccaatcacacgatttgatcgtctttcaggtgctcagtgaggagttaaatgagcttaccggtctctttgaagtggtgtcccttttg

SEQ ID NO: 13284 - DNA, 2585 bp, Heterodera glycines
tccatgaaaaaatagccaaaaaaagatcaggccatgattgttgagaacattggtcccgaaattgttttttaattcattttttctagtggtgatctgaggcgctgacattggcctttttgactcctaaagaccgaaaaatttttcgaaaaagacattttttagcaaaattttgtcaaaaaatagacctaaaattaaattttcttaaaaattagttaatttatgtcaaaaacaagcaaaaaatgaaaaatttcgattttttggtcggttttctctagaaattgtctttttttcttttaaaacgaattcttataccgtatttcaccattttagatttattttaactagaatttaatgaataaaatttctagaaattttcaaaaatttttaaaatatttttgaaaatgaaaatatgtaagaaaaaagtttaaatacattaataataagcaatatttattgtttaatagataataaatagtacaggccaatcagggtacatgtacaggttttttcaaaatgccaagctctatttattatagagcaaataaattaaataataattaaatttaaatatttcaattcattgttacttttgacacttcgtcctagcatctatggcaaaatataaacaaggaatcagggatgggccaaatcggaaaataaaatgcgaaacgcgaaattccaaaaaacgcgaaattgcgaaacgcgaaagcgatacaacttttttaatagtcaaaatcataaagcaaaaatcattttttgtaaaattttattccaaatttaaaaaatcaatacaaagcttttttgaggcgcgcttttccaaaaaacattttgggaagagggggcaggcagcgccggcaggcgccgccgggaaaatttttgaaaatttgattaaaatttgttgacagattttcaccaaaaaatcttcaaattttgtgatttttgtatcattttttaatgagaaataagagttttggcgcgccgctgagaacagtttttcatcaaattaccaaattttgcgattttgggccattttctaagaaaaaataggagttttgggggcgcggcggtgccgataggcgccgccgggggaaaaaattggaaattttgatcatttataaacagtttttcactgaaaattagccaatttataggtaaaattttgaaaaattttatgggaatttaatccaattcttaggggtgtaaaagtcgcatttcgcgccaaaaagcgaaatgcgaaaagcgaaatgcgaaacgccaaaaaatgcgaataatgcgaaaggcgaaatgcgaaaagcgaaacctcggcccatccctggcatatatgtatttgaaaaaaaataattaaataataataaatataacagacaaaatcaggcccatagccaaggcaaaattccaaaatgaatcacagaagtctcccaaattaggtagtctttttggcaaaaaattaattaataaatgggctaaaacttttttgttttgtttttgtcttattccacacaatttcgatgataaccaggaatagatttaaggcgaagtgtaaaaaaatttcagatttcacgagtttttctagttatgggcctggagattaaataataaattctcatttttatccccagcttaaaaataaataatttctgatcagatcattatcaaagctgtttttctgtttctggatcgaaccaacaaaagctcgttcagcggtcaatgcgcgcgcctttctcgagcaaatattagagaatctcaactttgttcgttagtattgcggccttcagcgcagtaagcccatcagaagcgacaattgcgatgtccgccccgccgttttccacaagaaatttgactaaaaaacaaatatttttaatttagcaattaaatgcggagaaaatcacaaaaatttcgggaatttaacgcaattcattaagattgctttgatgtttgtttgaatcagaaactcaaaatttttaaatgaaaatatcgaattttcaagaaatgaaacaaaaattcacattggaccatttcaaaaagcacaaaatcctgctatgtataataattattgcattaaattaccaatttgcaattgcccaaccatacacgcaacaatcaatggcgaacgacctgtgcgtatataaataaatcatcgtacatatgcagtaaattttgaaaacttaggaaaaaatggtatggggaccggtgaatttggggacacacgcgtttcggcgccgcgcgtttcggcgccagcccagtttttggactataacttttttctttgtcaacgaaatcaaacattgttggtatcattcgaaagctgtaaatgtcctatattagcctacaaaattttgaaaaattatgtaaaggttcaaaaaaattatggccagaacaacttaaaaaaccagattttccaacttttatggccataaatttgttcaaaattgatgaaattttttggaattatgcaagataatagagaatctgaagggctttcgaatgataccaataatttttgatttggttgacatagaaaaaagttatagtccaaaaactgggctggcgccgaaacgcgcggcgccgaaacgcagtagaccccc

SEQ ID NO: 13285 - DNA, 2396 bp, Heterodera glycines
cataatgcaatatctcggggcttaataggcctctgcaaaacaaatatttaacaattttcacggcttaatcgtctcattcataattaaataactctcggctgttcacctgtcgcacgtagttgtgtgcctgcaggcattgccgttgaaaattggcatccactgtaaagcaaaataattgtgccaaatttttgtgcataatcgtccccaaatggaggggaaagcaccccaaaaaaatgagtcagtttcaaccagggttgccagatgaaaattttcaaaatcgtcattttgccaacaaaaaaccagcatttacgtcaaaaaccattatttcgaaaaattttattcaaaatcaaaaaattcaataaaaatgtttttttttgcggcgcgctttttccaagaagaaacatttcaccataaatgacaaatttttgagattttgggctaattttttatggaaaaattggaaattttaccatttttaaacagattttcactgaagattgacaattttaggtcaatttagcgctttgaaaatttcattcaaagaaaaacaaccatcattaaccccttgaaaccagcaaaatgatgatactagtaaatcaacacatctggcagtccaggtttcaaccaatttataaaactgaaaaattttgaaaaataaaaagaccacgattcagaaagttaggcatactgtaatgggatcactgtttgcaggcagttttgttcattggtacaactattttttaaatacagaattcctgttttttaaataagaatatgctgtttttcgaccaaaaaacttaccccaaatttacttaatcatttcataatgttaatttgaggtacagttttaaatacagtatccttatttttcaaaaaacgaagatacaatatgaccggcgcatttgccggccacgcccaccccgccagataagtaccaaccgacggcgctgcatttgcccggcctccggtttacatatttcacatcggtgcatgtctgcataagctgccgatccagatcaccatcagccagttcactcatgtcagaagccatgtgcgtgtccgagtaactgctggagatcagttgagcatccgccgttccggcgctgctgatcgggcccagaaagtcggccgaatggggtgatctgaaagcgagggatacccgtatttttttgggcaggtgacgggaattttcagttatttaatagtcaggattaacttttggcatttttgtttgtaagtcagcaattttggcatttcaattatgtttcttcgaatttacaagttttgtgtggttgacccaattaaaaaaatttgagtcagactaatttgataaagttgtaataacaagcaataatgttcattattgtaaaaaagatcaaaaaatttctcagaaatttatattgttttttgtctatgaactctcagaaataaaaatgccaaaaattgctagtcgcggaaaagtgccgtaactcatgagttgtgagattatgccatctctgccatttactgattgtgctcactttgccgcgccatcggctgcaccgtcaaatgtccggcttggccccacatggtttttgtcatctccctttttgcggtcgtgcgtcgactgtgacttgcgcaggaatggcggaaagccgacccgaccgcagccacttttgcgctgctgctttccgttgctgacagccgctttatctccaccggcttctccttcacggctggcatcgcgcaatgatgccgactttgaagcgtcaccaaaaagacggcgcattcggcaccgaatctgctggaacaacggcatttattgttgcaacggatgatggtggtggcggcgttccatttaaggcatttttgcttttagcacacactcgcttcactcacataatggcacaagttgccatttttggcattgtgctttcttagcggggatggagagcggggaaaggggcatggtagtgaatatttggcgtaatgccactcaaaattgttgagttcaattccaacaacaactatgactcctcccctggggcattccagctataaatgggtggggcttaggagaagctgtacacatttcactttttgccaccatttttggcaccagcctgacaatgatggcacattttcgattgttctggctcgccctgctggtgcccggccggaacaatgggctaataaaatggattgggctcgagtgtggaggatgggctactgctggtccagtgtagtagaattgggagaaaggacggcaaaaaatgggataaaacgctaaaataggggaaaatgaaagagacaggccgacagagagaaaaagcaaggcgagagagtgtctgagagagacatacaaagagtgagtgaaaaacattgaaatatttggctgagagaaaaagccgggcgag

SEQ ID NO: 13286 - DNA, 1953 bp, Heterodera glycines
aattttttagaaaatttaataaaaaataaaaatttgaccgaaataaaaaacacgagtacaattctggatcaaaaaagcgaaaaatttatttgttttttaaatttttgttaacaaatctcagcatggccggctgggacgtgcgaaaaccaaaaaaaaaatttttgaaaacgtaagaaaaaataatttctcataaaaccaaaaaagaaaattttaaatccgaaaacaaaaacgaaacgaaaaataattcctcacaaaaccgaaaaacttttttttaagttttaaaacgaaaacgaaacgaaaatattgtattatacaaataattttattgctatatattcttttattgatttcttatgattagagctccctaagaaatgacccgaaaattttttagaaaatacacccttaaaatctaaaaattttctcaaaaattaatcaccaaaatttattttattttttttcttgtaaaaaaaattttaggcttaaaaattttccttattcgaaaaacattaaagtatttcataatcatttaaatattcgaaaaagtcggagcattggagaaagaacaggagaaaggaaaggtgaattcagttaaatgacaaaaatcaattaaaatttattattccgaaaaataaattatttataattttttaaataataaaaattgtcttaaggtgcttttaaattttcgaaaaaattgttgggatgccatcgcttgtcccgaggggatcgaaattgttggcgataagaatttgactgtccatcataaggggatatataaatttataaaaggtaacgaaaaaatgattagtgaaaaaataataagtttccttttcaaaggtcgacgtcccgtcttcgcaaaacatccgatttcgttggacaattcgaccgacattttttactttgaaattactgtcctacaaaagattgggtactaactttataattttggcaaaatgccaagatttaacatttaaaaattcaattttttatacattttttcagagattccatcttaggattcgccgtaaaaccggcacgaacatggattgaatttacttctctccaatacgcacttatgcatatgaaaacgatggctgtttaaaggctacttttgtaaatggagtttacttttccacagagaataaatgccaaatattcctacggtgtcggcgatactgtaggaattggcgttatttgtgccaatcgacagatcgttttcaccaaaaatggacaacgtttgggtaaaaattatttatatagctggttaaatacagtcatggttaagtataaagtttttcagagtttttggctcataaaatatttgattctatttgcaattaaacaactgtccgtacacttgatcactaaaaatttggggcatatcacctaactttaatgcatttttatttttaattggttttcaacactaaattttatatactgagtgtccgtacacttatgaccatgactgtatttgaaaaactattcttttttgtgcatttgagaagaaaaaaaaaatttttttttctttttttcatagattcttccgattttattgttgctccatcgtttggaggccaattgtttccattcgtttctttggttcactccggtgccgaaattgaggcgaactttgggcctaattttcaattcgatttgaccactctttaaataaatatttttgcaaaatctgggtgatcatttgttatatttttgcattattttcatttgcgctttatttagtttaaatacaaatgcaagaattttgaggagaaaaaaaacaaaataattttttttattagtactgcaatactgaatatcacaatcgaagggatttgaccaatggaattaatttaattttaaagtttttttaatttagccattttttaaattttaataagtttttcaagaaatattatttcatttgtcactgaaattattcgtaaatta

SEQ ID NO: 13287 - DNA, 1927 bp, Heterodera glycines
tcgggttttctttgagctttttccagatttttgctttttcctttatagaagcttggagtgaaataggataattgacattttttggttcctttttgaaggttatttttggtgaaaataaatccattgcatcaatggattctttagtgaacctgttatatttatgctctaagtcaaattcggattgcaatgagtcatttaggtggaagcttaagaaggaatttatttgatgaatattttttgggtcagattttctatagcttattactgggggattggttttctgtaaggaaatagaaagatttatgaagagagattcatggtctgaatttattagactgtctttaatttcaacctctgagtggtacaaaacgaaatttgtcgagaagagtaaaagaaaaagtgaggtgatgcttcatcatccatcgtccgtcatcattcgcttcttttcggcatcatttcgcttttcctccgccggtcggaaaagaggcgggccttttgctgctgctgtgttggtgttgctcctgctgctgttgttgctggaccatctttttccggcgttgctctagcaccgcctggtgatcgccttcaaattggacaaaaaataattttaaaatccattaaaacgcaaaaaaaaaaatggaatttgatttttgttcatgtcacaccctcaaaaaacccaaggtacatttagggatgaatttgtaatagtgatacttcaaaacatttgcgttttttgggcctagaatcgaatccaaaatttttcagctgttttcgaagatattagcccaattataaaatttaaattttatttgcggttgaaagagcaagaaaacaaattaaaaaaacttagaaaaaattttttcaattaattttttcgggggggggggggggataagcggtaaagaagtgcttccgggtccgatttttcgaatccgttaagggcaatattatcacacacgtcctacgctctctcacccaatgcgtcgtaaaagtcgtcagcggcgaatgcgttcgggtcgtacacggcgcgggcgaagcaggtgcccttctcgtcgatgccgtacgcgttgcgcaacgcctcgtacagtgccgggttgatgtagtccttgcgccgtttgatgctcgcgtgcatgtccacgccgcgctccttcttctcgaaaaaggcgacgaagcgttgctgaaatgaaactttgaattggaggaaccaaaaaaaatttagaaatttagactaaaaattagggctgtgttttattcaccctccacggccattgcccccattttttttttaatttttggaattttttagttatttcatatcgagaaaaattccaccatcggtgatgtgaaaaaattaaattggatttttccattatcatcaaattgtgtcttcagaaagaaacttcggtacttgggggttttgggactcgatcataatcataatcgccaagatccggcgcgatatatttataaccctcgcgtgtttgtgaattcgcagcttaaccgaaacaatgaacggccaaatcgaaacgagtttccggttcgggactcaaatcaccgaatgcattcacaattcgccaatcaccaaaacgagcaatactcggctcgagatgctcggatgtaccaacatttgtcccgaccagaggcaaattcgaattttgtgcctccattgaacctgcaattctccgaaaatgataaccgacgcaatcatggccaatttccgaatccaagaaatttccaacaaaatcccgaaatggtttatgcacagataaatccccctgtttaccaaaaccaagcgttccccggccctaacattcccatcccgggaatattatggaataacaaaagtcaccctctccaccaatatgcaacacaaggagaaaatcccatcctgaacggacggaaggagtgacaaatcattgatttcttc

SEQ ID NO: 13288 - DNA, 2403 bp, Heterodera glycines
gggggggggggggggataaggcgggtaagaagtgcttccgggtccgatttttcgaacccgttaagggcaatattatcacacacgtgctacgctctctcacccaatgcgtcgtaaaagtcgtcggcagcgaacgcgttcgggtcgtacacggcgcgggcgaagcaggtgcccttctcgtcgatgccgtacgcgttgcgcaacgcctcgtacagtgccgggttgatgtagtccttgcgccgtttgatgctcgcgtgcatgtccacaccgcgctccttcttctcgaaaaaggcgacgaagcgttgctgaaatgaaactttttgaattattattttaccagtgcaatgatttgaattggaggaacccaaaaaaatttcgaaatttagactaaaaattagggctgtgttttattcgccccccacggccattgcccccattttttttttaatttttggaattttttagttatttcatatcgagaaaaattccaccatcggtgatgtgaaaaaaataaattggatttttccattatcatcaaaatcgactcaaaaacccgcaaattattcattttgggtcaaaagcagcagatgcaactaagaaaaattttgtatatcctatatgaaaaattatgaaaaacacgtcgcattttgggccgaagcaaaaaaaaaaatttttttttcagtcggattcgatttttaaaaaaacgcatcgtcatttctaagccctcgcacacttaatagcccacaaaaacccaaaattcccatgttttttgtccaacgaaccgccaattcggggtcgcactcgccgcggggtgagggcggcaagtcgcggtgctgaatggcatcggccgacgactcggccgccatgtcttcatccatcggctcgtccgccgagcacaccgaccggggcgtgtagccggggcccggcgttgaaccgccgccgccactgctgccgccgacgtcgagcatggcggagtccttgaaaaacaatttaaattgagaaaaatgtattttattgttttattaggatcggtgtcttagggatgcagaacaaaatttcgccacaaaaaaaaataaaaaaatttctttaataatttcataatccaaaaacctaaatggtgttactgaaaataaaatttgcaaaatttcaagaacacaaaaaaaaatttgaaatttttttgggtacttttcggttatgcggccacacccctccaaattttaaaaaagagaaaaaaggcgccaatggtagcgcgcacaattgtttatgtggcataaaagtcgctatttgagccaaaatgtcaacgaaagcatcatcattatgctaattgcagtcgttgtcaaaggtaagtaaaaaatttcccattaaatggtacaaaatttgcccaaaaattgaggaggacatgttgggaaatttcaaatgaaaatttttcatcattcccaacaaaaattgctgaaaatttaccgaaaatttggcccctttctccagcaacaggtccaactcctcctcctcgtcgtcctcatcgttccgccgtcgttcactgccgaacacgtccgcctcgtcgtcgtcctcgtcgaacatgtccgactgacgccgcgggggacacggctcctccaacggcaccgccgccgccgcaagcgctgacgacgaagacgatgaagacaattggccagcaaggcctggaaagtaaatgaagttttggattttttaaaattttaactgccaatagacccctcccccctctcccgatggcggccatttttaaatttttcatttctatcgggattttccctctttaaaaatgccaattctaaaattttgccaatctttttaggacttgcggcacccggaagcgtgcccggctgactcgacccgtgccaccctggcccaaatacccacccccatttcctcgctgtttctgctcctcccgcggttgttgatcaggttcaggttggccatgtcggctttgctggtgctgcccctcctcgtcactgtccgagccgtaggccaacaaagagttcattattttctccgcttaataagaaaagcggtgctacttaacaaatgatcattttgaatgttttttaaaaccaaaagggactactctcttggtttacaaatttcttgtgataattagggattcgatttatagttgctaaaaagcgccaaaataaacccccaaaatagttgctaaaaatggggaaatagttgctaaaaactttcaatttagcgtgtaaaatgacaaaatttattcaaaaaagctacagaattatggcaaattaatattgagatacctaaataatttttaaaattaaaaattcttgtcaagaaagtaaataaataaattttggagatgaatttttgaaaaaaaattcatttctaaggggtatatttttgaaaaatttcggg

SEQ ID NO: 13289 - DNA, 1480 bp, Heterodera glycines
  unsure (1)..(1480): unsure at all n locations
gtttttttttttttttttaattttgggggggaaaaggccccccccccgggcgcggagagccgagtgagtaccttcggtgcaggaaaattattaaatttaaaaattttttaattgctttttaaatatgccaaaaaatgtaggctaacttttttagtgaaaattcgatcactcatattttttgctaattgagcagaagcgtaccaaactttgcagggatactccccggtaaaggactaacttacactgaaatgagcgccgagctagctggctcaaaaaaattttcgaaaatctgagtctttcgtttttatttattttttgcaaaattaattcttaaatattttttcagaaagggttctgaaacgcaccaaattttatttacatgttagtttaggcactctgatgctttttctatcaaaaagggagatgaataaaatttttaaaaatttttaattcctttttaaacaggccaaaaagtttaggcttaactttttttcagaaacttatcagaagcgccccaaactttgcagggatactgaaaggaaaagaattaacctgttttatcacattagcttgtcatcagtttttataaaaaattttcaaaatcgccccaaattttttttacagcttaactaggccctattaagcttcagaaaatctcgcatgaattctcatttttaaattttttatagatttttaaatgtttggattttttttggcttaccaaaacttcatcgaacctggttctttctcgccccaaattttttttacagcttaactaggccctattaagcttatttccagaaaatctcgcatgaattctcatttttaaatttttaatagatttttaaatgtttggatttttttttggcttaccaaaacttcatcgaacctggttctttctattctctttcaaatcgccccaaattttttttacagcttaacaaggccctattaagcttatttccagaaaatctcgcatgaattctcatttttaaattttttatagatttttaaatgtttggattttttttggcttaccaaaacttcatcgaacctggttctttctattctctttcaaatcgccccaaatttttttttacagcttaactaggccctattaagcttatttccagaaaatctcgcatgaattctcatttaaaaaattttttaattgctttttaaatatgccaaaaaatgtaggcttaacttttttagtgaaaattcgatcactcatattttttgctaattgagcagaagcgtaccaaactttgcagggatactccccggtaaaggactaacttacactgaaatgagcgccgagctagctggctcaaaaaattttcgaaaatctgagtctttcgtttttatttattttttgcaaaattaattcttaaatattttttcagaaagnggtctgaaacgcaccanatttatttacatggtagttaggcactctgatgctttttctatcaaaaaggga

SEQ ID NO: 13290 - DNA, 1964 bp, Heterodera glycines
actataaacttttctctttgtcaacaaaacccaaaattcttggtatcattccaaagctctttacattctctattagccttggaaaaagcaaaaagtgaaaaatttattaagaaaaaatttaaaaatttttagcaatttcatgctataacttttttgataattatctaaccgacaagcaataccataaaaatagcttctaaacatgaaaagctttcgatgataccaacaatgttggatttggtggacaaagaaaaaaagttgtagtccaaaaacttgctggggcccaaccgcgaagcccctactaaagtaaaccgttctattgtcaaaagtaatcaaattaatttaatttaaatttttttgtttttttatactgtatataataacaaaattttatagaaataattttattgtttttacaataattatttttcccccaaaaattcctcaccctaattaggcgtaaatgcaattattgaataattatttgcccaacccacctgtgtccgtcccggttccagcctcaacactttccaaacaacgcggttcctgcctcaactgcaggtgttccccgccgccaccagcggacgaattgacggccgaaattggtctcacggggacgggcataaaatctataaaataaaaataatttaaaataaaaaaggtatataataattttaaaaatatttaaaatatacttttttaaatatacctaaatcttgtccaaatattaataatggaaagaaaaataaaaataaacccaatgagaaatgcattttatcttaaaatgaaaaaataaataaattgttattgaaataacgaatcaatgttgatgagtgactaaggtgtgaaaataaatcacgttaattaaaattaaaaaaatatattaacgatatttaaaaaataaattaaataaataaaaattgccatttaacaaattatagataaaaagattttttaagaatgaataaatatgaagcgattcttgatcgatcgtgacgagagtattttctaaaatttgatgattaattgaaaattaaataaattgaaataattcttattaatctacaaaaaaagagttcaataaaaattacttattttatattttattattttagtcgtagaaattatgtataaaaaacgaaaatttcaagataaattactaagtattgtattatattataagtctaaaaataaaaaatgattaaagaaattgggaataatatatatacattttttataatggaacgacgacaaattatttgctggaattatgtaccacacgtaaattgatgtgaaaaattggggatgctacgaacgaacaaaaattggtgtggaaaattgcaattgttgatgttgttgtctttgacggagcgcagaacctcccaaaagcgcccaaataaacaaaaataatgacgaaaagcggaacaaaaatttataaaaaaaaatggaaaatcatttttattggcaattttagaaaatttattaatttgtcataaatttgaatggttgatagccaaaaaaaaaacaaagcaaaaaccatttaaatgcaaagatgaaataaaaaaaattaattaaaattaaaaaaaataattttataaattattgaaaaaaaaaatgttttacacattttcatatgaagtgttttttacgcactatttattaaaaataagtaatattaaataattaaaaaattaatttgcatttttttaaaaatagttttgtgaattatttgaaaaaaatggtttcacattttcattaaataacaatattttttttaaaatatgtaggattcgaaaagggaccaactttttgagaaaacaaacccccttaaaatggtgaattctcagacatagtagcaaacagtctagttaatttttacccagttttaaaaaatggttgggccttccgtgacagtttttatttatatatttatcattatctttatggatatttcgtcaaattgc

SEQ ID NO: 13291 - DNA, 2447 bp, Heterodera glycines
  unsure (1)..(2447): unsure at all n locations
tatttcgtcaatttgcaaatgttttanaatgagggagggatgggtgtatatccgatcacatttntcattcaattagcatcgtttccatgaactccgccaagaatggtttgctgctgtttctgatcatccgcctccggcggtttgatcatcactgtttcaaccttcgctcctccgagaaattttcgctgttcttggccattggtgtcgttccgaggtggaatccatggccatgctccacgcattcttcttggctgggcatcctccggtttgatcaccactgtttcaaccttcgctcctccgagaaattttcgctgttcttggccattggtgtcgttccgaggtggaatccatggccatgctccacgcattcttcttggctgggcatcttccggtttgagctgtttttcaccaccaactccgccgagaatgtgttgctttggtgcatccaaattgtccacatcgttaccataggcgccgccaagaaatttttgctaaatgttttttgtgaaatttttttatttaaatcctttaattattgtactttggttgcgtctgagaaatgggctaaatacacaaagatgacaaaggaaagaagaggaaaataaaagttatgcatttttatgaaaatggatcttaatttatgaaaataatttttaatttaatttgaaattattattctaagtgattttattgtgaaaaattttttccttaaatattcaatttttcacatttggaaggagcatagaacaaaaaatcatttgatgaaaaaataaaacaattgtggttgatcctgtgatccctgctaaaacgtgagtggttttttgttggtgattaagaaattgttttttgacgctttaactcgcaagaacaatgtgaaaaaagaatttgagaaaacggaaaacaaaaaaataatttaaacggaacattccataattaattaaaataaaataaaataaaatataaaactgtaattttacagtaatcaaaattaaaaataaatacattaatttaataaacaataaaaggaaaataaaaataaaatttatttaaataaaacataatataaacaaagaaaatttaaaaaaaagctaaaattttattttaataatacagaaaaaaaaacacagattaaaataaatagaattaaaaattaaagaaaataattttatttaccatgagaaatttacacataaatatgaaatgcatgtaattacatcatattagaacattggctaaatcacaatttttaattggctatttatataaaaaaatcaaaaaaaaaaattaatttaaattccgacaaatttcactttttgcctttttttgccgctaaacttgtggccaagtgtggctgacgatggtgctggcccggatgcacaatgatcggcacgcccgggttctctttagtgcaggcacgttgatgtgcctgatgggaaaatttgccgatttgaggccaagaaaaatgcaaaaacaaaatattataataaattgtaatggtaaagcaaaaagaaaataatttaaataattaacaaagaaaaaaataattactttcatttaaactttcatagtgaaattaaaatgaattaaattgttttttcattaaattatcaatattcatatatgtatttaaatattttaaatttttaaagcatatttaaaaaagaatttaatttttctttaattaattgtttatagttaacataattttttagctaataattaattttttctttaaattcattaaaaatattaagaaaattttaaaaaactataaagatttaattgtttttaataaaatttataaaagtcaaacaatggcacaaaaatatttttcatttatttaatggtttaatttttacctgaaggcgttcgggcgcaaatttccgaccacagttttcgcagcggataagctgagctaacgatgcttcatatgccgccatattggtggcattcacatcaattgaattgtccgctagatttaaaaaaatatttaattataattattttaactgtaatttaattttcatttttcaaaccttttctaacaatttttgggggctccggctcagtacggcgtacttcttttggcaattgatcattttgtattttccacttcttcaaacactgtggctgatgtattcctattaattggtttataaataattttttaatttaaaacgattagcaaaaatggctttcttaattaaatattttttataaattcttttaccaatgctttttgagccaaattgacggccacaaatgtaacaataaatgggttgatgagctgcagcttttggaggcccgggcttcaaatgttccttaaattattgtttagaaataatttattattgtttaaaaattaaattaacatacataatggtttaaattgtttgccattaaaccaggactaaagttagctaaacaaattttaaaaattaatttaa

SEQ ID NO: 13292 - DNA, 4963 bp, Heterodera glycines
ttgcttactgtatgcacggtgaaaatgagttggacccttgataacaaactgagaagaagcgaaacaatcgaaaacagcaatggtagtgatgaaacgatcctctgtattttgagaatgactccattaaaaagttgggaaatccgctttttaccgtatccccctacagtatccaattgctcttcgctgatttcgacatcatttaagctcaaaaccaaatgatagtgccaaaattggggcacaaaaaggaacataatgagcagaaaaagtgcgtaaaacattgtcagcaacatttccattccctaatttcaattaaaatatttgttttaattaattgggttcaattttcaaaaaatgacttacatttaccaccataaaagggatgtacattttcgattcgtttctttggtaagcgtacagtagcgaaacatagaggggcacagtaataatgcacagtaacaccatgggcattgattgggcgagcattgcgcaaaagaggccgaaagtgtgcactgcagtgccgagcacaccgatccatttagcacccgtctattacggtggagggtgggcgagattacggtattagtgaacggacgtaccaacacatgaacagaaccgcacagacagtagaaatcgggtgcgtccattgaagaatgtgaattctaaaaagctcaatataaaaatatgcttttgaatttaaaatttaaaattattaaattgtgaaaatgaaataaaggtgcactcattgattcattttattcatatttatttctgatttaaaattgaaaatgggcgggagagggggaggattgggttggataaagcagtgccgagggaagagggccgaataaatcacccagcccccatcaaaagccaacccaacccaccatcagttcgtggcattggcaatttacatttcacaattggcaattgatcaataatcaaatcaatgctgttatggttaggtcgaagcaatggcagtccaaaaattgattttgggaatttcattgtttttgttttcgagaaatgaataaaatattttttataaacttttcagtgatggcctaattgtgttgtctctcgagcagccctaataatttagtgatgctcgagagtcttgtgaattttcggttttgagcatcactttatgttaataaaaataaagaaatgtgaagaaatggacaatcttataatttataggataattaaacagattaattaattcacacttccaacaataaatattttcggtttctttgttttggtccgtcaaaatttgctctttctttctttaatctgtccgtttctcatcattcattttgatggtttagctcttcccaaccaacgcattaatacttgaactgctattattggcactccttaacaaaatttcttttaaattgtcggttaaatcaaaaagattcgctgaccatccaaatgggcccaatggcatttgcgaggagcagaaatcgtcggccgaagtgaaaagattttctcgggggctttttggtcgagcttaaattggtacaattttttaagtaatagacagtcccattagtgccattaatcgcccctttcttctcaccgacgggcattttctccttctccacctccaccaccacctttttgccacttttttgcgctgcttctgccgctgcgccgtatttcctttgcgctttttgtcctttctttggtgtttcttccgctatcacttccacatttatactcggtcgtcttaattaattgttaattgctttttttatttttaaattcgctcaaatgggttcacctgattgtgttctttttctgtgccttcagctgcaaaatgccattgcgcgtgaagtgcgatcggattgtgccggcgtccacgtcctccggcactttgtaacttcggtgcagctcccgcttcacccagctgtgctcgtccactcgttcctcgtgatggcagtagatgaacaaatggtcggccgacagatttatctgaactttgtgaatttggaaaaaaatacttctaaattattctaaattaatattattaatttataattaaatatgttcgaatttgcctcaatttcgttcggcttgaaaaaggcgacgtccaaattgacctcccaaccatccctcccattgtgcacttgcacaacgccgtcttcgtgccgaaataaaaaaaatgctttgaaaataaagcaattggaaaataatcacttgcaaaggccaatcccacagatcggtggccaagtcgtgggttacttttacaatttgagccatttttttgattgaataaaaaatctgaaagataaaggcattattaaatgtaaaaaatttataatataaaataataatttatattaatataaaataaatgtttttaataaatattacttaaaataattttaatttttaagcatttacacgtccattttatagcatcgatcaaacaatggaaaagtgaattcgatacactgatccatccctttgggttttccgttaatttcactgttgggcttttattttctgtcttttgaccaaagaataaaaaatccgtcaatccaaaaataaaaaataaataaataaaaagagagaaaatggaaaagaaatttgacactttttaaattccattgaaaataaataaaacgaacgttggactgctttgaaataaacggagggcgtctattaaaaaatagttatttatttttagcttttttcgttttcatttctcaacacatgaaatgatttttattgtgagactttaaactttttttagattaagcaacaaattaagaattaattaaccatcgcatgacattggcttttcgtttggcttttccttcaaaagcttcttcttcgggttcgtcgtttggtgatcaattcgatggatcactcagtcattgcttgtccaattcgatctgtcgcggcacactgccaaagaaatgtgccgcttcatcgatcacttttgggtcggtgttcggcttcagattgtccttcagctccacgctcagtttctcctccaattgtctgactctttccactttctctttgggtgttttcgtttcgtctgttagtgtgccgaaaatttgtttcattgccattttcgcctccagcgatacttccgaatatgagacgattgtgtccaacgctttttccaccgtttttcgcgcttcatcgattgcttttttcagcgtttccttaatcatgtccatttccagcacattgatcacatgaaggaggccatttgatcagtttcccaattttagaacattttgttggttgtactactaacaaaaagccgatttccgcagctttttccgctttgctccgttgacatttttgtgccgtcctgctgctttaccttcacaatttcgccctgcttttccgctgtttctagcagtacgcgtctctgttccgcttcgctcaattcgttaaatccgtccgtctccgtcgcctttttcagcgccaccgtcgctttttccactaatgcgtccacatcgctcggcacaatgtcctcaagcgtcgtcggagtgccgcgctcactgcgcgcaatcgcatcgcatgttttggtgtgcaacaccttcaaaaagcattgatgagaagaagcaaattaaacgaatcaacggccaaatcatttaaattagtgcgtctgacttgggccatgcaaagttaatttagaaataaaatttaaaattttaaaaatgcgtccgatggttaagcactgacaaatgagtcaacaaccaaaacaaggatttaaagaatgtgccaagcaatttgttgctccggtccttactttgcagccgatgctggtcgcttccttggccaatttgagttcgctccaaattgcgctgtacgccgagcgacgcctgcggctcattgccggccgattgcgcggttccttcgcccttttggcttcgtccgttttgctatctttggcatttttggcgagcacaacaatcacaacgatggtcagcagaaggacaggcgaaagacgcatttgtggcaaaaggcgttgaaaagagtgacttttgttggccaactgttgttgttccttccattttgatgggccattggcattttataggccaatgctttaccttttttgtccctttttaaaatttatttttgcactttaaagcattcactccttccacaaggtcatcattttgcgttgcttttaacaaaggctttcattaatgaattagctgaaaaaggaaaggccatcgcggcggacggacttttgacgggacggacattctgttggggaattcgatgtgttgtgttcgcgcaaatcgatgttggactaataaaaaatattttgtttttattggggggggggggaagcgcaaacgacggactgacggaacaaaatgattgatcagtctcaaagattagccgccgttctaccagtcatcagccgaaaatgttaaaaggtcatcgacaaatgtgcacgaaaaatgagttgaaaaaacaacaaataataaatttaatattattaatttaattgaaaatagaaattcaaaattaaattagttgggaaagttacaaacgaaaaaatattttgttgattgaattcagacaacattaaggaaatcaaaaattaaaaatgaagcatcaaaaaatgaattataaaagtgaataacttttttattttcattaaaataaaactgataaataaaattttattatttacaaaggaatgatggagaaaatcaatacgattaaattaattgtccgtttatttatcgtacattttcatttttcgtttccaacggtttacaaattttgtctttttattttaaatttaatttttattttttgaatggcgtcggttcaatctgagcttctaatcggcgtggacgttggaacagaaagtgtccgagttggcctttttaacacaaccggcaaacttttgtcagtcgccaaacgcgaaattcgaacatggcacggcgatggtggcacagggaacaaagcacag

SEQ ID NO: 13293 - DNA, 1112 bp, Heterodera glycines
tgttaattgagtgtaaaaatgatcttcgtatttagccgagtaagaaatttgcggataaggaagtggtgaaagagatgatcaaagttgcccagcccgtgcttaaatggctcaaggaggcggaagaagggtcggacgagtcggaggacgacgatttggacgttgcatttgacgatcgaagccgcaacattgggatgacagtggaggtggaaaagggagcaaaggatggggtcacccgtgtacagaacggccaaattgcaaccaatggcaaaatggacgatgggaatgcagacgacattgacattgacaatatctgattgtgagtggcatggcgcggtggacggtaattcagtgatgttgcaagaatttgtgatcgtatgccgaagactttcacccaccccttttgttcattgcgataccaccacatttttgttcgcttttatcgtaaaaaacttattgtagatgtttttaacacggatagtataatacgcgtactttcattgagcaaatgtcgaatccatcacatgcatttcttcttctttgtgtgtttcgatgattgaagttgcgaaccattccatttctgttcgtcctgcatattttaactaaaagattaaaaagtaatgaaagtatataatatcttggaaccattcaagatcagattccccccccccctcaaaaaacaatcacgaccgcttttgcatctacttaccgtaagtccaaatgcactttggaacctcggcccaacaaatgcccaacagccggcattcctcggctcttcctgtgaccaaatgaaacctttggcatagcaataagttgcgaagacatttgccaaatcatcggtcgagaaaagacagagcatttccattcggacaaggaccaacaccttgcaagacaatagcttttctctttcctcggccaaagatacatagagattacccgatgatataataccctctaaaggaattggacggaaaggcgactttccttttccgcaccttttcaatgactgttggctatgtggacatgttgtgatccgtcaaaattgtgttatacaaagtgcccgattctaatccgctaattggcaaaacgttgaatgatcggtgtaacagaatttt

SEQ ID NO: 13294 - DNA, 2154 bp, Heterodera glycines
cgttggtcgacgagcatcgcgtggcggtgggtgaaagtcgctcgcccacctgtcaagacattggcattttgtgtgcattattcgcacggtccgtcttgagcgtttagtagagcatccttaaaacatttttgggattggcttccttctgcagagtccccaattcgcacatttcctatgcaaaagtgccgttccgattgccaatgcttcggctgtgctccaatcgatctgtccgtgtttgagtcaccctcccattttgccattctccccctccccccaatttccccacttggccctgctcaattttccttcgcctggcttcgatatgtgtctttttgaggtgcgggtgtacaatctgtctcgggttttgatttggacttcttgccaaagcttttcactcacaaatccctccggaattgtaacggaagcgaccccaatttgacggagcaagtccatgtccatgccggtgtcccatttggtgacagcggctggcgcttggcaaaacctgagcaaacggacacaaattgaaaagggtgtcatgtcgtcaaagggtgcgaagtgtgatcaggcaccccttccataagccgcccaaatgctcggcaattggcggtgttctaccagagtcgaccaattccaactgttcactcagcatttcagaatgaccggaaacaatcgactcggactgatcggtggaaaaaaggcctttgttggcaagtcgatcgacgaacgaatcgaccaaacaacgtttggcatcaaccgaatggtacatgagctaaacactttgccaaaaaagaaggaaatggtcgattcaccggctgagtgaaccgcgggttgtccaattcgttgtgtccgtaccgccgccaacaaatcaaattgacaaaaacatctttgcggaatttctgccggaaatccaatgccaattgagcagcgaaaatcacatccttaagggaaagttagccggcggacattcattccgttccgattttgtggaccgacttcgaccgattcggcattgacgtgaatgaccggagagtcaatggccttggcaacgtcggaacaatggagcgaagaacggccaacggcactttcggcagtaaaagcgatttggttgttcacaatcaaatgaatggcaccgccgacccgaaaatgactgagaggcaaagggaaatgccgagaacggaagcagtaatacactcacgggacctgagacaatgccaacaccttaaaagataaggaaatctaggggatggatgaggaccaatggcacaattggtccctaccgacctcccaaacgatgccctgcccagtgaatgctccgtcgccatggtggtggacgggaaggacccgctgaagagggaaattggggagagtgctcagtgatgagtgaacaactcacgtcgccaacagtccctcgaccgtaatcgcccactctgaattcgaatttgtccgaccgacgaactgtctgtccccttcctccatccgtccaaccctccccttccatgccttctccccccccccccccccctctgttcgacctgagtgtctgagcccgggcccgagctttgccggagcaaaccgcgagggaaacctttgggggaaaaaggggaggacacacaattcactcgtccaaaaaaggaaaacttcgagatgggatgggttgggcaatgtgctgacatgcacacgaccaccggcgggggattcgtagtcaaaatgggagtgttggtgggtgagcaccttcgacaattaaagcattacgccattttggcacttttggattcaaattcgtcttcaattattattttttcatcacatcgccaattcctttcacatctccgggaaattcggcaagtccgcgcatctgagaaaacggactttacgaaagaaaagcggcggatttgggaacctttcggaacaattggccgggagggaaacggaaaaggaccgtttggagggcgagacgacctttggtgggaagagatgagaaaggggggggggggggggagggcaatgaacacagtgccaaaacacaaaaacaaaccccgatgagcaccatcaaaaatgaactgctcggaaggggggggggtagagcgggaggatgaagggaatagtgcaaaaacgaacttcggagatgccatgccgaggacacagctcaagcaa

SEQ ID NO: 13295 - DNA, 1952 bp, Heterodera glycines
  unsure (1)..(1952): unsure at all n locations
gctgatcagtcgggcgacaaagaatggattgtcaagataaaatcttgccaatgctttgggtttgcttctgccaagacgagtgtntggtcagccaaaaattggagacttgtacaaattttccgaaccgtttcaatgaataatttttgtgtgttagcagatactttagcgcttaatgcggtaagatgagctgccaattgtgaggagtaaacaattccgactgattcatcctttttcacctgatcagctggtaggtgccaaattacttctaagttattttccggaatttccgggatgaaaagaccctctctttttgacctttttaaaatcgtatccgtttccaaatttaacttatttttaaaattgatcatttcgtcaaactcctcttttggaatagcaaatgcttggtcgggaattatgaattccttattttcgcagtcccttttaagtgaggcatttacaaaagtgagagcaaaatcaccactttttgcagcccaaatatctgtcgaataatcccctgaccattttgcaattttaacataagcacattgttgggtccgatcgggcttccaaataagactgagctgtggacacctacaatttccggcctgatagtcacatgctgaacattcatttattggtgggttcactccttgggacccataacgggtgaaaacaatccgtacacataacaatttgcgatttcgtaagttttccaaaaaatccccgcaggccagattccccaaccaacatccaacgaattatttgtcgccttcattgtaccatttaatgaatacaattcgccctcggggactcatttctgttggggtccatgaaggacaaaaagggttagtcgggaaagaccaaaggctggatggcgcatccggcaaacaaatcataggacccgccgcgccgttttgagttaatcctggtgctaacatcgacaaaaggacgattagggccatgaaaataggactcgccaatcttgcggcggcaaatctccgtcccctaaagtgtactcggcctgatggtgaatttgcttgctcatatccttcattttcctgccgaccaaagggagtcggggttcggcggtttctttgattttctgacccattaaagtattgcctttctcttgtaaatcggttcgccatttgccgatcgtttctttggttcccttgtcctctgcaatttgccgtaaaattttgcctctgtcatctctacccctgtcccagttttctctaggatgccaattatttgatccccagcggcggccatcattatttgatccccagcggcggctatcattttcatcttttttctttatccgacaatcccttacaacatgcccttgtcggcggcaataatagcagcggcgcctgtcctggcctttgaagtctccgtccctttgctgggttagggctaatgtcaccacacgagttgagagttcggccattgaatcggcgaccgagatctgagtttcccgcttagaggccaacaataactcaaaatgctgcgcaagctcatatgcccccgaataattggcaggacggcctgcttttacctcaaattggagatcgggatttaaccgttctaaaaattcttctaacagccgtttgcgaattgatccctcattctctccagctaatgcagttctaatcgcttcatttaaacgatttgcaaattcatatactttttcaccgggcgcttgtctgcaaatggataatgcttggcgtgcaatggacctcgtattttcattttcaaatttccctttcaaatgattaagtgcgtcacctaatgttgttgggtgcgggtcaatcgaatccaattcggcacgtgcttgtcctgtcaggaggatgcgtanacgactcaacttttgngcttcagtcaactgggggtaaagcgaaagcatatccctcaattcgaaatcgatncggaaattgagactggtgggtttc

SEQ ID NO: 13296 - DNA, 2189 bp, Heterodera glycines
agtctttcttgcatttcgaaacgaaccgtcaaattttccacctttgtttccatttttgcccatttctctgtgttttcaaaattatccatttcttccatattttccaaatcattcatcgatctttccaactcttccaatcgaccaatagctttttgcttaggtatttccgctgtaaaatttgatatttcttgttgcacagcgcggaattgatggtaaacggatgactcaaatattctcatccgatttaataaattagccatcgtttggttttcctcttgcgaaaaatatattgcatcaaaatcagaacccattgagcatgcgggcatttgtatgtttgagccgctctgcgaattattcatattttgctcggtcatctctcccttttttttctcgattagcactcagcaaaactgggaatacacaatttgaccagcttaaatctttaggagagggtctggcacaaaagccccgctggaagtacacaactttgaccagctaaatccgaatcggcactgagcctcggcgtgggcaccaagcctcagccaaaaatcactttactcagaactgttggacctctgtcccgggtcgtggcaccagaaaagtgttgtgtccccggtgggttcaacccttgtctagagccacccaaattccaaacggacttttaagaaaagtttattaaaacgaaaagcaattaaataaaaagcaaagcaaagattaaagcaattaaatcaaatgcaaattaaaagcaaagcaaatgtaaaagagttttgttgggaaagcagcgagaattgagttggaattggatgggggatggcttgggtcgtccagaacaacacaaaagattaaagtacaattagttaaggcaaaattaggttattagtaaaaagtacattaaagtttaaaacaatagattaataatcaaaagcaattggaaactgcggactcaacacaaacccatcacgtagaagaagtgaggcacctcgttttgacttaaattcgatgaattgaattaattcttgattagccgtttcttcgttcccagtaaaaaataattattttttcactaataataattctttgttttatttcagtgacgaaaggttcagtgacgaaacgttcggccagcctataacctgcaaaattccaaaaaatcccttcaattttgaacaagttcatggctaaaaaggttggaaactcaagttttttgaaatcttctggccataactatttgaaccttaacgaaattttttttgtggtcaattcttaggggtgtatttttcgtttattgcttttatgtagggtacgcctggtccgagtatttggccaaaaaccgggtccgagtgggtattgccgggtatagaaaagccgggtcctggtccgagtccaagttttttaaccgggtccggtatcgggttgaaccgggtcctgaaatgcgcagatcaaaatggattcggcagggcaaaaaattgagaatacttataggatttagcaaatcgtgactttttatttacgaacctgttcttatgactcactttttgaatttttttttttttgtaatccagattatccaatttggtttttcgaaatttttattttttcggagcttaaaacatccaaataataattattaggcgtagaattatatggaaatccatattttttcctggagtgtgggaggcttgaaacgcaagaaaatcttgttttttagctttattagaagcatctagagtgaatttctatatccatattttccctatttttccatatttcgcgatttatgaacatatttccatattttttatgtccatattttggcattttaaaaaaacctctatcagaacggccccaccagctaaattagcctttttttaccccctaaagatcggaaaaattaccgaaaaatctttttttttttgcaaaattttctcgagaatattgaatatatttaatttttttttaaattggtaatttttttgtcaaaaataagcaaaaaaagcgaaaatttcgctttttgtttactttacatttagcgaatttaaagaaattttgagaaattacaccctcaatttgaaaaatttatgtccatattttgtcattttatgtccatattttgagattttcgcaattttatgtctatatttcgcaatttgttgtccatattttatggccatattttgcgattttgtatc

SEQ ID NO: 13297 - DNA, 323 bp, Heterodera glycines
  unsure (1)..(323): unsure at all n locations
ccccccccccccctagatacgggcctgtttctacctttgctaaagtgtggaagacattgggccatggagctcagaatggcctcccgtacggatgggtcttcgtccttgaacagttggatgatgcaaggcaatggcaaagtgcaacaaccggtggaattgctaaaaatttgaaactaacaacggattggtcactgagaaatttattctgatacgaaaatttttaatacagtttttgcagcactgacttcaaaaatgctttgaattggaataattggttgtttaacgttagaattttttttgtcgtcacanaaaaaaatttcaat

SEQ ID NO: 13298 - DNA, 2229 bp, Heterodera glycines
cgaccgccaccactttcggtcgttggccatggccatctcccatcacgcgccaatggatttggatgaatggattaaatcccccccccccccccccagcggcggtcggcgccggcggcggggcgttgccgctcctctcgccgcccgtctctcgcggcggcggtggggctgggctaagcgccaaaaatacacacacacatcatcatcattataagagcagaagcagcagcagagcaagaagcagcaaaaggggcacatcatccaatttcaaagccatccatccaaatgcaatattcacacacagattcatccccattcattcattcgttcatcagcggtaagtcacggcgccgccgctgcctttccttctccgattgactataatatgtataacaatgtatgtgtgtacatacaccgccgccagcagcagtaggctctcagcatcaaactatggttgtgttgtaccacgagatgatttccagcagagcagtccaaaagctcaaaacgccgctgccacacaaccgcgggccgccgcctccgctagcgatacctctgggagggggggggggggggacgggaaaaccccgccgttggggagaagccgtattcatcgcccgccgctgttttgctgctgctgcgcttctcctcatgatgatggttggtctctatcattgtgaatgttggggctttctcgtcgcctcctccttctcctcgcccgttttgtgttatatcttcgccgcaggcgtcgtcgcgtttaatacacacaccaaacacaacactcacacgaccgcccgcccgcgcccgacggcgccattctctcttatcaccgcaccgcaccgcgccacactatcttttcaattatcgccggccatttctgtctctgccgatattcgttttcctccgttgtctctctcccactcccaaattctcggaccgggtcagtttagtacgggccgttttagtacgagcgcacatttttccactataacttttttatttgttatccaaatccaactttcttgatatcattcgagagcccttcggatgctctattagctgcaaaatttcaaaaaattttattaagtttaaaaaaagtttgagccagaaaagtttgaaaatctggttttttgagtttttctggccataacttttttgaagcttaacaaaatttttcgcaatttttcagattaatagaggacacttagggctatcgaacgatactaaaaatgttggattttgttggcaaagaaaaaagttatagccaaaaacttgcgctcgtactaaaacggcccgtactaaaccgaccccgaccctgtcgcttggcttttaattgcaaaaatttggtaaagttttggtgaaatttttcaacaaatcagaacgaaattacaaaaaaattttccgtcggcgcctatcggcaccgcccgaccctctcccctcgctcatttcccaaaactttttggaaacatgcgccgtaaaaaaattgttaaaaatctgattttctgatcccaaatgcgctgaaagttacgaattgcttatttcttccccccaaaaaaaattctaaatggtttaaaaattggaaaattttttaataaatgcgcgatccgcggtccgcggcaatttgaatgcgcgatgcgcggccgcagttttttttttgcgcgatccgcggtccgcggccgcggcaatttgaatgcgcgatgcgcggccgcggtttttttttgcgcgatccgcggtcgcggcaatttgaatgcgcgctgcgcggccgcggtttttttctgtgtgcgtcccacccctggcgcgaacgccatgtgtaagggtcggggtcacttcggcgcgggtttttcggcgcggggttttttcggcgcgagcgccgaagtggccgcgccgaagtgggcggttcccatgtggaaggcgcgctctacaggacggatcacatcgttggaatagcttaaaattgggcgcggaaaagcattcaaaccggtttttgaaccggtttaaaactcgaaaaattgaggaaaaaggtggcctcctgaccttttagcacctgcactagtactaacaaattgcaccgcctaagcgcaaaaatgtttttaaaagtgaatatgccaatgaatttcaggggatcacaaaaagcaaagcaggagatgaatttgcgcattgcatcccatgcaattttgacatttctttgttgtccactggaaaaacggccattcctcatcatctgaagacggaaaa

SEQ ID NO: 13299 - DNA, 1781 bp, Heterodera glycines
  unsure (1)..(1781): unsure at all n locations
aaaagcatttcattttgacattgaaatttaaaacagtcaaaaaatttggaacgcttcacgaatttgcgtgtcatccttgcgcaggggccatgctaatcttctctgtattgttccaattttagtatatgtccatttggaatgaacaactctcaccgaatggacattctttatatatgaaagatgagctttttaagcaaaatttatgatgggttgaaaagcagagaggcacatcgtctctctgctgccttcttttcgtttactctttttctttgtccaatattctctcttttcatctcacatttctttgtcttcactcataaatttgtattgtctctcttcttttttgcccatctgtgcatgtgtcttacgctttctgtgagggaaagaaaataaggacgacgtgtaaaaagagtgaagaatttcagccaactgacagacgatcatgggaaggaaatagtgcacagctaattggaaaagaaacgagtgtgcctgggaagagagtgcccttctctttccacaagcctctccatctcttcaccactttccaccccatctctcctttcttctttcaatggcctgtcaattgaactgcctgctgttttctaaacttacctggctggggagttcctgcgatcacaaaggcagggctcctgtggcgaggctccaccattgcactttcggtcggggctgacccgcagggcggtcccgaactgggataggcccacagctaaatttttgagtgcgggggacggcgttcgcgcctcccctttaaaagatttgcttggatttggaatttggatgttcaaaacttcttcttgtcctttaatttgtgagtccaatttaaatgcgatttttttttgtctgtcttggctttgaatgacccctacaatttacatatgacctgctctgttttcaccacttcaactgtttgtgataatagtattgggttcgagacaaaggcagaaaaaatggcaaaatacatagacacaaaatagacaacataaaatctttggaatcttttgttaacgctttttaatagtagaacaagtaaaaattaaatatttgaattgtaaatgaaattattaaatattttaatgttttttttcaaataaggacaaatttttaaatgaaatattttatttaaaatttgcgggtcaattttttgggaaatttttcacacttcttaggaaatttttccggatcaattctttggggtgtgtttttcatttttgttgaggattttttcgaaagtccaaaataggcacattaagcacaaatccgaaataagcaaaaataggcattaataaaagtcattgtagacaccccaaaccaagcggaaaacgcctttttttttcatctgtgcgtattaagtgctcagaaattttaggcatttgcctaaaaatcgcatctgtctattggcatttcacctttaattatgtcctaattgttctacaatcatttgcaatttagaaaaaaattgccaaccaaagcgattgttttggggtgattataaggtagtggtgttctgagatttgaccccgagaccgagactcggccacgaggctggaaaatggcggtgatgaatcatttaatgattggctgctgaagcgatgccaaaatggggggacggcggaggcggtgggtggttcgatggaaaaatgatgaaaacttggatgccaatttgtacaaaaaattttttttttttgatttgtgcgccttccaaaattgcattggctaagtgtaagccaagtgaatcagtggcattttccactnaataaatt

SEQ ID NO: 13300 - DNA, 3813 bp, Heterodera glycines
  unsure (1)..(3813): unsure at all n locations
aaaaggttttttccattttaggtaatttatatttccgatagttttttataatattatttttccaaataaatgtaaaaatattttttattatttatgttttatttttccccattttattttctattgttttttatttttctcttttttattttgggttttatcttaggatttcgcgttgtcgcgacaaaaaatttaacatttctattccactaacagccccactaattacaaccgaaggttgtgagtttcattgattgtctgcctcaaaaaagatggtgtttaatggaaggtcctcaaggttgtcacacgcgaatttagaaaattagcatttttattgcaggcaattcatttagagaagtcattaatttatttgttatgaagttctttcattgaaattagtttaaaaaccctttcttgccgattacattctgttctaaattgtagcaaatgagcctatttttacaacctattgggcatttactataattgtaacctttggcgtttctaattgtaaaattaaaattataagaacagttttttcagtatctacgcccgctattttctaatgatattttttagccaaagaataatgcttttttgaggtatggggtgccattaaacaattggcaacatctggaatattactcaaaaaggtatccttctactagcttccattaaatctttgaaagaaattttcaattttttcaaactattttcataaaatcctaccgaattcatttttagccggccgattaaattttgactgttatatctgaaatgatagatcattaaatagaaaggaaggaaaacgtttgggctaactcttcgcttcttcagaagaaaatttattgatatcattgtcctatcagataatcgcggttgtagaatttaaaaaaacaaagcaaaagcataatctattaaatgaactaattaaaagcagaattttttaagaatgtgcctgaatttgtctattaatttgtggcccgttaaacatgttttttcaataaaagcacatcaattttgaaaaaggacctagtgaagaaatgcgtatcgccattgtttttatatgacaatttttacggcgactgcctgaacctttcttgaaatttgagaaatttgttcaattactgacgcctttagatgtacggctattcttaatatatagcaaaatacagaacattttaatagaatagaatattttttaaatagatgggcatttattgcgaatatttgataggcaaaaaatttaacatttctattccactaacagccccactaattacaaccgaaggttgtgagtttcattgattgtctgcctcaaaaaagatggtgtttaatggaaggtgctcaaggttggcacgtgcgaatttagaaaattagcatttttattgcaggcaattcatttagagaagtcattaatttatttgttatgaagttctttcattgaaattagtttaaaaaccctttcttgccgattacattctgttctaaattgtagcaaatgagcctattcttacaacctatttggcatttactataattgtaacctttggcgtttctaattgtaaaattaaaattataagaacagttttttcagtatctgcgcccgctattttctaatgatattttttagccaaagaataatgcttttttgaggtatggggtgccattaaacaattggcaacatctggaatattactcaaaaaggtatccttctactagcttccattaaatctttgaaagaaattttcaattttttcaaactattttcataaaatcctaccgaattcatttttagccggccgattaaattttgactgttatatctgaaatgatagatcattaaatagaaaggaaggaaaacgtttgggctaactcttcgcttcttcagaagaaaatttattgatatcattgtcctatcagataatcgcgggcgtagaatttaaaaaaacaaagtaaaagcataatctattaaatgaactaattaaaagcagaattttttaagaatgtgcctgaatttgtctattaatttgtggcccgttaaacatgttttttcaataaaagcacatcaattttgtaaaaggacctagtgcagaaatgcgtatcgccattgtttttatatagacaatttttacggcgactgcctgaacctttcttgaaatttgagaaatttgttcaattactgacgcctttagatgtacggctattcttaatatatagcaaaatacagaacattttaatagaatagaatattttttaaatagatgggcatttattgcgaatatttgataggcaaaaaatttaacatttctattccactaacagccccactaattacaaccgaaggttgtgagtttcattgattgtctgcctcaaaaaagatggtgtttaatggaaggtgctcaaggttggcacgtgcgaatttagaaaattagcatttttattgcaggcaattcatttagagaagtcattaatttatttgttatgaagttctttcattgaaattagtttaaccnccgccccccccgcccttcagaattttgaaaaaaaaataaaataataggagactcagaattttgaaaattttttataaaaactgatgacaagctaatgtgataaaacaggttaattcttttcctttcagtatccctgcaaagtttggggcgcttctgataagtttctgaaaaaaaagttaagcctaaactttttggcctgtttaaaaaggaattaaaaatttttaaaaatttattcatctccctttttgatagaaaaagcatcagagtgcctaaactagcatgtaaataaaatttggtgcgtttcagagcattttctgaaaaaaatatttatgaattaattatgcaaaaataaataaaaatttctaaaaatttgatcgtccataaataatttgtaattgatcaggggctcaccaaattttgcagggatacgtatcggaacactacaaatgcttactaattttcctagattttttaaacccggtgaaaattttttgcagacaccaccacttttgcacttaaaaaaatttcaaaaaactttaaaaattcatagaaaatttaaattcataggtactactgctaaatcaacgcagagacgcctttccttgacctttttaggcccctgcaaaatctggtgcgcttctgatcactactcgaaaaatgagtgattgaattttcactaaaaagttaagcctaaactttttggcctgtttaaaaaggaattaaaaatttttaaaaattttattcatctccctttttgatagaaaaagcatcagagtgcctaaactaacatgtaaataaaatttggtgcgtttcagaaccctttctgaaaaaaatatttatgaattaattatgcaaaaaacaaataaataatgaactctcttccttaataattttcctgcaccgaaggtactcactcggccgcttcgcggctcgggtgggggccttccccccccaagcaacagttggtcaatctgttgggtggtattgatggtaatggcaattagtgtcgcgtaaatcgggagaaaacgttttgatattttaataatttcttccactaatttcagatgcccaattgactgcctatacaaatttgccatcaaacaaatgtaaaaagattgaggaatcggatggcagcgtgttttacttcattcacaaccacgaagaacacgttaaaagccgaaacattgaggagaaacttcaattttgacagtctgttaaaattatttcatgctaacacaaattattttggtattagaatacttctgtgtgctccgatctgcttgaatatatctgttga

SEQ ID NO: 13301 - DNA, 857 bp, Heterodera glycines
gagtaaaatggacagacaagccatttaaggctaatgcattagctgactcgaaaagggacaaagcggcgaatcgaacgaaagaaacgaatggcgaacaaatgccattctcacggaacggaaaatgaacgaatggagcgaaataagcgaatgttcaataattatgcatccaaatagaacgaaagcgcagcagaaaaatagacgaaatggaagttttaggggggggggggggggggagcaaatggtaattagtaaagtgaacgcggcacttttcttttccatgccgaagagaagattattagaaagggagtgttgttaatcgtggcaataattataaaaaagtcatgtccattcattttctgttcaaaagcccggggcttctctcactgtgttcgttttatgagagaataatgagaaatggacaataaactcatttagggcctttgattaaagggggggggggaataatttcaaggggaagaattgaaatgaaaatgaagcaaagagaagaaactctccgctccgtccgttctgtaccgtaatgtctctgctgctttggcccctttctcttcatcagcgatcccagatgtgcccagtgtttgtctgatcggaagagcaaagtgccggctaatgggcaaattgcctttaaaaacccttcggggctattgccagcccattcgatgcccggacgaagcgatggatggccgggagaggaagaagcggcccttacccttttccatcgaatgtcttctgtccgccccttgccaaaaaagccatcgcttttccccccaaatatttcctcttctcctccaccatccccttccatgctactcttcctcttcctcttctgccgcttctcc

SEQ ID NO: 13302 - DNA, 2217 bp, Heterodera glycines
tgatggtcaggcggagtgaagaagccgaagtgagcttagtaaagacattttgtggacatttggccaaggaaagcatttattgaattttaatgcaatcaccgcttataagtgatttgcttttgtgcttttgccaatgtttggccactcaaatccctcccgccccctttaaattgttcaagttttttctcttaattgtgccgttgatttgccatttgtccaaggccattgtcaattccatgcattgttatcagccccgtttccatttggtcgtccatccgtcgcccgccgaatcgaacgctcagaaaaattggcttaaacgaagaacgtttgcttttccggagacaacttttatggcggtgacggcctatcagaatcacagagtaattccaaaagaattgaaaaaaggagggatgggaaaatgaaatgcctttccgttatgcgcaacccctaaaaatgtcataatcccgacaagggaaaacaaacactcttttaacactattctcgggttgttttaggcactaatcaaaaaccggtgggggtcgaatgggcgctgccaaatgggcgacgccgaatgggcgccaatcaaatgggctccagccaaatgggcgccattcactattaattatatgatggcaaatgatatcctaagaaactttgtgaaatttttttagccaaatgagttgaaatatttttctgggctatattaactcactgatcacgaatctgcaatcagattttacttaggtcatcgttaaggccttagaatcccttcgtatccgtggattctgaggcattgattctgaggagtcaggttcgaatcctttcagtgttaactatttttaatgcctttttggtcttattttcccatgcttttaatctgtaaattatcagggatgcttagggttttgtttaataaaatttttaaattaatttgattaatttttgacttttttcaacaatatgaaatgaaaaaccagcactatttgtgcacaaaattgtttaagtttttggtgtttgattcattccgccgttgggcgccaaccagcctccggcccttccccaaaattttgtatttgataaattatttgcatgcaaaacccctgatgttcaaaaatttaattagtttggagaaaaaacggcctggcgcccatttgattggcgcccattcggcgtcgcccatttggcagcgcccatttggcggcgcccattcgacccggtccgtcaaaaactggcgcaaaaaactatggttttcataatatgatttgtatttggttttaagaaaagaaattaagtcataccaattatatcaatcgattcaactcaacgagtggaatcgattggtactaattacaggttcctacgatttcttaatcaaaagttacagcccaacaacttggtgctgaaattgggcggaccaattttcaagtttagccaggctagacatgtttctggatttacaaaaaagagatattttttggcttctttcgaaaaatgatagataaaatcctatgatgaaaatcttagaaaaagcatcggtttttgcagttttgacttcttgattagcgcctgaaataatcttagttgtcgggggcacgacacttttaggggcgcggaaaaacggaaaattaccgaaaaagaacattttttaaagaaattacactatttttttaatcggttttcaaaacaatacagtaaccaaacgaccaaattattgaaaaagaaaatttcatcggttagctttgacccaaaacatggcattcaacttacatatttcacaaacattaaattctttttcttgccaattatttttagtttggccccggttaaagtgtcgtttaatcggtcgttcattccctaattaatgcccaatgatttgagccaatggcggcggcctggaaaatcaaaggaacaaaacgaaaataacaaaaccttttccgctcagatcaccgaattgaaaatcgaaagtaatcccttcgcaaagggatttcgcgaatgcgatttgccctttggttcgaataatggcgaaagtgacggaatatcgacgatggcgccgatcgtccgaataaaagcgaaaaatgggacgggcgcagcaatgcaatggttgctcaattgtccaattgcatttggacttattgtcaatgaagattcagggaatgggagaagagaaacggtcgaaatggtgaaaaagagggaaagccaggcttccagatctgagga

SEQ ID NO: 13303 - DNA, 3408 bp, Heterodera glycines
cctcctccgccactttttctatgatcggcgatcaccgcctccgcccgccggtgttgcctctgctgatcgcttttctgctgctttccaccacagtttcacacgcgctggcccagtggaagaacaatcaggtgaaaaagaagaagcgcaacaaatgacaacaaaaggcaattaagcccaattagttagtcaattaattaattggtggtggaacagcaaatgaaatacatagcggtcgcccctctctcttcccgccgtactaacggaaatttcctccgaatgaactttttcctatgaataaaaatataacaatttaaaattattatattttttcattaccacaaagtgctaaaaaatgggaaggaatgcattttttaaaggtacataaaaataattttttttaaagaatttaatgggaaattggtactgaactacacttactgaaattgttgatcattggttgaattatcgagtaattattagtttgtgaccattcatatatttaaatgtatcataatatcctgagggctcataaaccaattaggaatgattcaaaaagcattttccattaaattttgaaaaattatagccaaataataaattagacatatgactcaaaataaaattgcacctcgaaaacagaggacacatgagctcagctggctccgggacgacgaaatgcgcgctttggccaagctgaccgacgtgcagtccatctggtcattgctgcggccaatccttgtcgagcgccaagttggcactccgcaacacgacgcggttgcccatgtgagcaagttcggcagggtttttggttcatttcgttgtaattgccttggctacattaattaaggaattactaattaaagggagtgccaaacgttttaatcatattttcagctggaagattaaacaaaacatcttttggggccttattttgaacaaaaaaaggaaacgagttctttggagcattaattcggtttattcacaattcgcccgcttaaacctgaagagattaaagcaataaattggcaacaattaaacttttttatgctctcaattagcggcttaaagtgcaaaaattctacaattgcccattgtttcagtatttgaagacaaaggtggaggagttcggcttcaccgccgaatgggacagctttatggcacacactccgatgggggtgaagcggtttcacaatttggtggccactttcgatccgctcatccatcgacgactcgtgttggcctgtcactacgattccaaaattaattccggggtttgcacaaattaattcttggattaaaatgatgaggctaaaatttcgtttttctgctatttttattggggttttacctattttttagacatttttgaatattttacatttttaaattagtgtccatatttatccttattctaagaaatggaacagcttcaaaatggtccatttttggaaaaaatttgaaaaaaatacattaaaaaatgctcaaaaaaattctttgaaaagacgggacaaatattatatttttttgacaaatcatacccaactcatcaatctcacattacgtgccgtggcattttttgagttgcgcggtcttcattgtgacttttcctggacggattgggttgggtttggctgtctgttgggtttacccactttttaactagtgctagatttattttggcgaattttcattccgatttttttttaaattccctaaatttcgacgaaaaaagggatttacttgattcctttttttacaattaaatgattttatacatagaaattcgggcttcttttcattgaatggaaaaattaacaaaaaaaggccataattagtccatttttctattcacaaattcccccaaacagaaaagttttcattggcgccaccgattcggcattgccttgcgctttgctgttggacattgccaaaacgcttggccctttgttggcgtccagaacaaatcaggttcaagcaattgtgttttttccattggtgggggaagggatgaatcctgaaaaattctcaaaaattcctaatccaaaattttaaaaattttcagagaatttttcacgactctccccttcccccactatttggttgcttacttgagtttgggaaagaaaggtgtgagtggagtgagtgagtgggatgccgtgttcgggacaaacacaaaacaaatacaaattaaaatttattatttactaaaacagactttcaaattacccaaaatgcctcaggcatttaaaaacttttcaaattgcttgcattgtttgcttttgcatattattcggcatcatattaatattatttcactgcttctgctgacactgaattcgcatattcttctaactttaaaatgctttttagttttgttgcttttttaaatatttatatggcctgaatttcgcattcattgttcaatcaacttgattttgttcagttggttcgttttgtaaaagttccaattttacagacttttcgagaaaattttgtcataacttttattaatcacaatcaattaaaatcttgctatcatagaatatctcttggatagttctattaagcacaaaagattttcttttattccgtttcaaaatgattgtgaccaaaaagcccaaaaaatagccataactaactaaaaaatgaataaaattttcaaaaatttttcatgctaatacataatatttggttgtgtttaagaagagttatgacgattttttctcggaaaatcttaaaagtggcattttttacgaaagtcaatgattgccaaattttagaattttactaattgtgagcattctttttcaaaaaatttggccttctttccatctcctcatttgccaatttcctttgtttttgccgccgtttaccttaaaaaggaaaagcctttcttttcgagtcactgctttcccaaaacagcgccagcaattccaatttcggcaccctcagcaatggccagttggcccaccatcgtcgccgacttggccaaacattggccaccgtcgtcgccggcggcgggcgacactttttgtgccgcccccaccgccgccaacatccagcggtggcggtgccattttagcacagttgccacaatcgcgtgccagcgttgtgccaaactcgtggccgattccgccacagtcaccaccaccaccagcaaacacgaggagaggaggaggagaaaaagtggattcggtgacaaaactaaaagactaaccaaaaattcgaattaatacacaaaataaaaactaattcctgcaaattaagaattgaaagtaacaaattatcaaataagtttaacaataaattttcttaatttcgttttcggcaatttatagaaattaaaataacattagacaattgaaaaggccacttttctgctttttcttagtctttcgatgctcgggt

SEQ ID NO: 13304 - DNA, 1123 bp, Heterodera glycines
  unsure (1)..(1123): unsure at all n locations
aaattaanttgactataataataatatttaaccatactgtttataattttcatgattttacgaatgaagagataatttattaaaatatgtattaaactaagttgttaattttcaagtcattaaataattatcaacattgataagcgatcttaatttgttcttctcaaatacatattcatatagaaagcggtcatttgaccaggtcatttggcaatggttatttgacccggtcataactcccaaaacatgagaaaaatggcagcaaaaaatggttgtaatttctgtagtatttaaaaaataaaaataaaatgccaatttcattagttgcctacaaattaaaataacataatgaaaacttaaaaactaatctaattataaaaaaggaatcattgaccttttaaacatataagttgttaaatgaggataataaaaaatttattttatgaactattcaacaattttctataaccgattagatggaataatgaatattttatgatattaaatatgtacattcaaaaaatataataaaataaaaaaaataggtacatatttcaaataattctaaaacaaaattatataaacatatcaatattataataaaaggtagaaaattgaacaaatagttaaaatataattaagcaatttatataattacttatgaactgctcctcaactttgcttggaacgcaattgacttagagtacaatgcggcaaagaacaagaaaatttatttttatcttacctaaatattcaattcagataataaatacattcaaaaataaaatataataaaaattaaaaaatgcaagtaaagtaatttttaaacaaaatatataattaaaatagaatactttaagaaaaaaaaaagacttgatgcaaaagattaaacagaataatttaaaatctaattcttctttcttatggccaaaaggttgtaaaaatctttatttttaaatatgaatacggagaaaaattttatttaagataaaatttatgtgatggatatataaagataaaaatttaattatatttttcaaacctcaacaatagaagcaataccagaaattttaaaataaatataatttataagtagggttcgaagttctatgcagtataaaat

SEQ ID NO: 13305 - DNA, 2477 bp, Heterodera glycines
accgccgtatgggggagcgcctcccgccgcatacgaaccgccgtacgggggagcgcctcccgccgcatacgaaccgccgtacgggggagcgcctcccgccgcatacgaaccgccgtacgggggagcgcctcccgccgcatacgaaccgccgtacggaggagcgcctcccgccgcatacgaaccgccgtacggcctcccgccgcatacagaccaccgtacggggggggggcgtctcccaagcttttgacgatgtcgacaacgcctttaaaatcttttgatttcagtctttgtctcggtcttcgagactttcaagactcgaggccgagactttattaaacctattttcttttaatttttcaaaattattcctttttcgatgggaattaaatcatatttttaacatttaaaatcataaaatattttcatttttggcccaaatttgttcacaagtgtacaaaaaatttcaaaattttcgccggccactccccgggaaattttcggcatcgaaatcattaatgaaaacttaccgctaaggatgtggaatttttcggccggtggagatcgttggcgaaaggaacgtgagggcgaggcaaggcgacgaggcttgatacgtccacgtccaatgattcccccaacaagcaaactgaaaaaagggcagaattgtattattcgaaaataaaacgccacccccactccctaattaacatacaaaataaggaaaggaatccaaatcttcattgaaataaagaatataaatatttataatatttattcttaaaaaataaatttcaatttaattgaatattttatttaataaaatatttgactgaattattaattttcgctgattgcggtggaggtgggtgggtatcgctaatagcgaaaacagcccatggggtgaatcatttttgaattcacaagtccatcaatgattatgttctgggaattgatggctaacgatattcaaaaatgaatgaatcaaaaaaaagcaaaaataaattttatattaacatatttttaaaggtctttacgaaaaaagcaattaataaataaaaagtaaatctgtacaattctgacatatttaattgagaaaatgaatagaataaatttaattaaaatttaataaataaatttttcgatatgtacatttataaaaaaataaattcaataaatggagcgcattcggacaaaacgagaaagtattaaaaccaattagtcggaattagaaaagttaaaaatattaatagttagttattatcaaaaaaaaaagaaaaaaagtatgaaatttatttgaacaaaatttttatatttaccaaaagttttatttatggatatttacgttaaatgggaaaatgaataataaaaaaattaaatccctcactctcttttcatcgtcatcattaagtttgcattcgtttctcaatttttttaaaatcttttaaaaattctctgtttttttaaattttctttggacttaagctctcggttctcaaccccttaaatgctctgtttttaattatttttagcatttggatgctttggcactttcgatgtcgaaagtcaggcggcacggagcagcacatcagcgagcaaacgtcttaataagctccacatatttcttcttgtgtcaataactcttgtccaaacgaaattttaaaaatttttatacaaactaaataagaaatataattatcgaaaatgtgaatttaaaaaaaaagtatggaaaatgccaaagaaattgaagaagctgtgggttcgtgagagagattttatggaactgattttatgattttgaaaatcttttcgattgtatctttgcttggaacatggcgaaataaaagtacgaattggcacagtagaacattcgtaaaatattccataaaaaataaaatataattcggaaaatatgtaaaaagaaaacagaaagaaagccattagaaaaacggtgctatgtcgttacataaaaaccatcaaaaagggcgttatataaaaaaccatcaaatgaaaatttccaacaaaaaactgcccataacttttgacaaagccaaccaaaaacttcaacaatcatggtatcattcgaaagccctagatgtttagaagatatttataagctatttctcagtgattaatcagctctcaaaaaagttgtcagttgaaaaccgcaaaaaaggcagaattttcaaagttttttatttctatctttttttatagttcgaaattttttgtaatttttagtaggctaatagagcctgtgaagagctttcgaatgatatcaagattgtttgattcggtcaataacttcaagagttatattgactcaaagttggctcagacggagttggccagacggagttggcccgttccgctacttttaacttacaataatattaaaaatagaaaaaattctatccataaaatttggtaattttctctggggagattacataaatcatctattaatcattttttattataaa

SEQ ID NO: 13306 - DNA, 3372 bp, Heterodera glycines
  unsure (1)..(3372): unsure at all n locations
tttatggaaattcatttaaaaaatttattcatttacagtaaagcaaaaaaaaaagaaaagaaaaaatgtgccaaagtgagttaagaaaagtcaaacaaacctcaaaagaaaaattcgaaaaaatgaaaacaataaataaaagcaaagcagtaaacgaaaaaacaaacttctagcaaaaatacagaaaaatttacgtaattcttttttttaaaaaaattattcatttaaagaaaagcaaagaaaagaaaaaataaaaagaaaagaaaaatctgccaagtgaattaagaaaagtcaaataaacctcaaaaaaaaatgcaataaaaaaaaagccaagcaaatgtcaacgaaaaacacaaaattatggaaaaaatacagaaaaatttacgtaaattgattaaaattttttaatcatttaaagcaaaataaaggaaataaaaacggtaatggaaaaaatgaaaaaatgtggcaaagtcaaagaaaagaataattaagaaaagttaaacaaacctcaaagaaaaacacttaaaaaatgcaaataaattaataattatacatgaatagagaaatggaaaaccaagagtacaaaatcatcccgatttgaaaattaaggaaaattaaaaacaacaagggaaaaaaagtctgtatggcgtatgcatttttttttgatcattcaatcgtgctttttttttttgcgcaggccaagcagttctgtgttgagtgcgagcatccggttgaccggcgcacgcatccgctgggctgccgcgctgtgtgtggcctgtgcatgcgctacgacgagctgcgcttcccatgccggcgccagggcggcgacggcagcagtggcacgttctgccaacagtgccgcttcgtgttcccgaacgcggactgctttgaggcgcaccgccggcgcgtggatgttgcgccggcaccgcctccgggcgtcgccgccgctgccgccgctgctgtgcctcacggtggtgaggaagcaacgggtggagacggtgacgacgcggtttctttagctgctgctgttggcgccgctgtcgcgccagcgtttgcggaccgccgtcgcgggcggccccaccgttcaatgtgtgaggagcggcgcctgtgtgagtggtgcaatgtggttgtgtgggcgcgaagcggtccgcacgtgtgttgccgccgtccgcagcagcaacagcagcagcagcagcaagagaatcgcgcagttctgcagcaacaacagcagaaccaccaccatcagcaaccgtcacgaccaaaatgtgaaaagtgcggcggtccacacgatccggaacgaacgccgcacttcatccagcccaagcagtacgcgcgccagtgccagtggcgacgcggtgcggcacgtggcgcccacgacaacgctgacgacggagccgttgctaatgctgcgactgctgttgaggatgacgacgatgatgataatgtcagtgaagaggaaggggcggcagctgttgccgagcgtgatggtgctggcgatggcgcacgcggacgcgttcgaaagccaaagccggtgcgcttcatcttttgggatgttgaatgcgcacaggagcgcgtgggtgagcagcaggagcagctggaggacggtaaccaattcgtttttaaatgatgatgattatgcggctttgcttacgcagacgaggcagaggcggcacactgcgctggcgacgaggcaggtgcaatggatgcagttcaacagcagcaacagcagctgcctgaactgttgaagcacgtgccggtgttggtgtgcgccgaggtgatctgcgagcgctgcatcgcctacggggtggacattgagcgtgagccgttgcgccgcgcgccccagtgccagtgcggtgtcccgtggcgtggtgcgaaccggcgccggtggtgctctcgcatcggcgaggagctgtttgacgacgacgacaccggtggaccagcgaccgcacaacaacaacaacaacagatgccgccggatggattgaacccgcggcggctgcgcttcttctgcgacggcgagccgggcaccggacgtggcgcaatggcccaatttgtggactttttgctccacaccggccccaaagggacgcgcaccgtgatgttggcgcacaacggggtaagagcagcgagggggtggggggtggcaaccgattagtagtgaaaaaaataacatttttcagggtcgttatgacgttcacctgttgttggaggagttgcagcggcggggcgagcggccaaagaaggcggttcagcacgggctgcgcgtctacatgctggagctgcgcgggacgcaccagcgccagctgatctgcaaagactcgctgaacttcttccacgcagcgctcgccaccctgccgcgcacctttgggctgcacggggtgctggacaagccgtttttcccctaccatcacattcgggagcagaatctggatgttgagctgccggccggcactctgccaccagcagcggcctacgacccggaccggatgcgtgccgcgcagcgtgccgatttcatggcctggtacgagcgcgagctgcaccggcccggacggcaaccgtttgtgctccgccgtgagctgttgcgctactgctggaacggttagttgttgtcggaaatgggggtgcgggagtggtggaaaaatgtgctgtgcatacagatgtccgtatcctgcgtgccgcctgccttcgcttccgggagttggtgggcgaatgcgcggacggcatggagcccttcctggcagccacgaccattgccagcctggcgatggcggtgttccgccaacaccatctgcgcccgcacacaatggtccacacgccggagggcggcttcctgcgcgggcgtcgcgcgtcggccgagtcgcgccgcttcttcgcactgctcgccgccatgcgtcctgacttgggcccgttgcgcaccgcccgctggtcagtcggagagatggtggtggacaacagcagctggggcggcgacgacgacggtttccgcctcgactgtgtggcctacagacggccaccgttgcgtcccctctgcatcgagttcaacggctgctacatgcacggtgagtgttgttgttgttgttgttgtcaattgcggcaattttttcccaattacgccattgtcttcaggctgccgtgaatgctatccggangcgtgagatggtgttggccggtgggcgcagcgcaggagctgctgtgggcccgcacccaacagcgggcatgggagttcgccgagctgccgggatgcaggtgcagtcggtgtgggagtgccagtttcggcgcatgctgtgcaaaagcccgcggatgcgcaagctgtacaaggagcgctggtggacgtccggtccaatggttgcgcaagcacgccctgttcggtgg

SEQ ID NO: 13307 - DNA, 1652 bp, Heterodera glycines
ggtgggcagggggtgggcagggggagtaggcgagaccttccgggggagggagagggacggactaggctcgaatgtattcgtcacataaatgttgaatagtgtcaacggcgcgtttcagcagcagagggtcgcgcactcccgtcacaatcacggtgccggagatgaagaaaagggctgtcaccacaaactccgcctcacccatgctcccctcctccgtcccgcccttttgttggccaccaatccgcaaggcgcagcgaaggcctgggaatgtgcacagatcaaggcacgcgcgtgccacccccacaatctgcccggccaaattgttgttgttgttgttgttgttgttgttgttgtcattgtcatttggtcgcttcccactgatggtcatacacagcaaaagatgctgcgccatcccctcaatgttcaagcggtagggcatatgaagtgtggagaccaggttgcgcaactgcaccccattgacgcgaagcgagcggccgagcgtcggaaagccacctcgccggagtgcatcggcgacacgacggcacactcggtgcgcttcgtgccgacagagtacgtgaattttctgcaccgcaacaccaccaccaccaccaccaccatcaccaccaccaccgccaccaccaatgccagttagcaccacacgcccgctttggaaaataagcgcagttgtggtgccagtgatggtgttggttatggtgttggtggtggtgacggcggcggtgctcgtggtgctggtgctggttgaaccggtgcgcagacgcatcacaatggcgtgaaaacggcgagggacatattcggtgcacgcaccgttgcgtgccaatgccaagaattggtcgcgggtaaagcgctgttgttgttgttgttcttgttgctgtcgtggagatgaggccgcttgagcgccacacgatttgaaaagagaaaatgtgctggtactattttgcacaaaatatttcattttgatataaccttgcttaaaatcaacaagaaattagaattttatctcaatgtgattgacgcatcaaaaatgagagaaaaaaatttgtatgcatgtcaattttcactcatcatctgcgcagcccgcgctttcctctttattgtcctccgtctcgttggggtccgtgggcgatgccaccatgacgtgcacctgcacacactctagcggataataggacatgtgtgcgccaccaccgcgctcaaccagcgccggcaggtttgggtggcgcaaacggacaccgtgtttggcatagaagtactgacgcacctaggcaaaaacaaaaaaatgcgcgcggtgcttcttcaaaaaacattttattaccgtgaggttgagataaccgccgcatgcaaaggtcaggttggtgtttagggcacttagcgcgtgcgcatgtagcgcaatgttgcgctcgctgggccgcaaatggacggtgcgcagcagacagcgctgttgcagatgggccagcatgtgcgcacgtgggcccttggtttggagcagcgtgtgaagctccctcacactacacccattgttaagcccacacaaatagtcgatgagcggaagcttgagcagctctgtcgccgcttgttttcgtggcgggctgttgcagttgttgttgtcgtggtggtagtggtggcgcaatatg

SEQ ID NO: 13308 - DNA, 3170 bp, Heterodera glycines
cttcctactttaaatttttagtaaaatttaaaaaatcgtttaattatgatctttttttatgcatttctgcctaatggttaatcccccccccccccaaaaaaaaaaaatttaattcctgaaaatggaaaaaaagccttgactgatcagtcagtgcgtgattgattgactgatcacctttcttcagcttggcactgaattcgtcgctcccagtgatcagtttaatgaattgttctgtctgaatttcttccaaccaacggatggtttcgtaatttttctccatcatttgcgacacttccgcgtcaaagtccacgccaatttttggactcattggcttaaaacatttacgcaaatcatttgacaatgcatcaacagacttcatctttttgcttttcagtacctagcaaagacaattaaaagttgagtgacattggcatttgttagtgccaaaattgtttttctattgggttgtttcacttaattatttgtagcccacacaaacgaattcataagttttgaactaattaatgtttcttgtttattgaataccatttaaaaacaaaatgtggacccttagtaacagggatgtttcggcatgccgatttccgacattttcgggctcgggattccgatttcatttccgaatttttttttggaccatcggaattccgattgctaaatttttgagccatcgtaattctgattgccgaaattttttcaaccgttggaatgccaatttccgattaccgaaatgcgtccggcacacatccctgcttatttgttagttagtaacagcaccctttctctcagttcaccttttccacaaaacttttggacgcttcaatcatcgaaatcgattcaaaattcttgattttccctaattgctcatcctcatcaaagtcataggtattgtagtacaaattaataaataaacgtaggccctcatcacacactgttgcaagacgttttgccaaaacggtggtgccattctgttttatggcatccttaattttggcatccatccaacggacaaatgctattatattgaagcgcattgcagcaataattgacagggaaagatcgtcagaaaaaaggacatcaatggcattggtaaaaaacaactgatcatcgtaaaacactgaaaaagcattaatttttaatgaaactcgaacatctttgtgttcttgaagtttttttttatttaactcaaaacattttcggaatttctaaaatccatgcatcccgcgcgggatgttacaaattttaaatacaggatttgcgggattaacccacgggatcccgtcccgcaaaaaaaaaatgttgcgttcaagtcccgcagcgggatccgcaaatttgaaatttccgggctcgaataatttcggcgtcatttttgtttatttattttctgcttgttccagtttttctaaaattccaggctcggctcaagccaatatttttttttaatcatagataagctaaaaacgatattcattccaagtaactaatagaaaattaaatttaaaaataaaataatataaattaccatccgtattatacaatttaaatggccctacacattgaaacatctcaacaaatggcacagataaaatttggcacaaataatgttttagcctcgtataagcgccctgtctctctctgatcgctgatcggaattgatcattggaactcaaatttgtcttcaccagctcaaacaatggtaccatttttctggactccacaaatgcattttcgattttctgttcggaattgcatgccaacgatgggtcccattttggcaacattttcttgctaattattgaagaaataatacataaaactagagttgtacgggaccgggacctggtactgaaaaaaacgtacaactgagtacctaagtcccggttttgaccagttttgaccgggaccgggaaaagccccggttttttcccggttttcccagccaaaaagtcccggtttttcaacccgaaaagtcacggtcccagtttatctcaaaattcccggtcccgtacaactctacccataactcgtcaaaattgttcaaaacaacaacaaacttgaaatgggataaatatgacgttaaaaagattaagctattctgaaaaaggagaagctgtgaattttttttaacttgatacgctcagataagcacgaaaaacacaatttcagcttgatttggattgtctagggatgacttttataatgcctatttttgtggctattttctggattttcggaaaaatccttaataaaaatttaaaaaaaatgaaaagtacacccctaataaatgacccaaaaaaattttcagaaaaagattgattaaaatattcaatgactaaacgacctcgctctcaaagtgaatattcgccaatgtcaaaacaaagcgacattcaccaacttattgactcacaaatgaaatttgccaaaaacaccattgatgccctaaacaaactccaagattccttcacccttgaccaaaagccaattctctcccacttaatctccaccttgtcgactcaatttgaccttttgaactcatcgattgttcatctccgctctgctgacccaactcaaaaagacgtgcccatttcagcagaggagttagaacgacaaagaagtgtcgtgataataggcctgcctgaacataatgacatttcaccatctaagcggggggagatggaccggtccaaaatcaattgtctattcgattcgctggggatcgaatgcggcaccatatcgtaccgaatgggccgtccttacaacccagcacaaaaaagtgcccgcccactcaaagtgctcttgccttcccgtgcttttcaaagacaagctcttgtggaatggcggaacaaatcgaacacaattcgtagcaaagacccatcgcttcaaaacgttcgcgtccgcgagtcattgaccaaagcacagctggatgaacggcgtcgtcttcatgcacagtgtgtcgaaaagcgtcagagagacggtcaggattggattgtctatgcaggaagcgttatcttacgggaggaaattcacatttttcggcgtcaaatgatagctaccgattctcgtaaaaattgactcaagaccaaatcacctaagcatttctcaaaaaattttcaaaatttaaattgctgcttaattaatattaggtcaataat

SEQ ID NO: 13309 - DNA, 1528 bp, Heterodera glycines
tttttccactataactttttttctttgttatccaaatccaacaatctttgtatcattcgcaagctcttcacatggtctattagccttacaaaagcgagaagattttcaagcctggaaaactttttattaagaaaaaccttcaaaatttcgactttttcgcaattttcatgtataacttttttggtaattgtctaatcgcgaatccatagcttagaaaaagcttttaaacatgttaagctttcgaatgataccaacaatgttgaatttggatgacaaagaaaaaatcatagaaagttataatggaaaagcatgctggcgcccaaccgtgtgcgcccaactgagctagaccgcctagtttactttgttttggcgcttttagccagctttgtctcactttctgccaaaaaattgttcaaatgcagcagttggcataatgccagacgaaatgtgtttgaatgaccaattttcatttggccataaatttgatttttgcctgccacaattgtgcgcagaaaatattctgaaatagcaggtgtcgtcgaaaatttgcacttgccatttttcaaatttcgttcaaaatcattgaccattcttaacaatgttggcgtaatgatacgcgcttcaaagccttgcgacaattttgaatcgattttgtgcgacatttgttcaacaaaacaactacagtatatggctgggtttaacatttctgaaattgtattcatttttggatttctaaggcaaaaaatttcacgaaattcgagacccaaaaagtcaagtatcaatgctttagctcttttttgctaggtcgtttcataaaaagttgcacaaaatgagcgtttcgtaaaagtgccaattttatcgatttttagagaaaactcaccattacagtaatttcattttttttgatagcatatggtagctgttgttagcgtggaaaattttaaaaaattttttattttcatgaagttgtgaccaaaaatgctcaaaaattaattttcttctgttttaagaaaagtttttagtagggagtaatttaaaaactgccaaatagttaatttttaggttctaaaaaaaaataattaaaaataggagctaaaaatgggaaaatagttgcgaaaaactcaaattaggggtgtaaaatcgtaaaattatccaaaaaagtaacaaattaagccaatcagtattgagataatttttaaattaaaaattcttgtcagaaaataataaataaattttggaaattaatttttaaaaaatttttcatttctcagggggtatatttttctgaaatttttttgggtcgtttcttggggttttttttcgttttattgcatttttgttaataatctttggcaaaatgcctaaatagttgaaaaaagttttttaatttttttttaggttttttggtgcaaaaataaaaacaaaactatgaatcccatcccggttatgacaagtttttctcgaaaatctgtgcaattggcactttacgaaacgcccataatggcgctttttcagggctctaccagaa

SEQ ID NO: 13310 - DNA, 2422 bp, Heterodera glycines
taaaccttaatgaatttctgtatcccaccgtaacccaacaaaagtatccaaatttgtcgctcattctgttgactacggtatttcatagaagcaacccgagaatatatcatacttttcgggtattaaaaatgagttcgggttcgacaatccctgcccccgcccaaatgccaaaattatttcccgctcaaaaaaaagcaggtacggcacctcgatcagcttgactacattgggatgtgaaagctttttcagaatggcaatttcgcgctggacaagttgaaggggattacgatgaaccgccagatgaagcggattggcattctttttgcgaatgggcggcggcttgaagcaggcgtagtttttgacgagctgaaatttgaaaatattaaattttaaaaatggaaaatttaagaaattaaaaaaaaaatttttttttattcgaaaaagtaaatgaattttacgcatattataggaaaaaacacccaaaacttagcgtaaggaatgaaactaaaaatgacaaataaatcgccaaaattaatgttaaaaatgcaaaaaagttttaaaaatgattacttaaattgcaacagaaacaataccggattttctaatttaaaattgctttttcgaaactcaaaaagtgccgaaaggggggaagaaatgaaaaggaaacgaaatttcgtccattcctgaatggcatgggttcaccggttccccacattttttcggcttttcctcgctttttgtcggctttttcccgtttttatcttggccccaattaatttttaaaaatatatccaaaaatttgtccaatcactttcaatttgtcgagcactttcattgcgtacaaatttttgtcctgctcactgtacgccagcttcacaatgccgtaactgccttgggcaatttcttcctaaatttgcgatttcaatttgcgctttttgcgccaacttttgccgcccgcccctccggcgaaacaaatgaaagaaaaagcactgaccattagccgatactaaaaagggagacaaaattcattaatggactgagcaagaacaggtaaaaattagaatatttgagaaaaagaattgttaattaaaatgcaattaaaaattaattctcaaaaaattattcttaatttgagaagtcgcgttaagctaaattaggaggcaattaataattaatgaaataatcaaagataatgggcacttaattgcatatagtgcgaagaagcattgttttagtcggtaattaattccaaaataatccctttcactcgaattcgagattaaacaaattaaaaatgtagttaaagggtaattaaaaataattaacaagtcattagctgacaatttattttgtctaatggctcgcctggttcagctgaatgtacgaactctcggcaccgtcccccgtctcgacaggatttgtctgaaaattaatttttgtttaaaattttgaatcaaatttatcaagtataaagcagcattgtatgcttttgtttgtgatcagctgcataagtattaacgggatgggagatgaatttccaattttttaattcttttcgttttttttctcccggttttcttttgtcctaatcattcccgggattgaaatcggtagttgatcaagaccagacagaatcaggctaaattctgatccgacaataaaccccgggacggtcccaggtgggtggggggaggggtacacagagtatttatttacccacccccgttctcccccccccccgacccaagaccattccaccccgaaattttaaagaaaaaaatagtatttttgttgaaaattttcaattttctttgggtagaactcggaattttttcaaaaagatcaagattacgagtccgggaatctctacatgagacgcggtcaggctctcgtcatcagattgggttctccagtctcgagaccggtccgtccggcgccccgccccattttattcattcattcctcgcattcctcgcctcacctgaatggtcggcggggccaaatcactgctcattttggttggtcgaagcaactgtggagaagcaaacattttggcacaataaattgggtgcataaatgcattttttgctatttttaaagccaaaaaagtgaaacaatcaaatgggacaaatggccaaaatcgggggacaattgccagagtgttggacaaatggccaacaatgataaccagcaggggaatattgacatatttgccaaaaaggtatgtcaaccggaagacaaatgttaaaattgtgcgacattgccaaggtgggacaaatggccaacaaggctggccagggcggaatatggacattttaccaaaaaggtatgccaacaggaggaaaatggccaaacttttatcaaaaagagaggaagttggccaacggaaggcaaaaagggttaaaataggccaaataggcaa

SEQ ID NO: 13311 - DNA, 4658 bp, Heterodera glycines
ttgtgggctttggaatggtttgatggcctagggaaggtctggagaaaataaacaaataaaaggtttcttcccgcacaaaatgaaaattcccgctaaagtgacggcatttaaaagttcgcgcattcgccgtagtgattcccccttcgccgaagccaactccgtctttttcccccattcgctcgtcagtcgctatttccggcaaagagttccgtgtaaaggggcgggaagctggcgagcacattggcctggaaatgattgcaaattcacattttcagataaaattcgggcggtgccgccaacctccgcggcgcctctgtccgtttggtgttcgctttgctggtccaccatttgtaatcggaagcgtcccaaacatttgcgatgcgtttttgccaattcccgcaggcgcggaaggaactcgagcagttggcgcaatgcctcgtccccgtccggcatccgctggtgcaactgaccccccaaacagctcttcaactgtcccacaaacgcttccatgccgggcgcctgggattggtccatcagcacaaaggcggacaaaagggcggtttcagtggaagtcaattggaatgagctgaggtactgaagccgactgataagctgaaaaggaggaaaaaaataaatgggatgacaaaaagggaaggacaaacgccaaagaaacaaatggcatattggacaacggtgtgtttgtaaaaatgccaattcgtatagtttgtttttttaataatttcaattaaaatctagaatttttccaaaaaattagggatggattttttctccagaaggttgaaaaatcatataaattttagctttttcgaaaaaaaatacattgttgttttttagaatggttttaattgaaatttaaaaattgtgtgtgttgcccattgttcgaaaactgccattgacccatggacaacaacatttgaacatttgcgagtcgcttttcccacctctttgccaaattcctcgtcctttctgtccgaacagcgaaattggtacacgggcagcaccaaattgttcacatgcaatgtttgactttgctgatgatagtgctgaatttccgtcccgtttcatttaattttttacgcaatttccccctttccccacttgtgccattgcaatgattgccaagtcgaacgttgtctttttcaatgcgtgtattttgtggtcctgctccaactccagaaactctttgaccattttggcgaattcgatgatacatttggtaacattggtcaactcattggcgaacttcagccacccatcggcacggttctgaaaaataaaaaaaatagaaaaacaatgcagcgatcttttggaacttgaaaaaatttagtaatttatcataaattttgaaaaagcgcttttcttgaatttttttttaatttttcggggaaaatggcaaggggggggggaaagagttgctcctgcagaatttagtcatttggactacaatatgttttgaaaaagaatctttgcttgcagttgcctttccctctgtaaacgataagacccccccccccccccctaagagaaggcgcctttccaaccgcacccttcgcccgcctccattcatcacataaacgcatccccacaagatcgaactcaccccccccccctacatcccccgcttcgcctctccagctcaactcatcgaaatctctccaaaattgccgcccaaggacaccaacagtcggagggtggcgcgacaattccccttcccaaaacgcatttatcccttcgcgctgtctgatctcccactgccaaaagggctctgtcacgcactggaactcactcactctgggcccatccaaagcgcacctttgaatgatggttatcaccaacgccgccctcaaacagcgaaaaccgccgccaaaatcaccccccaccaccacaagcaaaacaacacaaatcaaacaaatcgaatcgcatgcaaattcaaaaatgacaaaaaatacgaattggcaaaagacaaacaaaaatgaaaatagaaaaacggccaaacggaccaactgaccatgttcatcagccggtccaactgttgcgggtcgaccattgtgccgaaagggtcgtcatcaatcggcaaatggtggttcaaataggcggaatacgcctgctcgtaggcgaagtccacgcgtttgatcagatcgtcgtccacagttgaggagaccaaactttggttgttcaacggagcggaagcaatcgacgaatcagcagtcaccggataccccccacttaatcagacgaaaaatatgcaaatgatagcaaaagattaaaaaaatgccgacgcgctgacctgctcgatggtacggcagcggagtgatggatggcaccggactgggaaaacactgccgcatttggcgaatacgaaatgggcgccaacgcatgatggggctgctgttggtagagcagtggcatggcggaggagctggattggcctggacagtggcaaaaataaggccaaaaggacgccattttcgcactgaccgtccattgtgtggaaagagggcatttcctcctcgtggtacgcgttggactgatggaccaactgttgttgttgatgttgttgcagttggtggtgggcgtggtggggatgggtgcccgggggatggccgtaatacaacggcagaggcaaagaagcggaggaaacattctgcgcattgtttgagggcggcgaatatttaaattcctgctaaaataaaacatgaaaataagcaaagcaaaggaatgttgcaatatgaatttgaaaatgatcactcactttgaaatccctgcaaccagccgaactggcggaagatgaaccaacgggtgtactcggtccgacagacggaggagcggacaaatttgggtgggactgttggggaggaaaagcaccgggcggggcaatgacggaagaaccggccggcaacgtggacagagcacagaattcgccgtttcgctgtttatggagacggacctaaaccatttgggatgaaaatttaccaatgtaaaagcaaatgaatggaaatcattgccacgaatgcgacaaatctttaaagctatcgttcgcttatcactcactcacctcatcttcgaccttttcccgctgttttttggacattcggccgaatttgaccgcctcccggctcattcccaactccaaacattttttaagccgacagaactgacatcggttgcgactgactctgtccaccgtgcagcacttttgccgcgcgcattggtaattcaccggggcattttgagaacgacggaaaaagccctgaaaagttgacaaatcagtaatgaagagacaattaatattgatgaggtcattcaaagtaagggaatattatgccaatttaaataaagttccgcactttgcatccttcgcaagtgatgacgccgtaatggacgccggaggatttgtcgccgcaaactttgcatgggatcacttcaatttgcgctaaatatttaaaactatttacatatgcacttattgttaggaagatgaatttaagtggaaaaaaccaacagaattgaaactaaaaaatgcacaaaaaaaatcggattttaataataaaaaacgggagaatcccaaagggcaattttactgataaataagcacacccattgctaatcatttatggggtaattctgtgctttcccatgaaatacgcacgttcctcgccgggtcctcccgggtgcacaatgcgttcgttggacttttttctgtaagttgtggacaacactcccccgggcaataccgtcggggaacactttggcctatgtttggccgactcggcaatttgcgcggcattgtcaagttgtcgcaatttattattcaattccgtcgatgactgaaacgaatgtgccgacgaggaaattgggtaaatgacagcagcagccgactcaacgacacggacagtagcggacgacgacggagggaaaagcgcaccggaaacatcgcttcctccttctgagacagcgaatgccgaaacagttgatgctgacggagagtgcggctgaggtttgggagaaggcaaagcgatgttctgcttaagctctgacagctcgtgaaatgtcgaagcgatggacagcgcggttttgcctggcactttcgcctttttaatatttgaaattgccctaaggccgtcatccaaaagtaacagatgagaagaatgtctgagttgttgttgttgcgcctgctgatcgccatggattcgaattgaaagcgatgaaaaggacggtgccgctacagaagctgtatcggaagatgtgatcgccgatgaaatgggaggagaaagcgcggttttggacgaggaatgggaatggttgataggaggggcgaagcgatgatggtccatcgtggtcacacaaagccggggtcaggtcagccagaggtcaagacaagacgggaaaggagtgctcagcagaacgaggatgaacggattgaggagggatgaggcgacacaattatatttgggtcacataagttggaagtgggccgagccggacttggtttcttgccgctatgatgtgatgtgtggtggacgaagcaaagggacggacggacgggtcgaaggtcagcgaggaaaggacgccaaaaacagaaagaaagacgaaacaaaacgatgaaaagagtgggagaggagaggaaggagagagaa

SEQ ID NO: 13312 - DNA, 2253 bp, Heterodera glycines
  unsure (1)..(2253): unsure at all n locations
aatctgatatttttgttgaaatttgatactttctgacaagtggatcactcacccactcactcactacagtaggctcaacatttaaggagttacagtaggcagcaaaggtttaatgtgttttttgtgcaattcaacgatttatgtaaattttgtagcgtagcatttttctgtgatataaattctttttggcatattaacttctacaccactaaaaattggggtgggtgctgacaaattggaaaaattctgtggtcagacactgttggatatcaaaaaaaatacttttatcgtggtaaaaacaaaataaaacgcattaacttttgctcccaaacttaattgagttaacatttttttaaatttttcttttttttattgtttaaaataaaaaatgaaaaaattgcaatttttagttagcatttttgaggactttttttaaataatgaaattaattgagagagagcagaccgaaatttctacaaataaatttaaaatgaatttttaaactttttgaaatgttagccaaattccatcctaagcattatataaaatctttaataaaaattttaaaaaattaaactgttagtcacattttaagaaaaaaaaatttgatataaaaagtaatgaattgatgaatattttttttgtaatgatcaaagttcattgcgtttcaacacaacaatgcattcaatcttagtaatttcatctaaatatgaaacatattattaacttaaatgaactttcattttgaaatgcctcggtttccattctcgaaaagttcataacgcccacgggcattgcattccaacgatctgatcacatttgattgtccaaatcgctccataaatgacgcacccatgttcttgtcctcattgaaccactaaattatttgtgccatgaaatttatttagcaaattctttggcaccacaacctaaatgaatccgttttagcaaaaagtttctatcgcaaaatattctcgacaaaatttttactattttttcattgattttggaacttccaaaccccaatttgcttcattttttgggataataacaacgcgatttatgaaatttttgaagccagcgaatgatatttttcaaaaatttgcttaaataatcattaaaattttaaaaacaaatatccttgcttttttgcaaatcgataattgagttaaatcaataaattttaaaaaatctattaatacctgtataattgcttctgtctcctgttctaatccgcaagtgattgtcaaacggagacacccattcccatccgtccatttttcaaattttgtatattcctcgccaccaatcacttttatgtctgtacacaaactacatgcagtaaacggcgctaaaaagtaatttaaaataaaatttaattcataaataaaattaaatttttagtgccggtttcttcgatttattatgcgcataaaaccattaatttaatctcttgaataatttaatttgggttcttttgccatctctctatgtttttttaaataaaccctgaagaaggaagcataagaaaataagtttaaatttcaattttatctaaattagggtttgtttttaagcgattttcgttgaatgaaatgtcaggttcggcgataaaatcccaggtccaatttgcggggaaggccttgaaaattttcaaaatcttggatacgaatttttcacgacttgagttaaggaacacctagttaaatcataaaactctaacattcagtcgaaataaccagtgaaatgtccgtaagaaaaaaaagaattcaatttttaaaagttgttttagattttttgaggtttttagtgtgatgctcagtggggttaattataatattttcttcataattaaataaaataaaaatattttctttacatttctgcgccacataagaactgattttgttgacatgctcactcaactcagtgaaaacaaacagaaaactcaacgtcattataaatgccaccaaaatcaaaccagaaatcaccagctttagaacagagcatctctttttggcatgaaagtcgaacttaaaaacaaacaaaccaattttcgagtaacagaacggaaaatttccaaaaaccaagaaaaatgatctgaattttaagtaaaattgcagattactaacaattttgactttgtatacaaatgaaatatatttatccgatccctttctaagatagaagtcgatggtaccatttttaggtaagcggcgacaagtttcagccgangttacaaacccgnggact

SEQ ID NO: 13313 - DNA, 3048 bp, Heterodera glycines
  unsure (1)..(3048): unsure at all n locations
tgatcagattgcttactttctgtgccagttgaaggtgaacgactaatatttttgccttgttcaacaatatcggcggcatcaaaattcatttttaaataaaggaatataaaaaaaatattatatttttattgatcggaatgaaaaatgaatgagcaattcaattggatattcatgcagtttttcttgtcgtctcacttattcagatgaacaaacatttattacataagcaatatatgataggcttgccgagaaaatggcttcaaattaataattccattattagtaattattagggaagggatttaaaactcacaaaatttgaaaaagttgattttattacttaatccgtagtttttagaataattgaatattttgcaaagaaataccttagtataagcgctaatagtctgcaaaatttacaaaatttccgtccaagtaaaatttttttaagaaaagccacataagcatcatagtccgtgcccgatggactgcatttccaatggactctaaaattaaaaaaagagtttcttaatttttaaaaacaaaaaaaataaataaatcattaaaaagacgatttttgctcaagccaactccaaccgaatgcatattttgctgttttttcggagtccattgccagggcaccaggaaatgccgcgaccctcgactgaggccgctggataacggctgtttcggtgttgcgacagagaaactgtcccgcagcgacaaacggcgtgagcgagcaaattgtacagcaaaccctaatttgcctctatttttatatggaatgataaaatttatgcatttttttgtctggggatgaaaaagggtgagacattggtgaaaatgatgtactattttatttaactctagtttctttgtctgacattcacatcatcattaacacactatttttacggttggttttggtatttcctgatttatttttttatattttatattattatttttttaaactcgaacatatttatataagaaataaaatttgaaaatttttgaaagactggttatggattttgtatatattttatttttcatataattaatgatagatttttgcaatttccctctcacatttttaatctcatgttgttgaaattgttctctccctgtaactcatcaacaaaatttttatcgttgagcagatttaaaaatatttcctcgataaatgcaatcaaaatggagtcatcttcaaattgcatttaaaggaacctgagaaataaatttatgaattaagagttccaaaatttctgtaaaatgactcatcaatatttgtattaataagttcaattgtaatttttcatgcttatcccaaaggtttttgtggactaattacagcaaaaaaggattgattatagaatttttggtacagaatatgggtcgaaatcttcataccgtaactttgttattcgttatcacattcttcggccaaaaaaaaattgtttattctttcatttggtttctccttttattcaaaaatttccactttctttaataatcaatttttcactttattaaagcattaaaagatttaattatgttcattttattaatgccccacggaaaaagtgcttttttattccttaacattatttctaaatcgatgtttaactataaatattatatgatgattagtttctttattttttataatatacattataatcatcagtaggaatattctaaaaaaatcgatgctttaccaattcactgctaggaaattttttgatttcgacagaaatatcataaactttaggaggggacttttcgacagcaaaggacatttcgacagcaaaggacatttcgacagaaatatcataaaatttaggaggggacttttcgacagtagatttttcggcagtaaaaagtaattaagtttcacatttaggtgtgtaaaagcgtaaattttttccaaaaatcaacattaagccaaatcagtattgagacacataatatttaaactcaaaaatttttaacaaaaaaaaaaaaaataatttttggtgatgaattttagaaaattttttatttcctagtgatgtatttttgaaaattttaaggatcggttcttaggggtttaatttttgtttttgttacatttttattcataaattttgagcaaaacacaaaaaaggtcaacataggttttgttaaacttcttagggttcaaagaaaataaaaacgataaaataggtgctaataactcgaagagttgcttaacaatcaccaaaaaacatattttccatgctttagggccactggaagttcaggaaaaataggtaaaatctaaaaaacatatttctatgtagtaatattatttagcaatacacattatatgttaattaaaaagaaatttagtaaaactgacaaacaataacttgttttatgattttcaaatttaatttttgattttggagatggctaaaaattaattcggcgtaatgaatgaaatttgttaagaattttacaaattttaagtaaaaatttctccatttttctcttccgtacgattacaaattctcggcacccctaaaaaaaccaattttacaactggcgcgacctttggagacccgcatttaaataccggacctttagggatccgaaaaatttgggcaccgaaacgaccctttccctggggcccatccctgatataaagcaaaagaattacaaaatttcaggtttggatccgggtgaagtaagtgatttttctgtattatttttatgcttattcaacattcagtttataaatgtttagtatttattaaaaatttattttcaaaaggaaacaaataaaaaaagataataatctcttttcccttgattgcgtcagtagaaaatgcgtcagtaataaaaatattttaaaataaagagcattaagtattgtagtataaattagagatcggaccggtcggtttttttttagtatttttcggtcttttttgattttcggtttttgaccgaannaaccgaccgagaaattnttgagttttncggtttttaaccgaaactgacccgacgaataatcaaaaaccg

SEQ ID NO: 13314 - DNA, 1813 bp, Heterodera glycines
cagtgttagacaaaattgctcatacgccaaaatagcgcattttgcgtaactttttgcgcgctatttcaaaatttacactggaaaatgcctttttcgcactatttattttgatctgccataactcgcttcattcccaactaaactgaacaaaattggtatctaaaaaaagattttgaaaaggagaatctttttctaagcaaatgctaagcaatttaactcatatgaaaaaagttgtgggaatttcaaattttcattgcgttataactcaggtccgaggccgctgttttcaaccaaaatgcggaaactaatcacttttttattgattctaaaagtcaaaggtggttttgtactcttctaaccaaaactagtagaatttgcgaatttcgatttttacatgtgctagagacatgaaaatagtacgccaaaaagagagaaaaagaaatgcaaatttttttcatcccatttttgtaatgttcttcgccgaaacttttactcaaaacactgaaagtttgttcattttcctttttttttatcggtttgcaaaatttggtgcggatttaacatagagaaaaaaagctagacatagaaaagtgaatgttgttttttacataattaaaatgaagagatagtacgccaaagtgagagaaattacaaagaaaaagagaaacgacgagatagtactaggcttttctctgcacagtggagttgacccatagtgaaacaacaacaaagtgtgaaaacaacaattattaaaatagatcaactgatcattggttaaactctattaaaagttcattgtgaattgttttccgtagttgttcagtgccttttgttgtctcctcaatgttttcgcttggcattcgcaattcatctgcgatttctgccaatttattgaagcggtcagcggaggtcaaatcggccatcaaatccaattcagtgatgtggttgagcttaaaattgcattattcatataataaaattggaggcaaaaaaacaaacgacgaacaaaaatctgaattgaatccgcaaccaaattctgggcctttttgtacttttgttttgctgctaatgcgatgccaaagacgcaatcaactgaaagtgcttacaattagctatgtcgatttgtagaagaaatctctttaaactcacaaatttcctggagttccgtgaaagtcgcgacggaacacaaagcggcggatgcgatttctctcaacgcacgcgcaggcaaagcgaaaagcaattgaatctgtgagggaaaagcacataaattaaaatgtttatgaaagagagaccaaatggggcaaaaacgggcgaagggaatgcgattggcccatcggatgggcgacggggcgaagatgggagagcaaaatcagtgcgggaaaggcggaaaaatggtgcagaacgcccaggggaaggcaatcggaggaggaagaggaaggacgaaggagaagggccatccgaagtttgtggagacaatccgcgagcagatggtacagagaggggtacctgaacaacgggcgattcaccgacaaatttccctgtttctatgggggtttggtttcccaataatacgatggataccgtatcaaatagggtagaaaattcaaaatttcatcaaataagatcaacaaaatcatgaacagagggggaaagggtctcgccaccttgtgaaaaattcgtgggccgacattttgcacttcggctgaatgtgcagcgaccgctgctgcgccgccggagtgccaaaaacccttttgatgagagcggcgaacagctgaacatgcgcattccgaacctgaagggcgaaggggaagga

SEQ ID NO: 13315 - DNA, 1452 bp, Heterodera glycines
ttaaaaatgtttttcatttttattgaagctgtcgaaacccttggcgatttgtgtcaaaatttgctgtcgtacggacggcgacggttcggcgagagaaatgtccaaaaattggaggaccatttggcattccgactcggagacggggcgagcaccttttgggtgggaacagagcaaagagagggcggacaattgagtctggaaaatgggaaaaacaattgctaacgacaagtttgtcatttttcgacggccgatacacctcggaatcggaggccaaaagtgcgttggccataaaatccgcgcaaattccgccgccgccgtttccgtccgcccccacaaaatcctcccagccaaagtcgcagttgccctcttcattgccaattcgatcgatggccaatcgcaaaagggtgcaaattgcgcgtggggaatgggccgagtcgcgaggaagcgctaaaatgggaaattgcaaaatgaaatattatattagcattggaaataggcttacacgcaaaagcgacaaattcggagcgaaaccatcgcctcgattcgggcgacttcagaagggccggcaaaaatttttgttcgattgcacaacgcacaactgcctaaattgacggtttcatcgaaataacagtaaaattcgcacttccgtcgccaacagctgtcgcttgatccatttcatgtgcaagtttagcctttcctgtcgattcaggcgaacggaaatggcacaatcgtcaacgatcagtttggaaatctgaaaagataattgagggaaatgaaatgaatggttgtgaatttgggaccgaaatgctcagcggggcgtgaccaatttggagaaagagacgcgaaacgaacaaatcggtgaacaaacggtcgcggaacggaagagagccctcaatggaggcgcaatggagcagagagtgctgagaaaaggggacacaaatcaatgtgggaaatgtcaaacatccaaacaaacgccggtacgtttccgttttgatggatgccacaccccattaaaaaaaaagagcaacaaagccgtaagaaatgcatattaaattcaaaacagaaagacggagagatatttgttctcccattcgaatttcgaacccaacccacaaaaataagtctagttataagcatcctgaacagctttattgcttttttgaagggtgtggcatcaaaatggaaaagtaccgaaaatagatcaaagtatggacaatttaacgaccccaaaaagaatggcgagggcattttcggaaagattttaatttaaaaatttaacagagaggaaattaagtgccaataatgagtgtagcaaatggcaataccaatgctttgatgcgcattttgctgaacatttcgttgtgcgcaccgcacaaaggatggccgacagagagaagccatgcgcagtttttaagggaggaccaaccaattcaaagaatgccaattcggaca

SEQ ID NO: 13316 - DNA, 1130 bp, Heterodera glycines
ccaaagagcagcaaagataattctaaaaaaattgaaattgccgactcattagggaacagcaaagagcattatccaacaggaatgaatatgaccacaatcgctcttaaaatcaatcgctaggcaacacccaaagagcagcacagatgaattctaaaaaaattgaaattgccgactcattagggaacagcaaagagcattatccaacaggaatgaatatgaccacaatcgctcttaaaatcaatcgctaggcaacacccaaagagcagcacagatgaattctaaaaaaattgaaattgccgactcattagggaacagcaaagagcattatccaacaggaatgaatatgaccacaatcgctcttaaaatcaatcgctaggcaacacccaaagagcagcacagatgaattctaaaaaaattgaaattgccgactcattagggaacagcaaggcgcattatccaacaggaatgaatttgaccacaatcgctcttaaaatcaatcgctaggcaacacccaaagagcagcacagatgaattctaaaaaaattgaaattgccgactcattagggaacagcaaagagcattatccaacaggaatgaatatgaccacaatcgctcttaaaatcaatcgctaggcaacacccaaagagcagcacagatgaattctaaaaaaatcgaaattgccgactcattagggaacagcaaggcgcattatccaacaggaatgaatttgaccacaatcgctcttaaaatcaatcgctaggcaacacccaaagagcagcacagatgaattctaaaaaaattgaaattgccgactcattagggaacagcaaagagcattatccaacaggaatgaatatgaccacaatcgctcttaaaatcaatcgctaggcaacacccaaagagcagcacagatgaattctaaaaaaattgaaattgccgactcattagggaacagcaaagagcattatccaacaggaatgaattgaccacaatcgctcttaaatcaatcgctaggcaacacccaaagagcagcacagatgaattctaaaaaaattgaaaattgccgactcattagggaacagcaaggcgcattatccaacaggaatgaatttgaccacatcgctcttaaa

SEQ ID NO: 13317 - DNA, 1245 bp, Heterodera glycines
  unsure (1)..(1245): unsure at all n locations
aaaaaagtgaaatttcccgctcattagggaacagcaaggaccattatccaacaggaatgaatatgaccccaatcgctcttaaaatcaatcgttaggcaacccccaaagagcagcacagatgaattctaaaaaaattgaaattgccgactcattagggaacagcaaagagcattatccaacaggaatgaatttgaccacaatcgctcttaaaatcaatcgctaggcaacacccaaagagcagcacagatgaattctaaaaaaattgaaattgccgactcattagggaacagcaaagagcattatccaacaggaatgaatatgaccacaatcgctcttaaaatcaatcgctaggcaacacccaaagagcagcacagatgaattctaaaaaattgaaattgccgactcattagggaacagcaaagagcattatccaacaggaatgaatatgaccacaatcgctcttaaaatcaatcgctaggcaacacccaaagagcagcacagatgaattctaaaaaaattgaaattgccgactcattagggaacagcaaagagcattatccaacaggaatgaatttgaccacaatcgctcttaaaatcaatcgctaggcaacacccaaagagcagcacagatgaattctaaaaaaattgaaattgccgactcattagggaacagcaaagagcattatccaacaggaatgaatatgaccacaatcgctcttaaaatcaatcgctaggcaacacccaaagagcagcacagatgaattctaaaaaaaattgaaattgccgactcattagggaacagcaaagagcattatccaacaggaatgaatttgaccacaatcgctcttaaaatcaatcgctaggcaacacccaaagagcagcacagatgaattctaaaaaaattgaaattgccgactcattagggaacagcaaggcgcattatcgaacaggaatgaatatgaccacaatcgctcttaaaatcaatcgctagtcaacacccaaagagcagcacagatgaattctaaaaaatcgaaattgccgactcattagggaacagcaaggcgcattatccaacaggaatgaatatgaccacaatcgctcttaaaatcaatcgctaggcaacacccaaagagcagcacagatgaattctaaaaaaattgaaattgccgactcattagggaacagcnaagagcattatccaacaggaatgaatatgaccacaatcgctcttaaaatcaatcgcta

SEQ ID NO: 13318 - DNA, 2812 bp, Heterodera glycines
  unsure (1)..(2812): unsure at all n locations
caacatccgctccctaaaaaaacacttacgttttaaagacttgcgaatctcgcacacaatggcgaggatgaacaaagaactaattgccgatgctgcacaataaatgataatggtccaagtggacattgtccgagttgccggtggcggggttgtcgtggtggttgttgttggtgtcgtcgtcgatgttgtggttttttgaatttctaagcttttcacttactttggtccttttttctgcccccatcgacaatgctgctgctgtcagcagaaagagaatgctcctggagggatgtgtggtaatgaattaattgcgaatattgaaatatttgttgcaaaattcaaaattttcagttttttcctttggcctatcggattcgttaattcagagaggcaattattactatgaaacgcagaatcatttacatataaccttaataattataataaataaaattttgacatttttcttaattctgttcactaatttcgtactccgattcaatttatgcttattcaaatgacaaatcaaagcaatgggttgccaaactcctgctgactaactaacttacataagaatgaacttgcccatgttgaacggcagagagaatggagttgattaattattgaaagaatggcggttaaattaaagaggaaaaatgaattcttaacattttaacaaatggaatgaattaaaaagagtcgaattatttaatatttgttgaagccataaacctcatcccaaattgaaaacagaaaattgaaaaaatacaattaaatcttttgaggttgctaaaattgtacaagaattgctcggttgacccgaccgaatggttgttatttcgaatgaattctttttaatcaaatttgaatatattttctcattcgatggtcgggggaagcgaacggcacaaaatgagcaaatttaactagcgaaacattaattcttctgattgctgaaaaggatatcagcccatccgttagattgaactggtggatgaatcactttagagcacagtccatcaatggtggtggtaatgggtggaaagtgaatgaattttaaatcgatgtaattaaaaaaagaaaaactattgttattgggtaaattgtaatgtcgggttaggccgaatggtgtcgataaggtgtcgccaagaaaaaaaacaaaaattctcagactagagtcaaacacattaaaatttggatattcgggtgaatataatcttacaaaaattcggcgattattacgttgttcaatttaaaaattttattgtttgtctccaataaattagcgaaaagatgattcaaattaaaattaacttcattcgactattattcatattatttaatgcttttgggttcgattttcattaaactcgacagacaaaaaacaaattaaaaaattcattgtaaaaaaatataaaaacaaatctcagaatataaaaaaaacaatttgcatagggaaaacctggtattttttactctttactcgcacattttatgtataatccatgtatggccacagaacaaaagacaaaaaaagttttcgacaattcgaaaataccctcaaaagatttagaaaaaattagaaaattgtcaaaagcttcttttgcaatcctagttaaaataaaatttttttttaaattttttttttctccaattaacaatttgagatatcaaatatgctttgtatatattttggtttttcttcaagtaaatcaagaattttctaacaatttctcgaaaatttgaactcaatttttgggaaattttttgctaatattttgtcatgactttttgctattttttatgactcttttgcatttttcgtgaatttttggcgtttttatgaactttttcgctactttttggcgatttttcatgactttttaagtcgacttttttgagtttttcgtgacttacctaaaattagcatccctatttataaggattttttcgaaaattcccgaaaaaataggcgccaaaaatggccgaaataggcacaaaaagagggcgcttaaacgatttaaattcgatatttaaccgaaatgttttgtgttgaatatatttttgaagacaaaaattttgtaaaacttcggcttncgattttgaaaacttcgggtttttttgggcttcgaattttggcttcaaataaaccaaactgcgtttaaaaattcatatagtatattgaaaattcaaaaaattaatatggaaacatttctaaatgtgtgtctgtccattttctgacgccaaattttgacgcttaatcattttatcaatgcatttttatagaaaggtttgggatttcattttttgttgtccgttaattaattgttcagcagcaattccgccgcctgctcatcgtaatattcgggctcctccgtccgtacgtttacactcagcaatttgccgttgtcaaaaaagtacaggcgattgtccaccgaattgtagctgagttgggccaaccctttgtaaggattgtaccatggcacgtcaatgaaaatgccttaacaattacgaattaatgaaagagcggaaaatttcataattgcattaattataattagagatcggatttttataattggacaaaaaaaaatcccaaaatatggttaaaaactttgaaataatgataaattcttccgaaaattatgcatttattgtaaaaaggttaaaattaatgaaatttaaatattaatttaagaaaaaaattcattgagaaaaaaaaatcatttataagttgaattttaacaaaaagacaattaattttattttatattaattagatttaatattttactttcatttctgtacatgt

SEQ ID NO: 13319 - DNA, 2817 bp, Heterodera glycines
aaaaagagtaaagctttaattaacagcaaaaattaattaatttaccgtgaatgtttggtcaggcttccatgggcctttaattcaaaattatggcaccattaatttggcattatttctcacagtccaatgatgcgataggtcccaaggcgtcgctctgaatctgatcattgctctccaaatcgtagcgcaccaaaatatttgaaccatgacgatggtaaaaataagaaccattgttcacggtactgcccgttcccgatgccaaaaagtcaacgtaataccttaatgaaagctaattaaacttcgtccttttgccaattaattaattaataattttatgaaatgcaacttagcttattaattagcctgcaacttactttatgttctgctttttgttcattagctcccgttcatttgcatattcataaagcaccggcgacgcgtcgccatcggtgacccaactaaagccattaaactaattggcaaaacaacttgcagcttaattgataaacaaatgataatgttacacccaaaaagtcgattgaaaaaggccataaatagacaaaaacaattatatatttttcattctatccctaattagtaccaacgattacggttcatttaatcataataacaatttatgatttgttaccgcttttctttccatttgcccgaacgaggcattgaatcgcgaaaccttggattagaataacaaaaatgcaaaacaaaataaaatcattaaggacataaatcttaattatttagcttattaattaaattgttcaactaatatgtatatatccaggcagattaagaattgaatattgacatcagagacaaagtttttaataaaaaaagacacacaagtccaatggtgccaaagtaatttcaatgaaaaacgaataataatcagggtttgggcactggacccggacccgattcccggattacacattttccgtactcatgcttctccctcaattttaccatgatcctgtcgtgccatactgtgactcggcatggagcacgggaatcccgactgcattcagacggcattctgtttttgtttgtaaaatttgaattaatattatatcttaaagtttttccatttttgatattatttttaaaaatacctctccgattctcggaaagtgttggtggcccggtgtacggcgttggcgtggtcggttgggaggctaaacagaaaataaactactaattgtaagcacgcgctttccattcttactattttaaatatttcaaatctattttgtttttaattataattatttataaaattaaattttacatttacatttgaatttttaattttttaatttgaatttatttgtttttcatctttgcctgttaaatgcgctggcggtggtgttagagtcgccgtcgtcgttgttgccgttgcgcttgtggtggagcgacgccgccacgggcgcgaccaccaatggcgatattggctcgaagcggttggacggacagtcgggggcacaagtcgcgtttgggacagatccggcatcggcatgcctggcacccaacccaaggggggctgagaaatcagtgaaattctcaaaaagaaattaatcatttactgcaaagcctggaggagttggctcaaaaggaacctaaaaattttatggaataataaaaattcgaaattttttttttgaaatttaaagaattcataaacgctaccagctttgtgacctccatctctttgagcacaattattgggaccggcacaagcttttcaatgggaattggaggccccggcacgggcactctctgaacatacaaatcgggcagagaacaattgcaacggcctgggcaataaaagataaatttaaaaataaataaattataattttttgtttaaattacttttgaatgcctttgctttctgataaatgatttaccatcgcttcccggcggtccttcggcgccaatgtctccgaccggcccaattggccccattcgaccggaggggccccgacgacccgaaataaaagaaattaaaattacctaataaaatctaaaatctttacctgggggtcccactggcccggggggccctttgccgcccgaggggccacggacaccgcgtaatttttggcccttatctgcgcaataccgatgcacacgttggcaagacgtttcaaatacttgccgctgaaaatggcaattctccatagaattgatgtttttctggcaaatctaccggaatgattgtgtcgtagccgagcagtacggtgctccatttgcccggactgtccaattggcgtgccgactttgctgctgcttttgttttctctgacgtcacttcgcgctttccccgcgccttatgctgctccacccgtttgacttccaattcgcgttccatcagctaaaatagtacaaatgattatgatgcaattattatttcgaatattaaatcatttttatttattttttaaaaataattttcaataaatatgtgacacccaaattcggtgataagcaaatgcgtagaaaagtatcagacaaagcaaatggacaatttgcaaagtaatgatcaaccgaacagagggaaaatttagtttctttgtcggactcatttataacctaaaaagttgctcatttattttaagtgaaccataaaaataaactacaatcatttatggattaggcatttctcaaagttttttcgtttgtaatttattaatgagtgttcaattagtatttatttgggtaatagttacgatggttgttgccccccttttttgaagtaatttttttttgttttaaaaagtcataaaaacatgcttccat

SEQ ID NO: 13320 - DNA, 1254 bp, Heterodera glycines
gtttttctgagaatggcggtgttgcgatggccatcgaatgggagagggaatttctgacgcgtgccgaagggcggggggcgtcggagcggcactcgccaagcggcgaaatgtctttttttgactacgaatcggcgtgggaagcgatgcattcgaaagagacgcaggaaaagtaccaattcagtcgggaagttcgttttgagcttcaaactcttaaaatgggaacatttgaaagaatccatttgttggagagcaaagggcgcgggaaaaggcggaagagacttttcgggagggacgcgtggccgactcgattttgcactacgaagcggcggtgcggagggagccccaaaatgtggaactttggtgggctgggggaaagtgacgcaaaaaagggggacggacgggggaaagggcgttaatttggcactttaactgtttcccaatggcatttcctcgtccacttgttttaggcatgcccttggcattgctcttgccgagaatgaagatggttggtacttccttcttctgcagttctcttttgtccttcgcttctctaactgttatccttttctcttagatccccgtgctatttcggccctccgaaatgctctaaaattggatccatcccataagccgtcacttttggccctctccgtttcattggccaatgaatcgttcgaccatttggccctgcatgaattgcacaaatgggtttgtgtccatgagaagaaggaaatgccgagggacagttcggagaacacttcgctgtttcgtcaatatactcagttggacgggactgagttttccaaggtttggtgctgaaatggccaatcctccattttcatgcttttccgcttcgtcttcgttagcttttcgcttatcccggatttgctttgcttcagattgaacagcaatttttgacctcggctggccgcgatcagtccgataaggcggagcttcagaatgccatgtaaaatgataactaattgagtgatcactgatcatagtgtttctttggctcaggggtgtgctctacaatttggccagaaatttcgaccgcgccgtcgactgcgtccgttccgcgttgtcctttcgtcctgaggtcgttttccattggttttagggccaatttttgagtcaaattttattaatctttcgcaaattccatttgtaaattgccatttgtgttctttcgccaggaccctgttctgtggaatcggctcggtgcgactttggccaacgctgacagagcggcgg

SEQ ID NO: 13321 - DNA, 1184 bp, Heterodera glycines
ccccattgggcaatccaattgaaagacattcagttggacattttgccaaaagaatcttcaaattgccccctcccccactctctcgtctcctccctccacacaatttggctcccttccaaatttgccaacgaccaattcatgccaatttattctaaatctcatccatcttcttattctccatcgatcactcgcctttttttccacgagtgcctttcttattttaattcacaaaattaggcaaatcgctccgtcgcaaaatgtttttgcatagattaagaaggtaaagcgaaacgaaagggttaattgatgtatcattgctgcaattagattcgacctttacacaaagcctgtggaggactgtcgggtgaaaacgccgttcggcggagtcagtgagtgccgtccgtcacttttgccatttcggcactttcactgctcgttcattcagtcaccttgatcagcttcgtcgtgattgttctgttgttcatctcagaaacatggtcatacctaagtgttgatgtcgttgaacagctttttgtggttattttttaccccaccccaaatggccaatttctgttccaaggattccaccagcgccgaaatgcgaattgaaattcattttgacattactctgcacaaactttcatgtcccttggttaccatagacgtgatgagtcaatctggagagagtcaagatggcattcagcacgacgtgttcaagcagaggctggacaagcaggggaacaacatggaaggggcacagcccgagaagcagggtcagcagttggtcaaacatgccatcaataggccaaattgacaataaaccacgagtttaagttgtgaacacaaatgcatccaaaagtgctaatgtgtcaaggaggacaagcagtgacgaggagtgcggcagctgctacggggccatcaaagggtcagtgggccaattgggacggtcttccgactcatcgtgaattgccttaggtgctgcaacacttgtgaggaggtacgcgaggcatatcgcctgagggggtgggtgctgcagaatatcgacaaggtcgagcagtgcaagaacgacgcggtgttgaggtctttgagtgaacaggcggacgaaggttgtcgagtgtggggcacagttgacgttgggaaggtaagagaggagggcatagcggggatccataagagggagagag

SEQ ID NO: 13322 - DNA, 2181 bp, Heterodera glycines
ttggccacgctgacagagcggcggaagcgataaagtcagtggaggggggggggggggaagggaatgttttggtggaaaatgttagggcgggtggacgacacgaagcaatttaggaaaagctaaaacaaaaacaaacgaataccaatgaaaatgaatatcaatgcttctcaatgacctcatttgatttattttatcgtccttttccgccattgttcgttcacaatatccttgatttttcgttctcaaataattaattattaattaataatttggcacttcattaaccgatgtttcgcttggacaattaattgttttcctaattaattaataattaattaattagtgcctttccctccgccccttaagtgcctacaaaagtgccctccatttgttccccgcttatgttcgcgctcggtacaacttgggcattgcgtgcacaaatttgaacagttacaagtcaatttactacagaagtggcctaattatccgccattgtttaagggacgccgccgcacattttgtgaccgccctccaactccaaaatgcacccgaaaattcccaaatttggtccaaactccgatcggcgatgatcagactgacgggggacgacgagccgagcaccgattgcttcgacgctttggagaggaggcaattggaccgaattgtgacattccttcgacataaaagcactttcgaacgaatggacgaacagtgacagagaaaaagcggggaaagaaagcgaaagaaattttaattattggcaaaattaataaaacaattttatggtgacaaattaagcaaacaaaaaacagccaaaaacaaatgacaattttattactcgcttaatttataacatatttgttactctgatttaaaatttaaaaatggtcaaagttttgtgggcggttggcttatcacttgcgcgccattcgcgggacagaccggcggaagggcgacggaaccgccgccgacgcagcgattgacagcgggaggaacgcgtcggaccattgccgtttggttggaagggcgggggacggcggttaaatgggcggaagaaacgggcgccgatttggaaagagcggagaaatgggaatgcatgtgttctgcaagtcgtaggaaattgggccaaaattcaaaattataagcatgagtatagggggaccgcttttttgtgtgccaatcatttcacaaaaaaaaatcgatgcattggcacttcccgtggctgttttggccgattcctccaaacggctccatttccattggccgtacccccgtcagttggtgccactcacctgaaattgtcagcacatcctgcgcatcgaaacgtctcgagggatttgtgcagatgcaattggcaattgtcagtcgcaactgaacgaatacgatttgagggtggtgtttctgttttggccgagggttttcctggcacccaatccccgtcccccctccccggctttctcctgccgctttgttctctattttatttattgcctgttgcgagtaaatgttggccgggatgggcgggtactcgcatttgctgattttgcggaccaacgccagcagattttgtttctcgccaaagaacggcgactgaagcgcggccatttcgtaaaggacacagccgagggaccaaatgtccgacttgaagctgtaccccatttcgttcattctttccggcgccccccccctccccccactcaatttgccattttagtccacgacttccattccgtctcccccgcccgttttgatgcttctcacaccataaaccatttgtccttcggaaagcctttccccggcaaaacgcatcctttggacgggaaacaattcataaccaacaaaggttggtgaagccatttaaaacgcaaaagcatttaaaccaacaaaaaggcggcataatgcaccaatatcaactgaaaattgtgcctactcggtacatttacggagtgacgcggaaggaagagactttggtcagccatcaatttgcgatcactcgcgtggagagggacattatgaccggggccagtggcattcccggactctttgtacaatgcgaactctcgcctttgatggtccaatacgaagagaggaaaaggtggagacaaaaagcatgccaaagcgagggggggggcaaagaatgacataaaaattggggaaggaatgtcataaaaattggcgaag

SEQ ID NO: 13323 - DNA, 1505 bp, Heterodera glycines
caaatgtgcaattgccaattacgcgttgtcgtgctgtctttcggtgcatcgcatcgccgaattgagcagactctcttttggggtgaagcacgccttcacctggcggaagttgccaccgagcgaagtgatatgagactgaaaagcagcgaattccgccgatttttttcttgaaaaatgcgcacttggcacgtgtccaagcatggctccatcgtcttctgatagcggtctttgcacggcttaatctccgcacatttgcactgcctttccatccccgcgggcggttgccgttgcgctgccaccgcttgtcgcgcggccggtcgcgcagatcgcacagcggcggggggtggcaccgcatcggcgaaaaatggaagcaaaacggcacaggaaagcggcaccagggcgaataagcagcgcatggtgatttatgtgatggaaactcaattaaatcctaaaaatttggggggggggtcattgatgatggtgataatgatgatgaagttttgcaaattaattggctaattgctttgctctctccgtccttccgtttaatctttgccgcatattcggctcgccctccggcgcgatgatttgctcctgatgatcgcagccccccttttataggcattgcgatgcccgcttgtgccactcgcggctgttcactgatattttgcggtcggccgtcgccgtcgccaccgcatgggacgaccttgagaaaatcgtaaaaaattattaatttttgaacagtttggaactgttgtgcgttttggtcttcagtcaaaaatagtgtacaaaataattttgaatttttcccactttttggctatgcgtttcctctttttttctccatcttgcgaaatcactgcaaaatgatttttatcgttacttattcattcaaatgctctaacaaataagtgaagttcaaaattataaatttaaaagcgttttcgacttattgttaaatttgatgaccttcactcaaaattcggtgggcactgctcagatcggtggatgattgatgagattttcgatgttttatttgtgtcccactttttgttatgtttgaatggcaaagatgtgagatcactcaactaatgaataattgataaattaataattttaaaaataattttctaaagcaatttcctcaaatacggtaattggtaaaatgatatgatcatcacattaaaatttaacattgggcgaagctaccgaaaagtacaattgatgaataattttgggaaagttttgacgaaaaatttgtaatgactttggcggtggagggagcagaagaagccaatcttattattattaaattaaataaaaatgaaaatgaaagtaaaaataaaaagacagccttttttattttggctattttggaaataaaacatttaatttccaagagaaggagaaccattgctgtttttgtgtattttcatttaaattgtcaaataaaaaattaataattgatgaggagctggaaccggaggggggtggggggggggaga

SEQ ID NO: 13324 - DNA, 2670 bp, Heterodera glycines
gggactgaatgggggggggggggagtgagtcggtgtctaaatttgcgaaggggttccagtcatgcaaaccttatgattttttttttttgcttttcaaaccgctttttttcgacgcgctcttctaaaaacctttggggaacaatgaattttttcgaaaattattcaattttccataaatctcttactttttcataaacaaaaacttttaaataattttatataaaacattcacttcaataaaagtttctttttaagaattttatccaaaattgccgcggagtcacaaatcccgcggatcgcggattcattaccgcggtcgcggatcgcgagaaaaaacgccgcgaatcgcggatttcggtcgcgctccacccctggcccattccagcatttttgggtccatatgataaaaagctgaaagtccctgctcaatttggggagggggttggtgggcttttagtccgcgagatttttgaaacgaaatatttcctaatttgtaagatttaagcaaagacgcgggcggatgggcgagcctttgtctgccgtcgcgccaaaaggcgttttgtccggacaatgcgtgggacgcactcaatgtttggcatccgtttaaaagctcacaatcagaaatcaaatcgctttttcgtttttctttacagtcccttggagagaacgatcgctttccgttctgttgatgggcgaattgaaaaggaattgaatttgttggaaaatgctaattttaatcattttttattgtatgttttttaatcaattctcgacaaattatcccaaaagcaaatacattttagccgtttcagtctctgagggggcggggggggggggggcaattgcgaattgcctaagcatggtttaggggtcctaattgtggattgctgttacgaattttttcgattttgcgcaattaatccgcaattttgaacattgtaagaatgaggaactgagaattttgaataaatttataagtatgcaattttcaatgcattaaaaattaaaaacaactaattcaaagtcgtttttagataacttttgttaaaaacccgacatgtccctgctcgccactatttcccttaaatctttcaaaaattaattaaattaacataattttctttaaaaatttttattaatttcctttacattaaaaaaatttttatccgatttttgttgcatatatttttacagcattacaattattgaatatgtggcttaattgattaaatttatatcattaagcttctcatgaaaatattcaaattaagaaaaaaaaattaacatacaaatttaggaaatggcattattatttgaaaatcatcaaaattttataatttaattattttatatttaaaaaatagataaatgaattcaaaaacaattcttcatgtttttctgctccttttccttttctcttcactttttgtcattatttccttggcaatgcaaatagaggaacaacaaacaaagagtattcataatggagatgatgatggtaatgagaatgagaagaatggcaatgacagtaattttatgctaagcgatgcgtcagcgttcaaaacgtaccaaaagcgcgaaaacccaaaaagcgcaaaaacgggcaaaaacgacgaattggacggtgccggcgccgaaaagtctaaccgacgagggaaggcaaatggggtggaaaaagcgccgcaaaagcaaaagaaaactgaccgcatcgcttctaagcagcgaccgatggataaaagtaaggcacggaatgccattaccaaacaaagacggctaaatgaagaagaagccgctgctgtagccgtcgatcaaatgagtgaacccgcggggattgacggggaagaagccgagccgagtcggcaccagtcgctgacaccgagcaaaaggcaacgctcggcacgaaagaagccaaacaaaagccaatgggatgttcaactgacgccgacgggcaccgtttcggatgcggaaatccccgcagatgacaacagcacgcgcaatttgtcacccgcggccgatggcccaagcgaagagccgtcgtcgtcaaaaggcgtgaacaattcgccgttggcacttgtggacaattggcaacggccgcaaattaaaaaccgaattagagaacaaacacggcgcattgatgaacttggccaagaagtggcggaattaaagcaatggaaggcgcaacaagaacaaaaacaactgaaccaatcgcaggaagaagcgttgcggcaacaatggcactgttttgtaagcatacagcaaatgatggcactacaggtacaagcacagcaaatggcacattttcaatcagcgaatatccaagacttggaacaacaatcggagactgatcagcaacaaacgctgtttcgtccaatcgcctcacatggaagcgtaacggagcgaacagtaacagcagaagagaaagaaaagcaacatgaaatgcaagaaaatggacaacatgagcaaggaggacaccaagatgaagaagtgcagcagcagcaacaatttgaagaaggaaagcaacaacaaacgacgaatgcactgatgagctcttaccatggcttaccacgggaagcacaacaagaggaagaagaacaacaccaaatgcatcaccaccaacaggtgcagggaattgcccagcagcaattgaaagcattggcacaaagcacaaca

SEQ ID NO: 13325 - DNA, 4052 bp, Heterodera glycines
  unsure (1)..(4052): unsure at all n locations
atgattaaaaaagagaaccccaataagcattttttgtctcactgtgcttaacttcctatttcttggcctggtgtcttatcttatgctaatttctaaaaaaaataaaaatattaatttttaaaatccacaaaattacccattataattaaaatattatgaaatatgatttgttaaaaaacatcactataaaggtataaaaatattatatctattaataatttcttctcaagaacgccgttgcgcatgaaattcattattttccgtgttttgatcatttgtgagttttggaaatttgttaaaaaagggtaaatatccatcatatgtcccacactcaaaattgcataaaaacacttttataggctttattaggtgacggcgcgctgtcatttcgtccctgcgtcgtttcgtcccctaagccaaaatgagtcgtttcgtccccaatttttttttatttaaaaaattaattagtcttcaagcggtaactcctaaattttcacacattattactaaacattttttatttactaattttagacctattatgaaccgtaaaagattgaatttctcaaaaattgatcaccaaaatttattttatttttttcttgtaaaaaaattttaggtttaaaaattttccttattcgaaaacattataaagtcttttttcgtgccttttttcaattttttggtgcctattttagtgcctttttcgcgatttttggtgccttttttgcgagctctatttattatttaatgataagtttgctttatttggagtccgttgacattatgcgccgccgacaaaaaatttgagaatttttacccaattaattaacaaatttgcacaaaaattatttgaacaaattttgttatttgccaaataaccttttttggaaccgaagcatattgatctttgttccccgttttttagggatgaaattatttttcacacaaaatacgatttgatgaaaggtgaaagcggtgtaattatttttcatgcaaacattggcaccgcacaataatttctaattaatattaattattttttttattgaattacgtaattatacacatattatacaaaatccattagattggctgggtttaatagtcaaaaaagcgttgctcctctttctcgggaagtcaatagcagtgaagtgcgtgtgcccgttcgagctcgttgttgcgctggtggtggtgggggtgaaggatttgcgacacagagaggcattagggggacaaggaggaaactgaaaaaaatgcaaaagcaattaaatattaatgaaacattattatttttaacaatttttagtccaatggaatacatttttacataattggtttaaatatttttataaattccccgcttcttttttcctcaccaatttgcgtgcatttcctgaagtgctcgttcacgcgaaatgcaagtggggtcagccaacgtgcctcttctttaaggaaaataaattcaaaaaaagttaatttattatcagcagtaatgaatgttatttaaaataaaaatgacagtgattaatgcccgagaatcacaaagtagagaaaagtttggtgtttcttttgtcctgcctgagttcggctttttagtttcgttaatctcgagaccgagataaagaatttgagttctgtgaaaaaacaaacattggacttggtacggtgtgttttccaaagtgtctggtgggtaaatataaatgcatcaaggtagaataaagaatattctaaaaaaataaaccgagttcaaaaacccgattagtccgaacaaattcgggctctacttagaactgggacaaccagtgatgcgaattggtgcgattgaattgggagcgtctaataagttgaattaattgacgtttgatataccgtattccattcatttggttggcgcatttactgtacctttgctggttgtatttggctgccgcattcattagcaaatggcgctccaaattttttcggcacagcaatccgatggaaggacttggtgtgaatttgttcaacaaaccgccgacattctgctgttgctgcctgcgcatattggtgaaccaattgatgtcatcccggagggcacgacgatgccgctagaaaaagaacataaagtctaatcgcgggtttagaggaatgagaccgaaccaccagacaatgaatgaattaatgatcaatgcccgaatcccggcttttcatttgatcaattttttctgatcatttttggcgccggagccaaaaaagccgaaaattggaaatatcaaattgactatgctctctacacgataaaagtggtttaaaagtgattttaacacatacagttcggaatgttcccttgtaagtcgagaaatcaagggtcatgaatctatgcttagttctcaaatctcttcttgtgattttaagaaaaatcattgcccatatttgtactattagaagacttaaataaattttattttttaaaaactgttgtcatttattatttaaattaattttggaatcccttggctcagcgccaatccgacaaaacaaaacgaacagactttgctcatccaaaagtacagcaatggattggacacaattgaagtcatcgcaatggcgtggacatttaacagcttgaaatacatgttggtggcatcgcgcaagaaatccatgtctctaagctggacaaaaattacgataattggttactgtatcgcgtattcaataaaaaattcaaagaattaaaagtgcgacctaagatacttaagtttttgaaaatttttcaaaaaatacggagtccgcggtaaaggaattgtcaatattcgatggtgcccaaaaatttaacaaatcgcatgggttttaaattttgaaaaaacctaccaaattcacaatggtcaaaggcatccatgaacccatgaaaatgagcaccttatttaaaattggaaattgtgaagagatcattaatttgaaaattgaaattttgtaatatcaaaaaatgaattaataatccgtaccatcaagatgagcacgtacctaaaggaaaaagttaagttagagagtgcagctttcatcaggactaatcacaacttttaaaaaagattccatgcaaaaatttcttagcaataatttgatcttgaaaaaagagattttctattttagaatattttaattcttacatattagaaatttcttgattgaaaatatttgttgcttcattttggcactgatttacactagctaacaaataagaggcgttcttagcacgaacatcacacggcgtttgcgcattgcggtctgcgcctgttgttcaacggtcattgtggaactgaagctagctggcaccatccaatcctgacgaacctaaaaataaaaatttaaatggttaagaattggagggagaccttttgtagaattttccagtagcagtaagccatgattgaagttgggatcagaaattggatgacaagaagcgaaatcttgaacaaactgatctcaattcaaaatgaaaagtcaaaggtcaattttttaaaattatttatttgaggggatgccactcttcaacacatttttatcatcataaatccgcatacatggacaagctggcggggtggtcagaaaattgcctttacgaaaataccccccccccctcagaatttttacgaaattgaaaaaacgctcaaaaattttttgatgaccagcaccagtagagaaaatttttaaattttatgcattttgctaacagattttgtagaaaaatgcacaaatttactagccgatatcataaatttttattaacaaattttcatggctatataattctgaaaaattgacgtaattcattcaaaaaaatgtgacgaaattgaaaacgaaattcaatatcgtaaaaattttgaattttggcagaaaaattttgattttcttttaattcgtaaatttcttcatatgagattaagcccatattctacgaattaacatactaattctttttttttgcatctatttgaataaaacctaccccgtaagcaagcttcaactgcatatgtccctcanngccattgtattcaccgcaaaacttaaaa

SEQ ID NO: 13326 - DNA, 3930 bp, Heterodera glycines
ttgtttgggaaaaatttggaaaattggctatctctttttctgctcacagtaataggaattccaaccgcattctcagaataattacgccgatactaattgttctggaatttgtttctcggcgcgtttgtttgggaaaaatttggaaaattggctatctcattttctgctcaacagtaataggaattccaaccgcattctcagaataattacgccgatactaattgttctggaatttgtttctcggcgcgtttgtttgggaaaaatttggaaaattggctatctctttttctgctcaacagtaataggaattccaaccgcattctcagaataattacgccgatactaattgttctggaatttgtttctcggcgcgtttgtttgggaaaaatttggaaaattggctatctctttttctgctcaacagtaataggaattccaaccgcattctcagaataattacgccgatactaattgttctggaatttgtttctcggcgcgtttgtttgtgaaaaatttggaaaattggctatctctttttctgctcaacagtaataggaattccaaccgcattctcagaataattacgccgttctggaattttgtcctgtgctcaaagctcatcaagagctatggaattataccatatttgttcggattaaatcctttaaaatcccccgtatttcaaaaatggaaaaaccgatctgtcggcacatgcaaatctgggcttttaggttcacccccttcaaaaaattcagctcttttaaattattttttttttctgtcagacatttgttaaaatattacaaaaaaatggacacggttgaccaactgtccgcttctggcaccgcagcacaaagtgttgttgacccacatgcagccgctcttcaagaaggcaagcgattttcaattaatttgcggcgcgctttaacaaaaacggggaattggggactgctgaacaggctggtggcttagctgccgccatgggatgggaaaatcggaatcttttggccatattttgaataaaatactaatttttggttagataattggtcttgaatgaagcgatgaaattaggccctatggggaaagatttggaaatttaccgaaatcgttaagataattagtacattttcaggaaatgttcaacaatttgttgccgcagcgccgccattgcctcttcctgatgcgccgtttacatttgaaaacatttttgaggtgagtctcacaaggaatatttgggatgccaagcaaaaatattcgaaaaagggtacttttctgttttcagacccccccctgaaattttcaaagaaagtcagtttctgaggttatttgtgacgctgatcacgaatatgacatttgttttgctgaattccgaaacttggacccgaactcgagcaaaaattcaaattcattaatacacaaggaaaatcatattttggtagaagttcagtttgtccctccatttttgaattttttatttttattttaagaccataaaaacatgttttaaggggttttagagaaagctgatcacgaatacaacaaaaattttgagcaattccgaactccgaacatgaactcgaacaaaagtcgaaattttaaactttcgagttacgcattttcggttcaaacaaaccagcttaatgcaaggaaacaaataaaaatcatttttcgaaaaaaaatttagtttttaaagtcattaaacatgtttccaagggttttcggggttgctgaccacgtatccggcaaacattcgactaatttcgaaaatctggtccggggttcggattggccgagatgggtgttcgaatcggattctctcatcccagaaaacccataaaatgcctttatttcaagattaaaaattgatttttcaaaaagagtgcaaccatcgttactattaccaatgtttttagaatttcagaaagatggagaattaaaatttttctagggccactccatctcttaagggctttttcggacattgcggtctagcatttgcggcttcaagtcaaaattctaggatttgtccctccatttttcgaaaaaattagttttcaaaagtcataaacatgtttccaagggtttagggtcgctctgatcacgtatgcggcaaacatttcgactaattccgaaccgcgaaccatgatttgaacaaaagtcgaaagttaaaattttcgagtttcgcttttttagtctaaaaaacattaaatgatcttttaacaaagcaatgatgattttcacttcggtttccgtgtaattaaaaaaaactttgaaccaatgaaattcgaacattttgattgaaatttttgactttgtgttcgaatcctggttcggggctcgaattaggccaaaatgaatgtcagaaaagcatttcccgccccttaaagaccctaaacaatttatctcatgaaaatttgggttttttaaatattcggcccgacatttacggcccccaaatatttgcagttgaaggatgtgacgcaactatgtcgcaaattccgcacatttctttgtgaaccgttttgccgcatttcaaacgcctgtagcccttcttctgttgggcgaacgtggcgtgggcaaacgccatgtggcgcgaactcttgcggacgaggcgaagtttgaactggttcgaatggtcgcgttggacgacaacacgtgccagcactcaatcacacgccaaaaaatgtcattgtccgccgcctttggtaaaatttggctgtgtttgtgattttggcacgaacaaataagtgggcaagggcagaatttttttatggacccggtccaaatcggacaaatcaatttttgtcataatgaaacaattactctcaaaataacttttaaattcagaaaaatagctattaattaatacgggtggtgcattcaaagaattaaaaaagtttttgcataatctttaattttccttttttgcgattgttgctcttcgctgtgttttttacagcgcttatcccattaaattaaaaaaacactgaaattaataattccattttggttttcatcatattctgccaaattgcctgtaatactgtagtttgtcccccatcttttttaaaaaaaaatttcaaaaattcttttgccctaaaaacaagtttccaggggtttttggggtcgctgaacacgaatccggcatccatttcggccaatttcaaatcccggacccgaattcgaataaaaggtcgaaaattcaaattttcgaatttctcatttttggtctaaacatgacttatatgatcttttattgcaaaattggcaacttttagaatgctttcgtgtatgtaaaccgatttcgaaccaatccttccgcgatccgaagatcgagctccgccccgatacgcccaaattgaacttttattagctccatccaagacgtatatgcgatgagaaatttacttgcgttcaactactgaaaacctagagaattcaaagtgatccaactgttttgagaatacaatacgttaaacagataacctttcggatcacattgacgtagattcactctttaatgacatgtacgtccactccaaaatcaaccgagctcgtttcgaggaagaatgcatgccgtatggcataaaaaagtgttaaaaacaaattaaatccaacaataattaagatccgcacaattctccaacccttgtagaaggtattgaagtttgtgactgactcacaaatggaagggtgctgaatcaacatgacttgcagtttatagtaatcttaaagggtcgaaaaatacgaaattaaaaaatactgctgcttatatagaaatgattgccgactgctgtagatttatggatgccaaggtagacaagcggtccatcctcgaaatagtgatcgtagatggatctactctcatcccaaaaagagcagaagccgctcaaagagttcttcaacaaccgaaagctgaacctgtcc

SEQ ID NO: 13327 - DNA, 822 bp, Heterodera glycines
agaaactgaagagcgaaagggagggagaaaagcgtttccccccgtttcactcacaaaatcacacaatctttcaaagtttcttattgggaaaaccagttttagagtgggggagagagtgtgtgggcgagagaaagagaggaaaagcggaaggaaagggaagagcgagggagcattagagagtgagggagtaggagagaaattagggaccgggaaacccgaagaaagacacagagagagagagagcgagagagagaacgagagaaagaaggagagagtggggggggggaacaaaagtaatacgaatgatgaatggcagcagatgaggaagaagcatgctggaagcgatcggaagaagcaattacttactcataaatgattagcatgcaaatgattaggcaggcgttttgccccggggcaatgatcagcagaagaaattatgtccaaaaaggtaatccgaagaaacgccaaacacttttttttattcgtcaaaagcgatgggacaattaataaaaaatttgttaattcttaccaaagggaaagcataaggtaattaattaattaattaatggaagggggggggggaagaaaaatatcagaaggcatatcccccgtcatgcgcaaagcaaaatgtgcacaaaaagaaatgaatgaaagggaatgaaaaacagttgataaatgaacaaataaaagggacccattcaaaaggcccggggcaaatgattatgtaatgaataaaaaacacgccaattaaactttaaagtggaagcacaaattgttgggtttttttttctaccggggggaaagaggaggggagagggggga

SEQ ID NO: 13328 - DNA, 2415 bp, Heterodera glycines
  unsure (1)..(2415): unsure at all n locations
atgcgaatttanttggcaaaggtttaacggtaaacacaaaataaaaatggattaatttaatttgttggctctttttgttttggtggacgccgccttttaacttggcttcttcctgctgtagtaaatccttcaaaatgcttttcttccctctctccttttccacctttctcctctttttcttcctcctctttgtgttcttctttccttttttccctcctctcttttcccacttctctccttatgtgtttacatcatccattccccttctcctcttttcttcctctttacgttgttccatttcttctgttcttcctccctttctcttccttcccctcgtccttcacatttgctctttttcctctctctcttccctcctctcttccttttccggcattcttcgtctttctccgttttgcttcctgctcctactcctcctcctccctcccttccgctgttcttctaccgccgtcatcactcggtgataaaagcgaaaagcccccgcgggaacgcccaaaacgaacactgacgcaaccaaaatgaacagcaaatcgcgcgggtggcaaaggacaaaagactaaaaaaagaaaacaagaaaagatatgataagtgatagaagtgccgactttataatcccagggaggcaaacattgcgaaacatcgtccaatttggcgactttttcccgaaagaattccgtctcgagcatttcttcgggcaacaaatcgctgacctaaagccatcagctgccgatttattcgaattttaaatataattaattaattggtttgatataagcatgcttcttcaacatctgctatctccagcactgtctgatccgtccatagggcgcggcgacccgcgcgaaattgcgcatttttaatgtccaaaagatcggagtctgtcatttggccatttttcgccacctttctgttggcccatctgagcttcgtcagaaaagcaaattgaacaacgaaaaattgttcatccaaacattgctttctcagcaaaagcacttggtcctaaaagaatttgaatttgcattgtacgcaatttttggcgatttgtaaattctcacaaatttgattttgccgccaaaagtggtcgaaagccaatgggcgagaaaagagtccatcagttgggggaaaagcgattggaagccgaacagagcggggagggggaaaagcagggggacggtgagcactttggagggaacatttcgaatgagaaaagcggatgagcaacgccgaagagtcgcggaagcggaggaacgaaggaagggcgacacggaacatacgcaatgccaaaagggggcaaacgcggacaaatggccgttgcacagtgtgtgctgctcgctaaggcatactgtggacagacacggtgttgatgatacgttgccaacaaatgctttaccgtcccatgcgtccgtctgtaattcgtgccgcgtttcgctttgagtcaacgcctgttttttttgttcaaaagcatcatttccaattatttgaattgtcaatttaaatatgataatttttcttaaattgcttgatatttttaattactaatgtcaatttatttgctcgctaattaccttattaaggcgttggtgtcttctgatcactttctcgatttgttgcgtgaccaattgtccgccagaattggacattgcgtcaacaatttccatcgtttgcaatcgtttcagtgtttctctgtccattttagtcaaatttacctgtcaacccattaacaaattgagctcttaatcaattaattgtgttaatttgcctctcctggatcaaatgtgtgcacatatctcatgccaattgtttggttggcacttttacggtttcgattgtattgactacaaatgattttaagcttcgttatttgctcggcactgataaaattttcctgaaaaatcaaaattaatttcctctttttctgccattttagaaatgacccttgagagaatgtttccgaaaagatccaatttggagggcgttaaacgacggccacgaaagcgcttaagggcaattccatcggccaaggaattgccattgtacgattgatttggcattttgccatcgaattcaaccgattttaacagaaaacgttgacgaaaacaataaagcaaaaggagaaggaacagaatgaaaaaggacaaatgccatggagaaaaacactgacggcggcgtaggaaaatattcattttggagaaaaattggaaagggacaagaaaagactaataatgtaaaatgacgataatggacatattcggtcctaattaggtcctaattagttcctcttccgttttcttcctcggcccaatgcggtaaatcgtcgtgcgaattgctcttcttcccctccttcgccctcttctgtttatggtcgtcctctccttcggcgattaatttgtgacttct

SEQ ID NO: 13329 - DNA, 939 bp, Heterodera glycines
gctgttttgtctattctgctgatcaatgaccaatcaatcattcaattcattaattagttgtacttttcctctttacttgattgaatttatcagaaaagacaatcgcttcctcgcgcctttctttgcttcccctccctctgtttgtccctccaaaatttcaccttgaccccccccccccccgtttctccgatctctcccccctcccttccccatccattctttctttacccttttgatcattttcttcgcttattccctttttcttacatttttattattttttacattttttcgccattttgattcgaatattttagtttcattccgtccccaaatggcttcttctttttcgtcttcttcgccttccgtcctccgtttcgagcccaaaaatgtgttggtcactggcgcctgcggtttcattggctcaaattttgtgaattttgcctttgaaaagtggccgcagagcaattttgtgaacgtggacaagttgatactgaacagtgactgtaattacgtggcacggaaagtgcgcaattcggcgcggtacaaaagcgaattggcggacattcgcaacggaaaagtgctgaaaaaagtgttggagcaaaatgaggtgaaaaagggagaggaaactaagaaaattgaaatgaaataaaacattcatgattaatgaaattcatcattattaaattgattcaattaagaaacgacgaacaaaaattgaaattagtaaacgaataattttttttaattactgttaatacatcaaaaagaaacgatttaaacaaatttaatttaattgattttttggtaatgcgtgttaattttgatttgtcaatttaataattgctttaattgattgatcagattgatacgattgtgcacttcgcagccgattgcaccagcaagcgatgctatgaacaacccaatggaaagcgttgg

SEQ ID NO: 13330 - DNA, 4392 bp, Heterodera glycines
cgactgatcagtccgtatttggtcggctggaggagacttctaccacgtcggattccaattggtcgagctgctcaagcatcgaactcagatcccttaattggcataaaaagtgcgttggttaattagctaattgcccgttcttcttccgtttattggttttttccgctctcttctaaattggcactgtttcggctttctctccgtccgcctcacttttcttctttgcccggttcggtgcgcagttcgatgtaatatttcactttcggctccgttccgctcgcccgcagtgtcaccgcacttccgtcgaccaaagtgaacgtcaccatttcggaggaggtgctcagcggcagaatggccctgtcatccggttgagcgttgtcataacctgcaaaaatgccgttccgtggttttgttttggcaattccttctcctcaaatggcccacccgtcgtcaagtcgcgcacaaatttcacatcgaaattctgcccaatcgtttcgggataatcggagcgaaggtccgcaaataatttcttcgtcacttccgtcgatttgaccccccaatacgaattgcgttggaggtgaaagccgtagatggagaagaggcggaagagctgttcacgcagcgaaacgcccttttgggtgcgcagccaattggccatttcagcaaagaccgcggcggaagaaacgccgtcctatgggaagaaagcggacgaatggtcagcagtcaaaaacagacaattggccgctaacagacaaaataggattaaaactcaaattctttggcctttatggttcactgcctttcccagcgggtcattttcccttgaaattttaagttcaaaattccgaaatttttagtaaaaaatgcctggaaatctttagaatttttttggttgactaaattctgccgcccgtgcccactttgtccagcgttgtgccgggagtaaacccaatggactcctcccaggcggcaataacggtgttgccttccgaccgcaatttgtgtgccaaattgcctatgtatttgaagcccgtcaacgaatgcgccgctttgaagcctttaattggaacgaaaatagccaattcatttgtttaattaataattaattgagggacagaccctcctttttggccattgtggcgaccatttgggaagagacggccgaatggaggacgaacacccgcgaagagtccgccgttgggttggcggcacgccaattggtccacgcccaccacgtcagcagaatgcccatctcattgccactgaacacgcgccactctccgctgaaagcaaaatcgaaatcagtcaaatgccaattcaaatttggtcccgttttacggactttgcctctttctccgccaattggagtcggtcggcgtccgggtcattgacgaggagcaaagtcgagtcattggcatttgcagtctcaatgcacagtttgaggacccggtgcccttcctcggggttggggaatggaacagtgccaaagtcggcgtcgggctcgtcttgttcctgaaaatttgaatggaaatgagtcaacaggacacactgcgcaactgttataaaaaatacacacaaaataccttaacgtacgaaatgttctccgagggaaagccaaactcagcgaacattcggcggacgaatttggagccgacgccatggaaagcggaataagtgagacggagggacgaagtttggttgagcgaccgaaaatggaaagggaagggagaaccaaaagtgtgccgcatggaacttgtgatggcagcaaatggcactctccccggcaaaatatttctccaaaaccgagtcggccgagtggagaaaggcacttgtgccgagttggaccgtgtcccaataggcttcttcgggctttgactcctccgcgacaattcgacaaatttccgtgtcgtgtgggctcagaatttgagcaccgttggcccaataagccttgaagccgttgtcctccttcggattgtgagaagcggtgatcggaaaatggaaaatattaacaggggaaatacaaatggcaaacaaaccaaccatgatgcccgcagcacaacccaaagaaacgacggcaaacgaaacgacaggggtggggacgacggcggaaaagagaaaggcggacagtccgttcagcacgaaaacattggcagccaattcggcaaaactaagcgtggaatggaaatgccaacgcatactttacaggccttttaccgtttgctctgatgtcggccatcgaagccaatcacaacgcctttctttttgccatcttcgcccatttcacttgtcaaatgccgtgccattccatgggacagttggatgatggtcaattcgttcagtctggcaaagcccgcctccatgtgcgttcgaactcctacagaaaaactcgggatcataactcacaaccgagaaacccatcaaggcacctgccgtcccaaaagacaatttcccaaccatccgaagtcgcaattcgtgcacattattctcttttacgagtcgttcaatttctgttcgagtcgtttcattctgaaaattttacacaaattaaatacccacaatttgtgatgatttgattaattaattagatgacaataccttgtcccagcataaccatttgtttattaattcttgaaggtaggggtccattacagattggtaacaatttgtttgctaatgaaattatttagttggatttaaaaaattgtagtaatggatagtttgaaatatcatttttaattagcgttgtcttacaaaaactttaattattcatcaactttaattaaaacatttctccgtttttacaataatgattaggtatttagttgagtatcgatactgattgattatcaacataaaaccattgttaggtataagtacacacaacgaatgacgtcacatactgactgtgagagactgacaaagtgactttctgaaggaaacgagtgtttggaggccaaaacagacaaaattgatcatacatataatatgaaaagtgaaatagcagtgggagaggaatttctgctgaatacaaaaaataaatggacatcgaatggaggacttaaatttaaaacattaaaaccgaaacccaacgtcctccatttattaaagcttttgtttgaacaagcaaaagtgaatggaatttgaatgccttcgttcggttggtggtcgacattcctcttaaacttgcgtctgcagcgtcccatcctcaaaaacgatattgctgccgccggaagtggcgaatagtcgttcgacacgcttccttttccttcaaatatttgtataatattgtaatattatgttacatcgaaaatgctgataaaactcactccatttcggtgctgggcccaatgtgtgttgttttggaatagtacgaacgacgttcgctggtgccccgttgtgaaagcggaccgccaatttgttgttggtactgaagggtaaccgcgtccaccgccgcttcctccgccttatgttgctgctcttcgtgctccgatattcgcgacctttgctggtgttgtcgcatcggagtttgtttcatggctaaattaaatggaaaatttattgaagtttaattatttaagctgaaaacattaaacaaacaacaattaatttaaataaaagaatcgcgagggtttgagttttaaacgaacgtgtcaaaaatcaataagcacaaaacacaagcactgtaagcacacatttaaatgcaaagcccaaattgaaaacgactcaaaaattgctatattttaaaatttggaccgtttaattttctaaaaatggacgcggtatgaaacagtgcatgcctttgtacctaccgatgtaggaatggacaaaggagcgaaactttgaggatggatgcctaactgacggaatgttgtccactgaaatgcaattagaaagcaggtcattgaacaaagaatttgggaaaggcttttaagagtgcactgacccacgcaaaatgctctgagtttgttgttgaccaaaacttattcccggtctctcacacatagtttttgtaattcttttccttaataaattcctctctcttaaaatttgaaatggcttaaagccttaaacccggggacacaacaaagagcatgggacggggctaagtttgatgaaagggaaatggcagttctttgtcagttggacgccaaactgtccgatttgttaaaaatcacagacttgtcgattgtgaaattcgccggaacacaatggttgagacaaaagtttggaaacgcaacgcatagaagcccgggtttgtaacggaaatactttcctaaaattttggaaagataatctctggatttataataatattaaaaaacaaaccccgtcgtgcagtacgctcttccatgtagtgcaatctttttaaaaagcccggtagctctgcagaat

SEQ ID NO: 13331 - DNA, 643 bp, Heterodera glycines
caaataatcgagatggattgaattcaactgattgagatcagtgagaattgttggcgaagcatgacgcagcaaattgtccaactgagcaccaccgggaaagcacaagcggcgaatgtttggcgcaaaaattggccaaatttcacggacgaaaacatcccaaattggctggtcatctgtgccgtatggggaaagccacagacgcaaatcggtgcctcttccgtcaaaaatttgctgattggaacggaggaatgtgatgacggaatgatcgatacacctgaaaagcaaatgctttacataaatatcagtgaaaatcctttgatttactcaattcgaagacgattaaattgataaagtttccaattcacttaaaataggtaggttaaatcagacgttttttagatataataaaataagaaattaaactaataacatttacaaaagtttcaatgtcttatttttgttgtttagttttgatcacatttgatcagcaataactctcttcgttccccactaatcttaacaattttgtgatcattcgaaaaatatcgaaaagaagaacctttttctaagccaagactgatcttttattaaaaaattggtaacttttagacgtttgcgtgtatttaaatcgatattgaaccaa

SEQ ID NO: 13332 - DNA, 3139 bp, Heterodera glycines
gggggggggggaaagcataggggaacaaggcgatgcgttaatgtgcctcttctatacaaatatcctgtcacatttgagtccaaatttgtcccctcgggggttctggattttgaactttaaaaatgctctttggtgctaagtttttgtcgtgattcgagaacaaggcttttaaaaagttgaaagagttctcgaatgatgaggagcaagcgtttgcctgatccgatttgttgaaaaaccatgaatactgtaaaaaaatcacttaaaacattgaatttttgaacccaaggtccaaactcgtcaaatttgaaactcaagaggtttcttgagctcttgagcattggtcatgggagacctgggataatattcaattgaaaaattcttttaagattcggcagttaatgggttagcacttaacaaaaaccaagccaagactaaaaaactgaatatttatttcctctgataactctgatcagacttctttagagcattctcagtctaagaaccaaaacttagtaagctcgaaaataaaataaatttttgtgccctgaattttgttaatactcaaaagggtataccttgagaatagggcaattaaaatccgagatttaggtgagattctcggagccaaaagccttccagtcatctcgagaaaaaataaatgtcgagaaaaaggatggcgggtgaacaaagttcaccacgtcaggcgaactttgatgagttaatcgtttgatgctgctttttgggtgtcaggtgaacatatggggggggggggagaagccggtggcaacaaacaaagcgctttatactctcggggccaaaataataattggcacataaagcacacccatatccgtgccaccggttgttcagcaaagctgttaagccgcccgcccctctccgcccggggcatatcatatagcacatgcgtagcactgataatgagcaaagatataatgggataaagggagaagaagctgctttgagccagctaatcatcaattcaagcggaacacaacacttcttccctccccaacaaaaaaaattgtcacacttactctgtggcgtggaagaaggtagagaaaaaagtcgagagagagattgggaaaagccaggagattgagtgagaaagcataaagactaggctaggcaaaagccctgagagagagaccgagagaggagaggggacagaacgccaaagaaaatcgcctggggcataatgccaatggcacaaaaaatgctttccccagcgcgcattcgcccccccccccgaaaccaaaaattaaaaaattttcagtaaatttttttgaaattttaagcaattttcttaacaaaattgcattaaatactcaaaaattttcccggcggcgcctatcggcaccgccggagccccattttaccatatttttgaaaaatggaggccaaaatggcaaaaaatattaattttggcgaaaaatggctaaaaattttgtaaaatacacccaccccataattcgggatttcaaaaaaccaaaaatacaccccctaaaaatcgacttaaaaaggaaaaatacacccctaaaaatcgactttttgacttcagcccccccccccaaagccaagggtctggctacgcccttgccctcgacctcccgacatacagtgtttaaattttgtctaaacaccaagccaaagaaatttttatgtcttatatgatcataaaatatggcctaaaaagtccgaaatatggattaaaaagttaaaatagccaaataaggatcaaaatattgactaaaaactgcaaaatataagttttaaaccccaaaaaattggtatatatacaatatttgcttaaataaacttaaaaaattcacgaaaaactaccataaaatggatttaattttttttaatatgaattactccagggaattccccgaaaatttttaatttgcttattttcaagattgtacttaaaatgagcattttaaaaaacagccacaaaaagtgcatatgcagcgaaatgaaaaaaatagtcagcgaaaaccaaaaaaatatgggggaaaaaatccatccgggtgaaaaatttaacacaccgagtcaaaaaacgagacatgtgtcaataaagagagagtgcagagaaactttttttctctaacttttctctccttttggcgtactatctaatattttcattaaatcgcctcgagactccaaaagtcattgacggcgcgggatgaggggaatgactcgactttactggggtgggaggtcagcatggcaattgtcggggtgtgccgtggggcctcgggaaactcagcttctcctcccaccatcggaccaaaaccgtttggatgaggtggagcccggaatggagcattgaacagccggtgaagaattcccaaaattctcggatgccaatcagaatgtccggcgctttttcgacgagcttgaggacggcattaggagggaggggtccatcggtggtgtcccattgaagggccttgattttggtcgtgatttcgtcgattacgttaagctcgagggtctcccagcctacgtccaggcgctgcagttgaatggcgaattttgctgatcggacggttttggggcgtgagtctccgaaagtgtgaatccgaaggaggtgctcagagaggcggggggggggccgtggcacgactgaagttgtgagacgcatttccattccgctcccgattctcttgtcgattgttggttcgccctggagggtcaattgacgggcagaggaggaaatgatggtctttagcctggcattttgagcatcggtctttcgcgagtaacatggtcttggcggaggcaacgcaggcagcgcccctgttcctcaagtcgtcgtcggcgctgagtgacggtggtgtatcgctggcaagcgctcggacggtgtccctcctgctcacaaagtgagcaactgatgccgttggcagagatgggttgggctagagcaggaaaggtccgagtgttctccaaataacgtcgctccggcgctgctggtggtggtggtgggcgagaagaacggcaaacaggacgagggagtgcgggggctctctcgggggacgttcgcggggttggatatccatgtcctgggaagtacgcacacacaaatccacctgctccttgtcggtgacgattg

SEQ ID NO: 13333 - DNA, 1073 bp, Heterodera glycines
cctaaaaatttatttttcaaatttcaggtattttttctcctttggaaattttttgaaatttaattgaaatttttcgacttccagtcccgcagcgggatccgcaaatttgaaatttccagtctctatttgcaacaatcctgctttaattaatttaaaaaataatttttatatggcgaaatgttctaaaataatcagagaaattaaaattgcaaaaaacatggaagaaaagatttcgagaaagcagacactctgataaaatgacgtcacagaattgcatttattaattttgttggctcccaaatttttcatttataaaaactatcaatgaaaataccatatttaaaaacaattaaattttctttttcatattttaattttttcagcaattttttttagatagccattttctattgttgtatttattaatttcacacacacatacacaacctcaaatcccttacattcgcatacacatatttattttatacatatcacaattgtattcattccgcttggtcaaaatggcaagcccgcgaactctaaaagtgcttaaggagctgagaccaattgacgaaaacaatgtgcgttttcaaaaaaaaaaaaattaaattttatttttggtatttttgcagtttagtgaaccctatgaaaaactaaacaaggggacagaaacccttaaaaattccaacttacatttcatgatttcttttaattttaagtcctgttttgagtgccaagcggccaacccgcagtgggccagcgtttcctacggcatttggatttgtttggactgttccggcaaacatcggggcctcggtgtgcacataaggtttacacaaccaggggctttttgaggatttttgagcaagagtttggtaaatccatcaaacactaaagcttagcatttttgatatcattcgacattccctaatttttctgctagccttaaaaaatttaaaaaaattttgatgttaaatatgcatgtcttatagtaataattgtatacctacctaattgtagattacaaggaaaccattcgaactgtaagattccggggtacttatttgttatct

SEQ ID NO: 13334 - DNA, 2428 bp, Heterodera glycines
cttcgtcaccgctcgaaactgactcattcaataattcctgctgatgctcaaagaacacagtgcttgaaatgtcttcgggattttctttctttccgcttgaatccgatgtttcagtcggcaattgtgaggtgggagttgacaagcgaggttcttgaatcttgagaaaaaagagacgtgattcaatttcagcaataggctgagaaaaagctctagtgcactttaggcgttcaatcaatgaccaccttcacccccccctggcctttagatcttctagagccgaaaagagctaggaatataaaatgttcgctataagtgcctttaactcatctaaaagtgatcaatttttggataaacttatttcataaaactacctcagattcgttagatgttacagacatacaacgaaaatcttcgtcaccactcgaaactgtctcattcaataattcctgctgatgctcaaagaacacagtgctcgaaatgccttcgggattttctttcttttcgttggattccgttgtttcagtcgacatttgtgagtttggatccaataaaatggaccgcaattcctgtataaattcatagaataagtgcgtatatatatatacttgacatttaaaaaaataatcgattaattaactctgcgcattagcattttctgcacatgatgctgggtaatagtggagaattggtgtcccggcgaaaaataaatttaaaaattttcttttctagttttctatgtaaaaaaataggctgattacggatctgagtccagaattcgaaaaatcattgaattagtgtatgatttttcatcaagtacttgatttttcttaataaatgttcatgtcagaaaaacatgcattctgggattttcggagtcgctgatcacgaatatgaccttagttttggccaattccgagtcccggacccgaacttggacccaaaggcgaaaattaaaacagatttttatgtgtgtgttttgaacttcgacttttgttcatgttcggtccgggattcaaaattggtcaaaattaatgttttatttgaaaacacctctaagaaatttagaaaagttaaaagatttgttttttgttgtttttctggaagtggggcggtaattatcagctccagggtctgaacagcaaagagaagcagttttcaaccagtttttcggtattttagaattaaaaaaaaagattttgcggaaaagcattatctttgcttcattgttgagctgaactgcgcatgagcgaaaccacacgtatggatggcccaatctgttgtggtgcaatttttgatttacagcgaaaatccgtcgtttgaacacaaaagggaacaccgtttggaatgcctgctggcgatactccgaactaaaataaattaaattattttttacacattttagtggaagactccaattttagtcatattcccgaaaaaattttcaaaattaagaatttctcaattttatttttattataaaaattttggcaatcccgaagaatcgggggttcctaatttaggtaactttttggtacttttcggttttgtgaccccccctgaaattttcaaataaaaagtcatttctagggtaatttgggccgctgatcacgaatatgacatttgtttttcaaaattccgaaccttaattcgaacaaaaatttgaaattcataaattacaatgaaaacatatttttgggggttttagaggtcgctgaaaacggttatgacatccatttgaccaaattcgaaacccggactctaacaaaaaaaaaaggaaattaattctcgacaaaataaaatatgcaaaaccgacgcatgttatgggtcctcaaaatcgttaaaactatttttaagccatagtcagaaattggtaaaagaacgtcaaatataaaagattgaatttgcttattgcgctaaaaaaccgccgcacactcgactacgcccactacttgctccgtcttcgcgtgctcccttttgcgaaattttgcttttaaattgttatttcccgtttattatttttcggtactgaaatgtccattttcactgggacttagttgtcccagtgctcagatggcgtcggttcgaatctataccttgttttttaataacttaggtcatcaagagctttcgaatgataccaaatttgtgtgattttgaccgttttataagcttaggtgcctcccttttcactcaaattttcaagttttaaaccggttaaaaaaccggtttaaacgcttttccgcgcagttttttgatggtttaggcgttttcagcacctaagaaaccctataaaagcatttatatgcaattttgagtctgggacctatgatggatatttaccttttaaattttttagtaaatttcggttttttgttcaagtcagggttcgagtttcgaatttggtcaaaatgcatgtcataatcgtttt

SEQ ID NO: 13335 - DNA, 2791 bp, Heterodera glycines
tctttattctctttgttgatttaatttttattgttcccccccttaacattttgttttcttattgcttttaccattttatgaaaatttttttgaaagaaattgcaattcattttttgattgaaccaatcggcagcttaagcgcttaatgggccgtaaaaaacaaataagcactaatttgtaagcgcatttcaaacgcaattaaattggcacattaaaaatcaaaaatttcgacatacaatcttctcggcatcttcgaaatttttccagaattggctcgattaaatgcattgaaaaaattggcaagcaaaaaattcacacaaatcaccaaaaaaattgaactaaaaacagtttttctttgttttgctttgattgataactcataattctgtcctctcccaattatcatctcttttggtgttctttcgccttttttccatttgcttcgttgtcctttttgttgttgttttcattgtctgcgccgtcctcaacgcctgcggggccatttttgcgcacacttttcacaattttgtgcatccgtttgaagaagccggtggaggaggcgggcggttggtgttggaacgcttgaatacctacaaaaattagaattattaattataataaaaaaaaattttctttgcgacgaataaaggtactgccgggtctttttttcatattttttggggggaatttaatcccaaaatggcaaaaatcaatgtcttttttttggcgaaaaacggctaaaattataaaattagtgtttttctcctcggcaacgacactttaaaaaataacacgagaaaaattttttgaccaaagagcaaaaaaaaaaaaacaaaaaatgaaggattgcccgctccgatattttttccgaccacgggactgttctgtagtccccgccaataaaaacaaaataagtttagaaaaatgattaattgcgtgaaattaaaaaaaattccaatttttttttatccatttatgacttaccaatggaccacttctccagcgctggcttctccaccgcgtagtcgggcttgtcagcgcaaacgttgtgactcatcggcaccggcgtgccaagttgcatctgacaaatgatgagtgattagcaaatttttttttttgtgggaattaggggtccagcgcagcgacggtccttatcagattcaggcaatttttttttgtgtttttaaggaatttttatttccatgaggtgggtaatcagagccccctgtgctcctggggtgcactacgtttccccccgtccgtatcatttccctaggaaaatttaaaaaaaaagtcttcaaacttatagaattttattcatcgtcttagaattttgaaaaatgaagaaaaagttttaaaatatttttgcttgaaattttccaacaaaattttttttaagtaaaaaaagttcgaagtgaaacggcagtgttccgggggtgccgccgggggaaaattggaatttaaaaccaaaattccgtctccccgctccactcgtcccctttttgaccaccttcagcaacatcgcagtggcctcctccttctcctgatgctcgttgctgttgttggctgtggtggtggttgatttggcatttgccgtcgtcgttgacgggccttggccatttgcggttgccgaagggcacggcggcggtggcacatcagccgctgcggtggtggaggacggcagcacaacgccagtgaccggcggtgctgttactgcttcatcctacaatgcatttgcgtttcccaaggaaatttgggcggctaaaccaccaaaatcattggtcaatcgtccaaaatcccggccaaacccgcgaaatctagccaaatacccaaaatcccgacagctgcccctaagtcctgccaatccctcaaaatctcggtcaaatcccggctaatccccctaaagtcacgattaattccccaaaatcccgtccaatccacaaaactcctggccaatctctcaaaaatccctgtcaaacgcccaaaatccagaccaattcaccaaaatcccggacaatcccccaaatctcggcttatcccactaaaatacgtgctgattttcccgcacttttttgcgcacctttcgcctctttttgcccaactttttcgtcgtccttttgccgatgcttctcttttccctccgtttcgtcactttgtcatcattttcggcgatgtctgtggcttttgttttgccgttgtttctgtcgctgtgcgtcctcaagtccatgtcctgggaaaatgtttggcgatacatggaaattgcttctttttttgtttatttccaaaaattttattggcaacaactttgaattttcggagtttgatgaaagcaaattttgttttttggatgcagcaattaaacgcatttgcccaccctccgatgactgatgccccccggtccatttgtgccccggataaccgtatttttttaaaggtgctatgtcattacttaaaaaccatcataatgggcgttacttaaaaaaccatcataatgaaaatttttgcttataactttgctctaaaaagaccaaatttttaatccttgctatcattcgatagatctaaatgttctttatgagcttgtaaaatttcaaaaaattttattaagcttaaaaaaagttatggccaaaaatgtacgaaaatcaaggttttttgagttcctcgagctataacttttttgaaacttaacgaaattttttgaaattttgcagactgatagagaacgcttatggctatcaaatgatatctagaattaaaaatttggaagatttcgactcagtgatacataatt

SEQ ID NO: 13336 - DNA, 1907 bp, Heterodera glycines
  unsure (1)..(1907): unsure at all n locations
ccgccgctttcctccacgacgccgccggcgccacctccttaaattttttgcgccgcccctcctccgcgnccatttcgcccttcaaaatttggacggacgaactgtccgagcggtcctcgtccgaaccactgaaagaatggggggaaggggaatccttactcgactgccaaagcaaaacacgtaatattaaatcacgaatctttttttttgaattttccttttacgtttgccatccacgccaaatgtgagaaaaattagagcgcggaaaaaaatgcccgaaaacgaaaacccagaataagcggaacgagactctcgccgttttcccgtaaaatctcttgcaaaaaaagacgggattcccgggttttccggagggaatcccgaagcccatcaggctccagtgaccaaaaccgccaactccacaaccacctgatctcgtccttcagcaccaactcgtccgcttcgccatccaacccgtccgagccggttgtgttcattgtcatcgctgccaatttgggttctccaaaacaacaaatgctttttttgcaatcaaaaaaataaagaaatttaaatagaggaaatagcgctaaaaacggcgtcatttgtcgttaaattttgacaatggaaaaacaaaaaaagtgctcatttattcaattattaaaaatgcaaaatttatcagcagataacagaaggaaaaaatgaatggatatgaaaaatagcaaataatgatcacataattgataaatccaagaaaaagcaaccagaaagccattttcaataaatgtaaaaaattgtttcatatttcgtaaatttttgagattttaaaggaacaaatttagttaggaaacataaaaaattcaaattatttaaacgctgtctatgccattcaaaaacgatgaaacatttttgaattttaaaatgattttttacaaaaataaaatgggcaagtccccccaccccggtgccctcttcttttgcaatgttttatttattttggtgtgagcacgccacgttcgatcaggtcgggaatctcgacagccatccatgggccaaggccaagtgagtaccaatattctggtttttttaattgatggtgccacgaaaaaatggcaatttttactgtacttcgactccctagacctccatttttccgagcaatttttttaaactcgtataaagttgtaatttaaataaaatgccggaaccggattagaaaatgttgcttgacaaaacaagaaacagcagcgggaaaaaggaagtgtcgatacaacggaatttgaaaacctaggatttttgcgaaaattttcaagtttatttttataattttttgaaatttgaactgtcatgacaccaaaatgccgtctcccctcccccgcacctttcccgtcgtcggctgccgaaactgttccgattctgtgaaatacggcgcgcatcgcgcggctccggacacttggacagctcatggccaaccttgccgcaattgaaacaggtctaaagatgaacataaataatgatggtgaagaaaaaggtgtgtgccattcgatgtgtttcaaggaatttgagccaaaatttcctaattccaattcaaacccaatttcaatggtgtattggggcgcactccaaatccgtacaaaaatctctcagcaataggtagaattaacatacggaaataaaattttaatgccaaaaaaatgccgctcatggacatttaccacccgacatttgctttctatgtttaaaattggattcaaaatttgtttttttaaatctttaaaaaaggataaacaggcgcataggtagataaaaatttgttcccggatttgaaaagcggccctaaatttgacaccatttttgggcatagacacaaatgtttagtcaagggaaagagtgccaacggacaaacggacgaa

SEQ ID NO: 13337 - DNA, 3546 bp, Heterodera glycines
  unsure (1)..(3546): unsure at all n locations
atcagcgcttacacaggcgctaagaaaaacatctcggtcttgaattttcacactggacttgtgctcgggtcgtcgacgggtacagacttgattcattcagagggtctcncaacgcttanactgttcctagagaaattgttattttcagacacaataaaatgattattattgcaaaatntaaggcgttttcttgaaaagataccttccgctttgagctgacattgtgctgaatcagtcctttattttgcagcatcgctgcatgctcttccatgctcatattaataaaatcgtcgtcaaggaccatatttacttttcctaaaaaacacaatattatggatgaaagaaaaatgtgcgaaaattaattataaaataatgctttaaatgaactgtctcggttaacacttaaggaatgagcatcggtggggtggatataaagatattcaattaaaattatctttgtaaataatatttttaataatttaatttttgaattatttttttttattatctttataattactttttgactttttatcttgtatttttaaaatactatcttttatagatctatcttctatatttatcctttttaatgacaaaacttcataacatattgtgaaagcctatttttcaattgatcagcatttcattttccattcccttttcattttaaattcctccattacgaataaaaaaaacacttttcgtttgggcttcaatctctgctggtgaaaataatgagatgcaattattcttttatttatgaaatttgtttttaataatttaatttaggattgctccccgacccctcgggggggggggcaaaatgtcgagggtcggggacctcggggggcgacatgtcgggggtcggggcggggaataggcccaaaaatgtcagggatcggcgtcaagaaccgggaacgcgggaacaccctaaatgaaaaatatttttgaaggggggggacaatgaacgaattaaggttttttaaacattaacaaaaattggtcaaaattttcctttttttgccggggataaaaaaattttaaatttttaatccaaatttttaggaaaaaaaaaacctttaaaaaagcgatttttttttttataaaatttttaaaaaaggttttggcccccgaaaaaaaaaattttttaaaaggaaaaaataaaaatccgttaaaaaaaagagaaagtcccaaaattttttttttaaccccccccaagaaaaaaaaaaatggggttaaaaggggggggtgcctctttggggggtttatttttttttttggggggggggggggggggcccccccccccccccccccccccccccccccccctcttttctgcttatcaattattttatgtctgcaaagacgttnaaattctatgtcactctttcgtcagtcacgcnntaatcaggcgagtctagcagtatctcncaatccttccgtcctcctccccactctacggccatctcctctcaaacctgaccaatttttaattgttaattaattaattagtgcagcacttgctcccttttcggtagggtacgttagggacccaaagaaaaattgtttttcggcatcgtttttcatttattttcctctttcgtcccttcttcggcgggcagcattaatccgcggaaagaatgcttcttcattgttgctgttgtgcttcttcttcaaacttccattggcactgcaaaagtcggaaatgttcccgcgtccgttgcgccaccgttagttcctccgcgctttggcctctgctcctctttaggaagtacaaatacgtgctcagtgagatgatggcatgcaccgacagaatctaaggaaatgcgacatttaaaccacaaattaaacgacaaattctccgatgcttaaaaatgtccactgatttcgcagcgctgccccatcctaattagcaattaattaaacattcttaatctttggattccataacaaacctaatcttaaggatttctaaaatccagcaggggtttcgaggcaagaagccctaaggccgtgtgccgaaaaggtggcactttccttggttggaagcagaaaagtccaataatgtcaaaattgccaattttgagatgacaaaaatatgtcagcagaaatcgacacgaaattaccaattgaatgccttcgtatgctctgttgtacacgagtaagcccatttcgtccttataaaagcgcacaaaaacggaggaaatgatgaaaatggtgaagaaaagggtgtaggagaagtcgagcggaaagagcagacgaattgtcacaatattctcattggcctgataacttcggctcagattgtacgccatcactttgttccttcggtttttaaagtttccaatttaataaattttaatagaattctaataatttactaattgaaattttaaatgaattttcactcactttgccctttgtatcaccaatttgttcagcttaatgagtaaataatcggccaacgcaacacaaatgaccagaaaaaggaagaaatagtgaatgttgatgaacacatgcgcattgaacgaagtggtcatactgtaataacagaaggggtgaatacggtaggggcaaatgggtaaagcacaaaaaacacctcaaatagaccaaaggttttgagaaggttacggtgtccgcaaatgctgtgatgacaatataagtggagaaaaggacagctaagagccactgaaaggggatggaaatcgaaaattatatttttaaatattttatttaattaatttcggctaatatatatttaaatttattcaaaatttcttttatttgtgctaaccataaaaatagtgatgccaattccgcattttaagccttccctttcatatttgcccacaaaaatcgtagctcgaacgcgttcaaccttaaaaaataggtaaacggaattaaaattacaattttgaatattattttagttaatatttatcattttgaatattaatttaccataattccaaaatggaaaagcggcgaagcgaccaaataaacgtaagcgggcatacgaagcaaaaaggcgagccaaattggggtcaaacattggcacgggtcggaaaaagtggcaaaaatcaactgaaaagagcaccgaaggaaatggcataagttaaaacaaaatattaccaaatagcgaaccgaagtgatcagatagaataaaccaaaaatagcatacagaaaaagcacatttagcaaaagtaactaaaaaaagtcaatcgaaaatttaggggaaattaattattattttttaatattatttcacttttaaatttccatgcaatggcaaatcaggtttcttggcaataaacactgaaatgttgagaagcaacagaaggatcaccgacccggtgatcagatgggcccagcggacgaaaaaatagccaaaatcggtcacgtaatctttggcattggcacaatcagccagattgggcgtggacacatttggggggatggaggacgaattaacgaacataattagggatattacgaaagataaagttattcgtctgcaattggcctaattcaagattttaat

SEQ ID NO: 13338 - DNA, 955 bp, Heterodera glycines
aaggagcagaggagggagaaaagagggacaaaatatacacactcatccaaaaaaagttggaggaagaaagcattgacgagggacgggaaggaagccatcaaatttggaaaagtatagaattgggtccgttaaaaaaaagcaaattgcatcattaaatgtgactaaaaggattttattaatgaggaaatctgtgggaacatttagggacatcgcgtgaagtgagaagttagtcaaagcaaaagcattgggaaggaatctttggtagagagagacacgaaaaaacgtcagagagagagaggagaaagaatgagtcatcccaagttaaattcatttaattatgctaagtaagttagcaacttctgctcaagtttctaaagtagtcgtccgaatttgaatcttaaagattcaaataatgaaagtcaaataaaagcatttattcgaagaggaggcaaaagcattcattctccatataaaataagctttgaggagagagtccaatggcgaatatttgcagtcaaacggattaaatgagcaggaaaacttttgatcggcttttggacgggtcggatttccaaaagatagatcaaaggagcacaagtgcacccatctgggcaataagtcaaaactgatctgatggaccacatctgcaccgatggaccaacaaattgagggcatatgtttaagggggggggatcagcagtgagcttttgggtatcccatgccgtcgggttgaatttggcaaaggattagttgccagaaaacgattcaaaacgggatttcatgatacagatggcaagcagtttgctgtttgagtttaaccgaattagaaattgtataaattggcggcgttaaaccaaaataacgctttataaaggaaagccaaaaaaacaaaacaaaacaaaaattcaaagccctaaaaatttaaattgccttccaaaatgtgataaggtgggaa

SEQ ID NO: 13339 - DNA, 2083 bp, Heterodera glycines
aatggcgtacactgcaaacgtcaacactgctaatttccatggcacacttccgaagaacaacacgcaccattcattggccacaaaattggtgaaaaaacatttttatttaaatctaatttattcatatacttttaattcattattttgaaattaaataattaaaaatcaattttgacttctacttttactcttctttcaaatttcagaacatttctcattttttgactgatcatttaccccactaaaatctgataagcatgcctttcaaaatgattttctattaacttttctattaaacataaagtttaattaattaattgttaataagttttcactatcaataattggattaacttatatttcatacagaaatataaaaattttttaaactcaaattattcaaaaaattttgctttggacagccaacaattcgctcttcccaaccatttgaaaaaatttcaaaaaaaaaacacagaattttaagatgttttgctgcaaaaatgcactttaaaaaattttaaattttaaaattattttccattcggggaaaggaaacaatttcgtaaaagacaatatttgggaaaaataaaaaatgaattttttgtgccaattaaataaatataaaaaatatatatataataattcctttccacttgccatttcagctcaattgccttccatcggtcgctattcctttgccatcaccggatacgacctcaaccaaccaacgaaaacaacaaaagcaacaacaaccggggttagtttctcacaaaatttgttcccttgagctaaattaattgcaatttttcaatttcctcagcctcaatggcctgctgcgcactgcacaagttggacgcggcacaccagtgtctgagcatgatcaactacgttgttcgatggcactgaacgacggcacagaaaacgaaattggttggcaaaaaagcacttacacacaaacaaacacattgttaccctttttccatgctcataattaaacaaacatgcttttacataaattgctgcacccaaatcaacggcttttgataaattacattactgcaccaaatatacacttacacatttttaaattatgctgatttttaatttactctaaacaatgaaacatttctaaaatatggcattttcagacggttaaaaaagttataaataaaacaaatatacagtttagtccaccaactcttaaagcaacaaacaaatgcgaatttaaaagcaaaaaatactgttttttttctgacaaatactatatcataaacgcatttctattatttcaaaaaaaaatttatacattcacattgttttttgaactatgagcgaattttgatattaaaattttgaaaaaaataagaaaatgccatatacgaatactttttgggcaatactatagatggtggatggacaaccttttgaaaaaattgttttgttttagaaagtcaagaaaaaattgttatggagtttttttggcaaaggaacataaatcaaatattcattttgcacaatttcgaatgtcggacccgaattttgaaaaaaattcaaaaacgaaacttttaaatttattatttttgttagcaaaattgatcaaaatttgtgttcactgacccagaaaactcccaataacatattttcacgaacttttgagaacaaaaaaaagtttttaaaaaaaagattgcccatccaccatcaatagtattactcttttttgtttattaaggcacgtgttaagggcaacaaaaaggcattcgacttaaattcacagccctactacaaatataaaaaatattttttttttacaaataaatttagaaataaaaaataatatttaaaatgagttaattttaaattttagaaaatatttattaaaaaacacgagccttaaaaaataattccatatactcagttttgcttcttttttgttgcacaacacttttcacacaaaaaaaattttttatgcaaaataaaatttattttaaaattcccattgatttaagacaatcgaaaaacgcaatacttaagcaatatccattgacaaccaacttttgtaatagtacggatggtaccccccccc

SEQ ID NO: 13340 - DNA, 1903 bp, Heterodera glycines
ccccccccccttttagagaaacaaaattttttaaactttttatagaaatgtcatattaggggttttaagggttggagaatctgaatctgacagtaatttcgacctatgtcaaatcccgaacccgaattcgagcaaaaagtcgaaaattcaatttttttaattttttattttcggtataaaaatggttgaaatgaagtttttattagcgaattgtccaaattagtttgtttctcgatatgtaagcctttttaaactaaaaataaaaaattcataaatttgaattatcggcttattgttcaacttcgggttcagggtacgccatagatcaaaaaaaatgccagattcgaattctccgactcattaaaaacactaaattattttttttaaaaatttttacatttatccagaaaatgatagtgattccgaaacaacttttaaaaattcttattttagaaattaataaatgtttccgttcatttgcacttatgtacacttattaaaataaaaacagcttgcttttattccctttcctttgttttttattgcgcgcgcgaatttgtatttgtagtactttcacttttttttgtccacgtcaaaatcacacagattttgtcttaatgtctttttcgtttgtattgtccattggccccgcgacatgtgggtgctcgggcaccactggattacctaccaagctggggccgcgggtcaccaattggcttccgagctggttgaactcagctggacaacacttcccacgtccagcgctttgtggaacagcctggtagggatgtgccagtgtagcttgggcaaccacgggcccggtgtcccgttctgctacggtggtgccccccaccgtggaacaaccgtattgcacctgtggtttagtttctgccactacgcggcttacggtttcccaggccccaagcgctcgggtctggatttaccaggccccttgcgctcccgggtctgaacaattcacttaaaaagagacatgttgaattaatagaaaaaatagaaattttatggcaaaaagcgcatgcaagaaaaaaaattttagtttaacaaaagcaaacaaaaaagtgcagttttaaaaaaaacaattgcaaaaattagtaattagataatatgaattgttcagcgcccgggtttcctggcccgtgttccgactttcaattgagccgaaagtcggacatccaaacccttccccccttccccttctgtagagcaaatatttctttttcttcatttctcttccatatttcttttaaaaaaattctgttcccattcccttttcttcccctctccctctccctttccctttctctttcccttttccttttcctttcaatttcaatttcattttcattttccttttccttttccagtccattttcacttttcctttttctctaatccttttcaatttcattttcattttcagttttattttccttttcctctcattttcaattaccttttccttttccatttcattttctctttttctttttcttttcaaattcattttccttttcctttacaatatcaatttcaatttcattttccttttcctattcattttctttttccttttcctttcaatttcattttcaatttccttttccttttccttttcaatttcattttctctttttctttttcttttcaaattcattttccttttcctttacaatatcaatttcaattccattttccttttcctattcattttctttttccttttcctttcaatttcattttcaatttccttttccttttccttttcaatttcattttctctttttctttttcttttcaaattcattttccttttcctttacaatatcaatttcaatttcaaatcgttttcctattcattttctttttccttttcctttcaatt

SEQ ID NO: 13341 - DNA, 1177 bp, Heterodera glycines
ttccttttcttttcaatttcattttcaatttcctttccttttctttttcaatttcattttctctttccttttcttttcaattcattttcattttcatttcattttcatttgccttttcgtattcattttcttttttcatttccttttcaatttcattttcattttcattgtaaatttcattttccttttcctattcattttcttttttacatttcaatttcattttcattttcattttaaatttaatttcccttttcctttacaatatcaatttcaatttcattttccttttcctattcattttctttttccttttcctttcaatttcattttctcttttcctttttcttttcaatttcattttcattttcaatttcattttcattttccttttcctattcattttctttttcatttccttttcaatttcattttcattttcattttaaattacattttccttttcctttcaattccattttcattttccttttccttttccatttcattttctcttttccttttcctttcaatttcattttcattttccttttccttttccttttccatttcattttctcttttccttttccttttcaatttcattttcattttcattttccttttcctattcattttctttttacttttccttttcctttcaatttcatttcccttttccatttcattttctcttttcctttttcttttaaatttcatttacattttccttttccttttcctttcaatttcaatttcattttcattttccttttctttttccagttcattttcacttttcctttttctctaatccttttcaatttcattttcattttcagttttattttccttttcctctcattttcaattaccttttccttttccatttcattttctctttttctttttcttttcaaattcattttccttttcctttacaatatcaatttcaatttcattttccttttcctattcattttctttttccttttcctttcaatttcattttcaatttccttttccttttccttttcaatttcattttctcttttccttttcctttcaatttcattttcaatttccttttccttttcaatttcattttctcttttcctattcattttctttttccttttcctttcaatttcaatttcatttcccttttccttttcct

SEQ ID NO: 13342 - DNA, 2566 bp, Heterodera glycines
  unsure (1)..(2566): unsure at all n locations
ttgattttttctttacgttcttttatttttgacttgaatctttccatttcttatagcaattcagggagtatggcatttgacctctaaaaaagtaaaaaaaactattttcttcaatatttcaattaacctgtaaagcatcgattgttgaattaaaaattggcaaaatatggctcaaaaaatgaagaactacttttgcaatttttgcgttgaaaaaatttcgcagaaccaatgggccatctccgctgaaaaaattctccaaaatttcccagaaatggacaattttgtcgacaattttagaaagagttgtccatcgagtcggaccatgcgcagtaagtgtgagataattagcctaaaacaaaaaaaagtaatgtcacaggcagataactttctaattattggttatgtacctcaaaatcatcgcaaatgtgctgcagttgttcaactctcttgttgaattcttgaaatgactcgtcagtttgaagacaatggactcaatgtcgatcggcaaattgtcggctcctcgcttctctgcgttatgtagcaaatgagccggacacccaacgggtatcagattatttttgtgtgtcttcaatttgtaaaaaacattgttttctccgcgatgctcagcagagccaaaatttgcagctgtattgtcggcacaaaaagcaacaattcgttcgaatttcaggccatgtttttgcagcatttttatgatccattggtaaaccttaaattggaaaacaagtcaaaaaatgatacaatcgctattcacctcttcagacgtttctcctgggagtgcttgcaggtcaagcaaacgaacttgtattccttttttggcacaaaaatagcgaatgacaataggaaaaagctttgttgttttgtgattggaactgtccagcgcaatgaaaaagaattgatcaccgagttcatttagcatattttggacagaataaggtgcgagaacgcctttaaaaagggatacaaaaaccacattgaatttactaaagttaccagttattattttcgatgcctttttttgtgcgcatccgaacttttttgcaactgctgaatctgaaaacatagtcctgaacaatccgtcagaggatacacaatccgatgacttgaatgattgtgcgtgcctacagagatgatacgccatacacctcaaacaattattccattacacacaatttttggaatcaataaaaccctcagccgcagcattatgtcggtcttcttcagatgctgtggacgcactcggcatgaaagattggattgcttggctggnttacatagctcgcaaattctgtttgtgtttttccgatctttggtgtaccggaattgctgcctttcccatcgattccaaattaatatcaaaactgcacggcacacaatacgcatattcatcgccctttttgctcctttttatggcctgaaattcgcgctcataatcagcgtgaaatttctgtttgcgctttggtggagccattaataataataatctaagctaaaaagttatatagtacataggtcttcggatgaaaattttcaataaattaaaataaaaacgcttcataaaattattttatttcaaaatagacattcaaaattgaattttctcttaaatctcaaaaataagacaaaaataagtacattgagctcaaatcagtacatttattaaaaataagtacattttatattcttaagattcgatccctccaaatcagtacatttcttaaaaataagtacaaatgcgacctctgctctaactttattgcatattattaggttgataaatctactgctattggaatatgtatattttcgaaattattatactctagcctcaatcagtattaggattaataaagtatatttttttttggttgaaatttttatattgatcattgtctgtaaataaaagccaatttggcttataagttacaaattttgtcagtttcttttaaattaatgatacatattccgtggaacaaatgactttaaaccacatttgaatttgctttgtcattataaacgtttttatttatttgcttttaatacatttacacatttctatgctttaacatctatttagaattttcacatgagactccatccattacaaggattacatcattattgaattggcaaaataatattattctttgtcgtttttctttaattataacttttttacttcttaaaaatgatgaatattggagtcaataataactcttgaccatcaatgtctcttttaatttagatgttaaataaaagagaattattgtttctaatttaaaagataaacccgataaaaacactgtggctaaaatttattttagaatttttgataaaattattagttagttatttttcaaataataatattttaaatcattaatgcaaatcaaattatgaatgttttcgtaatagtttaatttatttatgtatatttgccaaaaatttggattaccttacaaagtttattttatatttctattatattaaaatttaaaagttaacaaaaaaatactcattaaatgacaaattctaaaaattattttaa

SEQ ID NO: 13343 - DNA, 1208 bp, Heterodera glycines
  unsure (1)..(1208): unsure at all n locations
gtcataatcattaattttatttctaataaatgtaatttttgatttatttaacacttaataanataggtatttataagttattcacgagtttcacctcatcttaacttgcttttaagtattcagaaattattagcatttgtaattgttttttagtaaaatatttattcgaaaatatgattggttataaatttaaatttattataacttttaattgaaaaaattaattttatttgtgacattttcatttttcctttgaattaataatttttgtctcttttattgagccaatttcaggatatttattgctcttaaataatatttgtgtaaaattagtttcatattcagttatatttttattacaattacaaataatattatgatctttcatttactttaattatcaattattatcgaacaaaaatttcttttaacggacatattatataaattgtttcaattaattcctgttgcctaattactgcgagataaagcatttttatttcttcacgctaatttgttgaattaattaattttataaatataattttgttgaaattagttaatgaatttcatcaacttttgctttcttagatatatttattgttatttaattgggttttatatggttcgagtattcattattttgtatatgttactttaataacggtaataatttgtaaaattgattattaataaaatatttattttaaaccagaaaaatattttttgaattgcacagtgatttaatatatattaattattaagaataagcattcaatttcttgtataggttaaagtttttcgttcctaaacaattagtttttttaatttattatttaatttatatttttctttgacttgtaattagaaacaaaatacattttttcctaatgttaaatctccatcccccctgctcagcagaactgctgattttaaaaatatttacaataaaagtaagctttcaaatttatagatcgttttaaatataagaaattttgttattttcaatatatttttgtttcattatattcgttagaatttacttaatacttttatttatatcattacttaaagctattaattagttttattttaattttttgattataacttacaattttatctgtatctctttatttttggcaaaattttttcattgttataaaatggaaattatttaatatcttaataaaaaataatttatacgt

SEQ ID NO: 13344 - DNA, 778 bp, Heterodera glycines
  unsure (1)..(778): unsure at all n locations
acaaaacttttcattagcaacaaaatttgcttaaggtgcgcatgtgggacggaacaatcattcggtcggtaattagtcggcattttgaatgttcgactgattatgtgcaattcgccgcattttttagggactgcgatccgttggcgttttgtccgcccgacggaagcaaagtgttcaaaaacgcggattatttttgctgtgcggggaatgtgtgcaacggaaagcggcgacacattcatcaaatgataattttacttatcttttccatcggacaaattatattctttttatttttatgatgaaaagggaaaataaaatggaaaagaaaggtaattagcacaaaatgagtcaaaacacaacaaaaattaattggtttaattagggaaaattgcaattaatacaaaaaagaggcaaattaataataaccttgtttatatatatttttttggaaatccacagaagaatgaatgaatgcataatgaatagggatgatgcaatttttaggtttttatcttttttctgagctaccagaaaaggacaaaaacaagttgtttttttggtggttgataagctccttttcgagttattggtgcctattttctgttttatttttagagcctaaacctaaaaaattgaaaaaacttattttaactttttgaagaaagttttcgattttacatccctanattagaaagtttttcaactattttcccatttttagcacttatttttgnggtttttagagtctaaaaactaactattttggcagtttttagca

SEQ ID NO: 13345 - DNA, 4037 bp, Heterodera glycines
agtgtcggcacttcggcggcgcacgccgcgcaattgcctgaccttttgttggatgccgacatcgtcggccattacaggtgaaagggagcgattagccgagcatctgctgatcaatgatcaaaacacttcgtcaattatactaaagatggcacttcccatttacagtcatggccttaaccgcctttgcatttacattgaggacgtcgcctcgggcgtaaaaggcgacggtcagagaataaaaagggaaaagccaaaaaagaaaaaagaaaagagttttcaggtgaaccgaaggtgctcaagcaggtccatttgaaacagaattgaaatgccaaaacaaaaagcaattacgctgaatttacagaagggtgccaccgcttgggtggacgggtgcgatttgcttggcgccgtcgtcggtaatttctgcacagaattggccataaagttggccaaagagcacggcatcggctgggtggtgtgcaagcggtcgaatcattacggcatttgccaacattatgccaaaaagatagcaaatgccggcttgttggtgagccttgccaattgaatggctgaatgacattgttttgctcttttctaacccttcccatggccacccttcctcccccagggactgtcgttcaccaacacttcgcccatcattttccccactcgctcttcccaaattggccttggcaccaacccaatcagttgttgtgccaattcacgcgaaaaaggcgacggattcattttggacatggcggcgtcgacagttgcgcttgggaaggtaagaatggtcaatcatcgctggggacggaagttgaacagctttttggcaggtcgaaatcgcaaaagtgaacggcaatcggccattccgtccgcttggggcgcagactccgcggggcgtccgtcgactgatccgctggcggtgctcgacggtggcggactgttgccattgggcggagtgtcggaggaggacggctcacacaaaggcaccggaattggtcggtggagattagcatcattgtgccaatcagcagaataaagggcattccaaatttagcgatgatgggcgaacttttttgcggtcttttgggaggcgcaagttttggcaaaaacgtgcgatcgtggcgagaagtgcaaaaggcagccaacctggtaaatgccgactttgcttgaacagtcgcttgtcggacaaattgccaaatccaatggcattattgtcaatattttgtcccccagggccaatgcttcgtggccattgaccccgaatgctttgctccaacatttgtggacaatttgcagttgttcctggaccaaacgcgtgggcttaagccggtgatcactgctcttcctccatggcattcgatcgcctcccttccctccttttagcgcgacccctccaaatcggtgttagtgcccggtgaccccgaaagaatgaacagcgaacggagcgcaaaggctggcggagttatttactcagaaggacaaattcgggatttggtcagtcggaggagcacttaacggcaaattatcacttttcaaattaaggagaaattggcaaaaaagcaaaacgttggcatgttcccttacaaggcaaatttgtagcagaacaaaaaaactgttttctttttgttccaaagcgatgactttcaattgaattggcattcatttccattattgaacaattaattcgttcccatttgctgctgctgataaagaaaaaagaatgacaaatatttgcattaaatgcagcaaaagtaacggagagaagagatgagaagactaatgggtgaacagaaaagggaaaatgggaaaaaagggaacggaccaccggcggcacttttaaacgcattcacaattaatttatgaaccgcggcaagggatcggcctattttttttgtttacagttttaacatttattaataatcattgaacagtcagtgtttaccaatcacagtcaatcattcctttcccctctctccgtccttttgccgatgagtgattgcccctctgctgtccctccccccgtctcttctctctgtcccccttttcctccgtctcttcccctcgtcctcgtcacagaaccgacctttgaagtgagcagaattgaacaacagtgagtcattctgctggagttcttttaaatttccattgtaaataaaaaaaataaaagtgcgcgtgtcctccaattccgtcccaaaaacgatgggtttttctcggaagatgaacagcaaaaatgggtcaaagaacatattggagaggctgaggtgagaaaaaaaagattttcgaaaaaggtttgtgaaaattaatttcggttgagataatttacacgatgggaccaataaaagtggacgcatcgcttttggtagttgccaaagcgttaaaagcagtggtgggcatttttggccactatttgttggcccttaattaagacaattagtcaaattttccgaaggtgaccatttctgcgggccatgaaaacatcgacaccgtggaatgtgccagaaggtggtcataatcacttacgctcaactccccacctctttacaaattaggggcatccgaatgggctttggcggtgccattctcactgaagcaactgccgaaacggcgatggcacttttacttacggtttcacgccgccttgtcgaagcagtacaaatagccaaagagttgggggagcggagttaaagtgcgggaaaccaccaaatgttaagaggaaaatggccgaacaattggtcaccaaagttttgtgttgggaaagcattggaagggtcgacggttggtatttttggaatggggcgcattggacgaagcattgccgataaactaagcgcatttcgcccgtttgaaatcatttatcacaaccgtaaagccaattctgaatatggtcggattgatggaagattaaacgattttgctaattaaatgaattatgttaattaatcagagggtcgcttccgttatgtgccatttgaagaactcatcgaaagaagcgactttttgattctgtcggcgagtgtcaatgatcagacgaagggactgttcgacaaagaaaagttcgaacgaatgaaatcggacgcaattttggtgaatattggcaggtggggaaagaaaaaggcggccaaaattggacggggaattcgactcgcccatttaagggggtgtttggtccgaacagacgacctttacgaggcactgaacgaccgcaagttgggcggcgccgcgttggacgtcactgagccggagccattgccagcggaacatccgctcttctcactgcccaactgcggtgccaagaatgaattagaaacgatgaattgcctgtctttcttcagtaataacccctcacattggttccgccaacggcgtggcccgaaaacggatgatggaaatgggacaggcgaatgtaatcgccgcgctgaagggcgaagaaatgccatcgccaattcgaattgaaaatgcataaaacgggaaggagtgaagacaattcttaaactcaatgatggacgaacacttttacattttcaatggcaattgttaaagttgtgcaaataaatgagcagttttgtaatgtcctatttttggcattcgtttggcgttttgctgtgcgtcattttcaattttttgctaatcctccaatcatttaaattgttttttttctttcgagattaactaaattcaatatcaatttgtataactcacttcaacagaacaaaaatgggaaaagttagcaaaacaaaatccgcaaagaaatccgccggaggcagcggaaataaaacggtgatttgggcggtggaagacattgtggacggaccgaaatacgaaacaattgggacgaagagacagaaactctacaaagtgcgatgggggtcagaagagcacaaattgtgtgaggaaatgcgaacactttgttaagagagacgtacgaattggccagcaacattcccccgggactcatcgatttgtacgaaaagcgggaaaaggtcattaccaacccataggcgctaattgccgtcccatgtcagaagcaaatcaaa

SEQ ID NO: 13346 - DNA, 895 bp, Heterodera glycines
aaaaaattcgttttgcaaaaaatattttgttttttttaaatttccaattactttaaaaagagcaaaatgtgttaaattttgggttggaattatttattggttacattggaaacaaaatttgtcttcaatttatgccaataaaacaggcgttttcagagtgcggcaattccgactttctgctcgacttggaaaataacaaaaattcatactttaccattaaaaattgctatttaaaaaaaatttatgcggtgtaaattttgaaaaataaaaaaaacataatttcgtgacacaataaacggaaattaaaaagagtgaagaaagaaaaattatgattatccaatgaatatttacgattttttatgttttttcaacatttttagggtggcagttccaattttcaaaatgccagcaatttctttgtcagttaaagtcggatttctttttttctatttataataatcatttaatttgctcattttttcttctttgggaatatcgatttccacctgtaaaataataaatttaatatttttgagaattttttaaggaaattttaattaaatggccccaaaaaatccaaaatttctcaatatttcatatatattatcatttttaaaaatattttaatgcattttttatacatattttatttacatatttcgggatttttcttacgtaaaaaaggaagtcttaataataaataaaaatttaaaatataaatttatttaaatacaaattttataaattttccattttgaaattcccaatttttctgcaatttttaattcaattttattccgaactttttccgaatatttccctcttttcttaattccttcttttattgcgtggaatttgtgaacaatttcgcgtctttgctgatcagttaattgct

SEQ ID NO: 13347 - DNA, 1828 bp, Heterodera glycines
aataatttattgtcggtttttttttttatagaatttgctcttcactcaaacatttgcagattttgattaaattgtcttgcgtatattcatgtattccagaacatttggcacatttctagttctgttttaaacttagatgattaacatcgtataataacatattatttgagtttttatagtctcgtaaattcaatatttataagcattcagttgtcctttgtaggcggagatatatttgtttcgcggtcatcatcatcttgttcgtcagtttcttcattcatctacgtgtatttttgttcatccatcgaggctcacggaatcaggagatccttccgagttatgatattccttggatagatcgttcataaaatatttagtatatataacaactaaaatatcgtaataataaatatttttgttatcatttgtccgaaatcgagtttagatttcataattctccagtcgtcctatagcacccccttcctacatcatttctgctctgtcgtgaagtgctacacttaatgcatttttcgcgaagtgcccaattagtgcactgtcgcgtagtgccctttttgcacttgtcgcgaaatgacgtagcaccattgctcattgttctgatcattgccaattgaatcagaccaaataaatcatttcgatcactttgaggaaaatttaaaattttgatcattttcatttttcattttcccattctttgccaaataattcttcaaaagttggtcaaagtttcccattcttttcaattgaattatttatgaataataatataaaaattataacataaaattccattctcttaaaaatatttggagtaatattttatgaaattttattaaaattttggttatttaaatttctggattaattttacaaattattataattgattttgttaagaaggtggaagaaaggcaaaatgttttacaatttttgtttgctattagaaaattataccgataaaaaaaatattttataattattaaagtatatatgaataaaattttaataaaaaaaattttaaaatataaatcttttgtcaaaataggaatttttgtttttagtaaattagtaaaaatttttttgaataattttgatcaatttcgattcaatttgttcatagaaaattagatggactttgcagcgtaattaggaaaagcgctaaaattcaaattaattttgtggcaaaaacggcacaattaattacttttgcttttgctgagaattaatcgagcactttcttcaattataatattgatggcatacaaaacaattttctggctgaactaagagaaacctgtgaatttttttttgatcaaaaatgaatttttagttgaaataataaatgatccaaactgtcaattgcgaccgatcagcggtcaattaaaaaattttttttcctttttttttgttttcatttttggcttttttcaacataaaacattaaatagacagcatcaaataatctatctataagttataaaaatttattattcattaaagcaaaaattatatgaaattttcaaatagaatagttatgtaaaaatttctatttgaacaaatgaataaaaaataaatgattgaatatgcaataatagtgtttaaatagttaataaattttaaaattgactaaacaaataaataattataataaaattggatataaaatgaataaacagataattgggatgtgttaattttgtaaaatgcataataaataaaattggataaaatgaataaaaattggtcattggggttagttttatttttgaatttttttttttgataattttttttttgtttgggtttttaa

SEQ ID NO: 13348 - DNA, 2351 bp, Heterodera glycines
  unsure (1)..(2351): unsure at all n locations
aattgaaagggaaaagcaaaagccaaattagccttaggggttatagttctaattggattaatatgctgcgcatcaaaggacggataagcttaaaacaaagcacccaatttctgatcagtcggttgatcaaatcgatgcgaatgcattcgccgcggagattttgggggtggcgacgaaggaataatgaatgaatgaccccatcgcatccatcgaaggcagaagcaaatttagatttgtgctcggatagggcgagcattcgacggggagtgaatgaaatggaggaaaagtgggcactcatcgcccgaaggaaatcgccaaaataaatgcatttattacaacaacaaatattcacaaatagttccaggaatacatcagcaatgaaagttttcttcaggagggtcgtcggtgtttctgaaacgtttcggtgcgcatctccgccatccgcgacaccgtccgcgcgaaagcgaacatttcttcggaaccactgaacacattggcagtcgcggattccttaagaccgaatgcaatacggcagcattaaaatgtcattttgagaaatgttaagcgatggccaacagaaagtgccacctctccgtcgcacatgctcaagtcgtccattagcattcgctgcgtgtcgctcaattcggcctcttcctcaaattggaagagtttgtccggttcggcgtcggccgagcaaatcacacggaccttcgaacgacagaaattaaaacttttgtttcttctttcaccttttggtcgtaaaaagtgtcgattagagtgatgaaacgacgcgcttctgataattttgcacgggtgaaaaagggaattcgacggatgagaaccgtgtggaaaacgctcgaaatggccaagtaatcgttggcactcaatggctttttgcaaagctaaaaacattggcacttacaattagccgtacaattgctatagtaattgattaatcgttttgatggtacgtcgtcaaagtgaacatccgcgactcttccgcaacatcgctcaattttgagggtccgtcccaaaatgttgagcgtttttggaccgacaactgaacatttgttcaacaatccaatattattgttattatttgctctatttgttggcacattaattccccggcactcaccgtcgttctcatgcaaaatcaaaagtttaaaggaattgtccattttggcatcaatttcaggcccactgccaacaaaaaaagagtcttctgccattttgtcagaaatttgcttaaaaggcacttttattggcaaaatgctttcaacacgttcacttttctgtagtcaatgcccgaatcgaggcaaatcacacggcacttttgttccagcaaacgaatgaatggcacaaattgatgcctttggagcccatttttgtacagatcgacgggcggtcgattcgaagtccttcaaatattttgaattgtttttgagtgaaaaagggcattcgtacgccaccaaaaccaatcctcgggagaaaagttcggtgaacaatcgttttagaatcattgctgaaaaaagggaaaaatgttgaaattggacacaaaaaaaagataggaaaagtgtgaaagaacggacagacaaaagggcttattgttaaaatggaaaaggtggtcagtccaaccaattcatttttggctaccatcggcgatgtccaccacttggaactcgtcgaaacagaaaagcaccgcccgaccgattatcgcctcggcaatttttgggaccaaatcagccgaagggacagccgaagagattttcagacgatgcaaatctgaaaaagagagaaatattcgacggatttggccattaggaagaacggacctttgtgaaattgctgcataaactcgtgaaaatggattctctcccgcctttgtatttgaaccgactcaaagaacaaatccattagcattgttttaccgccaccggaaaaaacgaaaaattaaaaaacataaaatgaacaattaattataaatcagttcacttacccacggccccatgtaaataaatgcccatcggtgcgtccatttgctgttgccttttcaaatttttatccgcgaaaagtcgcgaaaaaaatccgccgatggttttcactgaaggaaaaactgtccctttttcactgtgagcaacaatttcaagaagtaatcggtcgaaatgttcgatcacttttagctaaaaaatgtactgaactgccaaaaaaaaattattgtattttattttacaataattgactcaaaaacacgaggcttaatatttgctctttctgatattcaaaatttgtgttgtttttttttgttcaagtaaaanntggacaaatgcgaccnntgcaggcccatgcaa

SEQ ID NO: 13349 - DNA, 1086 bp, Heterodera glycines
agccgaaaaatgggagaacgcaaagcaaatgctgacaatgagaaaaaagaatcaaaattcaatgaattaaaccttaaacgaacgaatgaacaaaacaacaaagtgacttagtcacctgccgctagtcgaagattcgaattttttatgtgcgaaaacagcggacgaaaaagacagaagcggaagttcggggagtttgccatcatagccaatggtgtgaaatgctgaaaatcgcttcctttatcgtaagaaacccatagattaaaattgagagaatggtctgtttgcatatttaaatttatacatttttacgaatggcaaaattagcaattaaaaactttattaagaaaattaaaaacaaaatcgataaaataataaacaaaaagataggatgatataaataatgcagaatgtctgcaagtcaattaggtatttgacccattggaggagcagcaaataatctcaacgacgggggaactaaaaggtgacggattgcgttttgttcgacctttaaggggggttcgtccggtcggacctgtccaattggagtccgttgaccatcgtcgccgaattcgccgtccgtcctctgttttggctgattatttcgctgactttcctcgcgaaacaattgtcttttaatacaatggcaagaatgtgctcacagagatgaaagccttgatctgtaaaaagtttattttaaacggacacattaacaaatgccaccgtttgaatggcattggcattggactgattttgattcattgcacacataaaaggcgcattgaccggcactgtcctcaacgacaaaccgctttttctgcacattgtcagtaagattcagaacgtcgagggcatttgcacgggacagcaaatccatcttttgtgatcgactcaaacctaaaatttaaaggaaattaatggacgaagaatttgaaaaagcaaacaattaattgcctgaaaatatcaatgggtcaaacgaattcgccgaaagagtgccggcagcactcagtgcagaaagacccaaattggacaaacattcgcgacgttctaaaaaagacaatgttctatacaacattatatgaaaatttt

SEQ ID NO: 13350 - DNA, 1551 bp, Heterodera glycines
tttctgcttggttaggggtgtctacgttgacttttataatgcctaattttgcctatttcgggtttttgtgcctaatgtgcctattttaggattttcgaaaatatccttaataaaaatgcaataaaaacgaaaaacacacccctaagaaatgcccgaaataatttctgaaaatattccccacgaatttgaaaaattttcccaaaaatggatccctaaatttaatatttttttcatcataaaaatttttgacgaaaatttttcattattcgaaaaactttttaaacaattgaaatgaaagcaaaatcccatccctactaatcacaataattttgcaaaaaaaatcattaaattaatttaatgccgattcagccaacctcattaagactgaaattataattacattccgttgccttggcattgaacgcacatttcattaattctctctcacgctctgcagacggaaacgaataaatttttcgaattcctgttgaacaagtgaaacgccattttgggtcttaacaaatgatggtatttttcaattagcattcaaaatgatcaatttatttcatgggtgctataacgttaatcaaaaaccatcaaaatgggcgctagctcaaaacaacattaaatgaaatttttttttagtaaaacttcgccaaaaataaaccaaattttaaaatcttgcagaatgatgtcaaggttttaaaatttgattcattttgggtgaagttatgaagattttctgtcaaaaattttccatttgatgggtttttgactaacgaccccagcaccatttcatgccggaattcttatacattttttggggggggggggggggtcaaattggttttaaaatcatcaaataagtttttgacagcggattttcaattttatggaccttttaaattttatttttctaagaaattaatgagaaaattttcatcccatcggtgccaagaggcgaagcgtggaaaaatttgtcataacttttgaaaaaattaagaaaattttttgaaatttagcaagctattaacacaattccagggctaccattgtatgatgataccatgattgtgcgatctcaccttggtttcccgcctgcggtaaacatctcaagtaaaaacgaagcttataattttcgtattttactatgcttttacattgaattccaataatatcaatggcattgttactgacagcgctaaagggtggtgccacaccttttttgaaatttttttccaaaaatttattaagtcgtaaaaaaattattaataggttttcgggattgctgaacacgaatatgacatccatttcacttaatttcgaacccctgacccgaattacaacaaaaagtcaaaaattctaatgatctattttgcacaatttatttaggcaaactggttaaagggacggcacctacgtcctccagaccacgacttcttcctctgcgcccattaagaggcaagacacattcggccatcaccgccgacgccagtctcaccccacaaagggagacacaagcggccagaagcagccgaatcttcaagtctt

SEQ ID NO: 13351 - DNA, 2140 bp, Heterodera glycines
ttgccaactcactttgacataggtcaaaaacaataaatatattaactattttatcatctaaggctttccggcaatactgggcgcaaaattttgattatgaaggccaatttggacgcacttttactggcaccaacgcatgaattagaatcagatgatgaaaatgaagaaaaagacgatttttgagttcttaaaattttatttacgtgcatttaaaaagaaaaattggatttttcgttaaaaattttagttgatcactacccgatcggggtccccgacccccgacaattgagctcctccccgccccgacacccgacatgtcgtcccccgaggtccccggcccctgacattttgccccgagggctcggggctgaaccctaatcggaactattaccctctaaagtaattataatctcttgtttccacgcttttccaaaattcacttaatttgtcatttgtaaaaatgattgtcccgctgcgtatccaacaacggccggataaattattattatttgtgttgccggatggagcggcagagaatggcattttgtaatgattttccggcaaatttatgtccttaattgagtgtaaaagaaacacactaatcacttccgcgttggtcagaacgccggtcgatactgttgttgtaaaaattttatttttttgagaggtaaaattttattgaaaatattttaattagataaacaaaccaataatggaaaaggcaaaacgacaaaaattggctgaaaattttttttaaatgctaaaaattctaattaccgtatagcctggcccccttgcatttactaattttctgtaaattttttttggacattattctttttaattaaattttataaaaagctttacaaaatttcaattaaaaaagtcaaatatatttgtttgttataccaatatttcttgtaaaaaacttatgcggaatgttctgaacatggattttgtacagtgccgtgccaagcatttcccgacgatttgctcccgtaatttctttgccatttttaaggcactgattgtccgcccaacggagtgccttttaaaattaaaaaaaaaataataaataaatgacaaaaaaggctcctaattatgcagagtctcggaattctaagaaattacccccattctttaatttttgaggggtcgatggacgaaaaagaaattgccgttgacgaactgaagtgtccatatgcattgggaccagcaggactggcgactggccgtgatcacggatcacggaaatcacgagatttttggggtgccgtgatcacggctcacggatttccgtgattgcgaattcaatcacggccagccctgattgggactctttttcccagtgctcttatggcgtcggtttcaaaaaatttttatttaaaatcttttatgggtaattttgggtgcaattttagtgatttaaatcggttaaaaacagattctttgaattttccgcttagaggtcattagagattgattacaactaattttaggcggttttttaacgggcccacttaatctaaagcctttaatttttacgataattttttttaaacttggaatttttataatttttgagaattgagttttagcattcatagtggaatatgaagctttttttaaggctccaatgagaaggtgggggggggggggtgaattttgtgaacttttgtgttcctaccgatatctttaaatatatgtatttgtattatgttattacagcatgccaaattgcaatttaatcatgagtttctaattgatcacgttgcaaaatttggcacaaaatctgttgatcaatttccaaaaattcatctgattgcagcaatgataacgcattttggtcaatgtaatcaaaacagcgatcagcgaacgccttaataaatataaaatttttgcgcgggggatatggtgttaaactctcgaataattctagatacacttggcattattccatagaaatataagttgtgtttgatcactactctgaaaccagaacatttatgataaatcaggaacatttctattttatcaaatttggacagggtttggatcggacagtgtcccttttccaaggacgggtatactgtcttccaaaggcatatggggaaaattccattaaattcaaggacactca

SEQ ID NO: 13352 - DNA, 1698 bp, Heterodera glycines
aatggtcgcgaaataggcgcctaggcataaaaaaagttctaaaaaggcattttaaaaaaaaagataaattactccatcaataaaacttctttttgctaaattcattgtttatgctatttcccacagattctacaaattcctgcgcggttttataaaaaattatttttataatcgtttacattttcatacaaaaaactaataattcctaaattaaattttttactgcaacataaagaaaatttaatttatcctaatattgtttattatttttgatttatccgaatgaatagccggcgtctatttgcatcaccaggagcctttcagaattacgaacgacaaacgacaaatttgtcgtttgtctcctaatatgtcgctacgacaaaaaaatatatcgtttgtcgtccaagtttatcgttttgccatttatcgtttgtctcagtcgtccgaattgtcgtccaatcagaattaccaaatttcacagtatatttgtcgtttgtcgtaaatttcttaaaagtaaccaaaatttcataaagtgcaaaatcataaaaaaatagtaaaagtgtctttctatggggtttttaggcgtagattccaattataacatttattttcttataattcgaatataaatgtgaattcaatagacctagataattttatgaaaaatcattgataaaagcatagatagtgaaaatctgagatcggattcatgatcagcgaactcttttacccctaggaacataatttaacatgaaataaaatcttttgggtgaaaattttgtggtggctttttgggacacttctcagacgacaaatttgaggggcggtgttgagcgccccccaaatatttggcgtttgtcgtaaaaacctatcagaataatagaagacaaacgcccaatttcagacgacaaacgacaaaatttttaattctgattgatgataaacgacaaacggcgtatactaacgacaaatttgtcgtttgtcgttcgtaattctgaaaggccccagaccctccccttcaattctgttaaaaaatgaaaaataataccataattacgaagcctggaatcaagagtcttgggactcacatttttaccactaataatttgaatatcaacaacattacagaatcaataagaaaattatctcatttttacgtcatcaaactttctttcacgtcacacgtaaacaaattatttttttatagtaatattttttcttattaaatctgaaaaagatagtttaattttctgactgttttttcttcttgtgattttttcattgtttatcaaatttaaattaaaaaatatattttttttaaaattttttataaaaaaaaaaagcatggttccccatttttccccattgtttttttccccacttttttccaattttttttggcttctcctttgaacccttgcatttccccccaaaaaaagggttaagaaataggttgtgtaaattaaaaaggctccaaaaaaatgaggggaaaaaattttaattttataaaaaaaaaaatttgtttttttgggtttttttccttttttttttttttgaaaaaaaaaaaaaaaaaacccgccccaaggggcccttttcccccgggggggcggggaaaaaaaaaataaaaatttttttttttttttttttttaaaaaaatttttttttttttttttaaaaaaaaaaaaaaaaaaaaaaaaa

SEQ ID NO: 13353 - DNA, 1604 bp, Heterodera glycines
  unsure (1)..(1604): unsure at all n locations
tgacggaaaataaaaattaaatttctacatatttaaaattgaaaaactagttatatctcaattaaagaaaaacaaaaataaaanatgagtcgtccgtcctcagccgagttgtccttgtcctttgctgatttgtcctgactccatcaaaaataataaattttcaaaacatttaaatntaaagaaggtcactcggccgacggcgaaagtgcgaaaaatgggaacgaattgcaaaagaatgtgaaaaatttgagataaatgtatgctatctaaaaaaagctgaagaaattcaatttgatgatggacaaactctaaaatttggttgcaaatgggacattgaagcacagaaatgcgggccgaatgatgaaacggagaaagcattgaaaggggaagagaaggaaaagccgaggaatttgttggcatggcttatacaatgatttgatcgttgattgatttaatcattgatcatctgattagtgttggtgattaaaaagatttgttgctgattttgcattaattttcaaatgtattctttggggtagggatttgttaattagattctgacgaaaaatggcaaaaaaagagtgaaaattgtgattaatttttttttggtaaaattaattataaaacgtttttcaactttttttttgcaaagaaaaagcgattttttcctttgtttcatttttttcaacggaacttattgaatttaactttagaaacctgtaaaacaaatttggctttttggccaaatatttgaacatttttttgcaagttacattcttaggtgattattttttcctttttatattatcaaaaaatagtgatgtccaaataattattcctaatgatgcatagataatgacgttaaaatgaaaaagttatttatgaaaattagaaaatgtttaaaaatagttttttaaaaaaataattgtaaattttgaatgtttttttgaatgctcatttgcaaggacatccttggaaaaaaggactgtttcaaatttccaatagacgaggccctaatccaaggacgtccttggcatccaaggacgaatagcagccctgacctatcacaatttgcactataatatattcaataaataggcaaaagaaaagttttaaaggtattgaaattttgatggaaaatttaattttaatggtaattatatatttatgtattaatttttaaaattccgctattttggaatttagaatttatacttatttttaagactttaattaatatattttttttattataattacatcatntaaacacaaaatcactcataattaaaaattgcatactagtattgtataaatgtatttttttaagttttaaaaatattagagttaaaattatgaaacttttatgtaggctggtagcggaatttttatttttatttgagatttaagttgattgttaagcttgtaaccatgggtcgggcggggcatggttggcggcagggttgttccgggtcgagaaaaatatcgggtcgggtttcgggtcgggtcggccgaaaaatcatcgggtcgggtttcgggtcgagaaaaaggccgggtttcgggtttcgggtatcgggtttcgggtaacccggaacaaccctggt

SEQ ID NO: 13354 - DNA, 974 bp, Heterodera glycines
ataaagcatgttcaccaatttcccattgcttttctccctcaccttggtttttctgctctctttgaccctgcaattccctcttaaaatgttaggaatgtttgctaattacaatgctcagaaaaatgacggtaatactttaatttataataaaataattgcttttgtgtttttctcatttcttttttgagtaaaataacaaaaactcggccgaaaggccaattcagccaaggatgacggaaaataaaaattaaaattctacatatttaaattgaaaaactagttatatctcaattaaagaaaaacaaaaataaaaatgagtcgtccgtcctcagccgagttgtccttgcctttgctgatttgtcctgaccaggggtgggcgaagctcggcttaccactcgaagccgaaggcgaagcccaatttttattcgaaggcgaagtccgaagtcgaagcccaaaaaacccgaagttttcgaagccgaagttttttcaattttttttaattccaaaaagttttaattttggttcaatataaattataacggaattgttaaatttgcagtgaatttcctttcgaaaaagggaataattttgaaaaattagaagaaaacaaatacttggatgggaagtgatccaaagcaaaaataaggaatagaaccaagagcgtaaccgacaaccatatatttgaacaaataaaaagcaaaaagttaataaatataataaattttgtttgccaaaaaccattcattaggggcagagctgcacgctactggatttgcaattacggaactccgtaatccgtaattacggcgattttctcagttacggaaatccgtaatccgtaattacgggggtccaaaaaccccgtaatttcccgtaatccgcaatccgtaatccgtaatttttaaaaatcaatttttgtcagaattttagaaaaaaatttttagatagtgattaataaaaatcaaaaaactgat

SEQ ID NO: 13355 - DNA, 2530 bp, Heterodera glycines
ctgcgcattgttttgagccgtttgataagcatttcaacggtaagtccggcctgttttgcccgcgttctttcgtcaatgcatttgctgtggaacattagcattttgcgtgcgatttgacttctgtgaaaatccgaccctttgttgtgttcgtacgtctccaaaaatgctaaatttaaatttccacttttcaaaatttaaatccattttattttttatttttttttgattcgatttacttactgaacagttcgttgtcaatgtgtcggtttgacacgtcataaacactgatcgcattgtccgctcggcccgcgtaacttttgaagtgttgtcgcaatggcatttcgtggaccggcgcacaaacactcgcgtaaaaattgtcacagcgttcgcttttccgcgcgtcggtcgtcgcattgtcgcgcgtgcgcagcagcggccccaacggcgggatttcgtagagaccaatgcgcgaaagggaggcggaaagggcgggggaagaagctgaacaacaccaaattaagcaacattagcaatggtaaatgggtaattaggtaaataattggtcttattaatcattgaaattaaaaaaaggcttacattgtgctgctgaaaaataaaggtttgaaagaaaaattatgttggtaaataataataaattaatgtgagaaattctcattttccttaatttatgagagattaatattttatacttttaatttgctggaagctttaaagcataaaaatatttttgtatattgcattttaaaattattttttattataaataacaattattatgaatttcgaatttcttttaatgtccatccgatttcagcatgtttaaataaggtttcgatcccatacaaatgtataattaaatcaggaagaaaggcaacatttttgctgtgttattcgtatgatacccccagaggcaacccattccctaataatttattgttcattagtgtgtgtaatgatctaattaagccacaattattaagagcatcatgctaattgcattaccactcattcgccgatcagccgctcgaagtgtgaacgttttcgtcgcgatttgccttataaatattgctttttcggccgcttctccgcttctgatcgcccattaatcatcggtccgccgttcgcctcccccgctccgctttatcagaggcataaatcataaaaaactgtccacaaacattcgacgggcgtggatttgatccttttcgctgctgccgacgacggtcaaatggaaaaggcgcaatccatcggccgattaggcggggggggggagacggatgatcagagcaatcggcaggatcaatcagccccgttggtgtcaacctgtttactaatcagccattcttggtcaccgacagcaaacagtccgccaacgaaatgcaaaaagaaagtcccatctgtgaacaatgagtgagcaaaacgcatcatattaagcaggatttggacaccaccgaataaattaattaatgaaagcatttaaaataaaaagtcaaaatgttaagcaaaactgatcaatgaaaaagaaggtcacattgtacttacgcactgttaaccataatagcggatttacgaaaaaaacctacaattagcatcaccgatttgtcataatttgcttaatttctctacaaaacgcattacattaatttaattcttttttattataattattattaaatgaaaaaacaccttcccaactcacgtcattcgttagttggcacgtggcatgtgacttcaaaaaacaaaataaaaacaataataataataataattattattattattataatgttagtggtgtctcaatgctaaaaaacataatatttttaacggaaataagagctaaaaaataaaagggccctaaagaaaaaggagaaatcacacgacaacataataaatattttcgcacgagaaaatgcgaaaaattttgtataaaagtgaacgcatttcactcaatctcaataacttttgctggaaaagtgccattcccacgccctcccttccattgtcagattggcaagcccatacccttgtcatgccatttctgacaagcaacgagttttaatgattttaaaattctttccatggaatcattttgctggaaaagtgcattttcattgatcttaaaaaatattttttttatataacagaaagaaattgaaatgctttttaatgctgaatattttttcattctctattttgcctttttgttctgctccgccgatgccttgggcgataaccgctcaaatggacccgtcattttaaacccatccaaatttgtccataatcatcgggaaaatgaaatgtcggagcggaaccccttaaaagaccaaaattttggcaacaaatcggcaaaaattccgattgctgctgataaatactcccaacttgttgggccgtcaacgaatgtggcaaaagagtggttggagcggagcaacccaaaaaaggtaaaattaccgagcagaaaagaggggatgggaagattgggaagtcgagattgcaaaagtcatcg

SEQ ID NO: 13356 - DNA, 1297 bp, Heterodera glycines
gggagggggagggggagaagcattcccttcccttcccttcccccgggggaggggcgatcccggaagaaccccgagaacaaacttatccctctccagctgctcttgagtaccactttttttctcttaaagcatatcattatccaacggacagagcgcacaactgttgtcggaagcggacgaaaggcgggggggagaaaaagcatccgaaggatgggccgagagaaccatctgtgatgcgttagtggggcagtgattgttggttggtggccagccatttggccaacttaaaatgcgatgtgccaaaatcatttcccgcctatgacgaagaaaaaaagggggcgggaaggggcgggggatggtcgaaaagccaacaaataacgccattttacaacctccagatggccggacattttcgtaattttcctacaaatagcgacgattttacgtgttaaagcatacttaaaatttaacagcacttaaaaataactgacatttgttttattattcttctgctgctgcgtgatggtcgacttttcgattaattattgcgtcgatttgaaaagtgctgacggcacagtccgtggcggttcgttggaccgactgatgtcaatggcacagaacggtagctacaacggcacaacgatggaatttgttgacaaaaagctctcgggacaatccgatgtcacaatggtaccagacgaagaagaggcgaagaacgaggacacaatggatggtggtcagagagcgggctgttcaaattaccaaatcaaatttagaagtggccactaccaatttcgtttatcgtccgtcctgccctccggcgcttcgaccggttgaatttgacacactttcggaaggcgacaaagccgaatgttacgaggaggaggaagatggaaaccagcaggcggaagaggagggggaagaagaggaagaagaagaagaggaggaggaagaagaggatgatgatgagtatgaatatgtgtatgaggaggaagagcagcagcagcaagacgagaacggagacggacgacagccgggggcagtggcggcaacgatcaaagaggacgaagacggcgacatcaaagtggtcatggaactcccgcccaagaagcggaccagcattcgtcgcaagaagttttccgcgtcgcgttcgcctgcgcccgaacgcgtggacggagcacaagcggagttggacgcagaggtgcgaatttgacaattgatggtcagcaagcattttggatatgcaaaataaaatcaagtggagaatcagcgaaagtgatttgcgctgcattacttt

SEQ ID NO: 13357 - DNA, 3698 bp, Heterodera glycines
attggagaattaagaactaaaagccacctaccaaattgctttattaaagaatgttattaaagtcaataaagccaaaataatatttatttactttttggttatttttaatattgtccacgaaatttaaaataattttcattttaatttttaaatcttccaaagttttccacccttttcatatttattatcaaattacagtattgcaccatgaaaatttcaaaacaaaatggttattccgtttgcttaacaattaaatataaaataatgcaatcaaaatgttcaaacaatgcttgtttagcatattgcacactaagggggcggggcgatggactacaaataattcgtatgccaaaaagaggttaatcgggtgttatacagaaatcatcatcgtctgccaatcgtatcgtacacttctcacattccaccgtaatctctctccgtccaattgtcattgtttatgccaccacagcaaccgcttggcaccacactttctccttgaccatgttacagtagccgtcgccggacgagctgaagtgcacacggttgggcacggattggccctctttcgtctcattggcgtcagcgcatgtgaccaagaacttttggccaaagcgcgcgtacagtccgctttggatggcactcactgagccgatggcgtcgcccgccagaatgctctgaagattgttttaagttataatgaaatgatgggaaatgccagtgattgcccaaaaagtgccaatgacgaaaaatgcctcaccttttccaaggtttcttgccatgccgtttgggggcacggcgtttcgacggctttgtaatgaggctgaatggcagagacctggtggaaaaaatgcattaatttgttgaaatatttccttattaattgtttataacttttttgaaaccacaacaaaaattttcgaaatttgcagctaattaaaaaacaaaggactatctaatgttaataaattgtttgaactcggacaactatgtattatgaaaggtgttatactcaaaaaacgggttgtcgcccagttgtcgatttcagaaaattcatgcagaatttcaaaaaatcggtcacctgtccgagctccttggctccgcgacggcgacgtcggcgtccgagtccaccgaggccgccaagtccgccgccccctccgccttggcagcagcagcagccaccgccgccgcctccgcagcacccgctgctgcatccgccttggcaacactgctgctgctgacaacattggttctgttggggtaggccaatggcatcgatcagtgccaacagagcgatgacgccgaaaagagcgatcaggaagagtttttggttcattttatttgttgagctcttaaaaatgaaaattgattataaattatttttaaatgaatgagcattttttaaaaatataagagaatttagtgtaataataaatttcgaaagagggattccatgtgccaaaattttggattgattttggattaattgttaataatatttattattttgaaaatattacttatttgttaataaacacagtgaggagctttgctgctgtttgttgctgttgcgttgtgatgattttgctgtgtttgtcccctgcttttaaagcattgaagcgccaaacaaaacgccccaaggcatagaaaaatgccgccgacggagacgcggtaattaatggcaaaacgagatgggcgcgcggggcgacgacgcaccgacggcgtaccgtgttcacggcagtgtcgccggtcgccgtcatcgtttgtctgctgctatgtgatgatcatttctcaatcagcctcacctcataatcaaaaattaccggctttgaccaatccaatctccattaataaaaagcgattaagcctcattagcaacgcaaaaacgcgattacgccaaatgaaaatcgccgccgcagtcgtcgccgaatttgtgctttgaattttgtgcgttgcgatggaacacatcggccggcgaaagaagaacccgtcaaaagggggggtgagcagggaagaagcggatttgactaatgaactcgtcccccaaggtggcctttgtgagcgaagagaacacagcgaacaccgccgcgcagacagatgaaacgccgatggaccgatggacggacggactgcgcggacatcgcccaatgttccgggaccaatttgcgggagcatcggcgcccgaggggacgccgaaaagaaagaaaagaaataacacaaaacaaaaaagaaatacgcgcaaaagatttgctcacagcaaagacaaaattagttgcgacggacgaatgtccaaaatacacaatcagcagatcgaaatttatttacattatttatttattatttagttttatttgactacaattttgtaagaatttgataaaacaaaaatattaaaattattttatttaattaaaactttctttaaattatatcaatgaaatatataagaataaaaatattataatattgtacaaatcgatgggggtcactgcgtctgagcaaaattttagttgccataatttattttttgtttactaaattctataaatcattcaaaagctctgtcacatggtgattttggttgggcccagatatcatctaaaaagaaaataaagtatttatgtgatgcaatcgtcaatacatttctctatgctctcgttgctgcttggactcaattcttgatcagcaaatgtacggtcaattcctgattcaacctgaccaaagttgttcacatcaaaattatcgtccatttctatcgttgggcagaccaattctaaagggattcatattttaattaccaaatattctaataattcaaccaactctcttttgcaaattcgattaattgctgttcgacaaccctccaattttgctgagaaaacagttctgtgtaagcaaatcgaggatcaagtagcattgcgactcgcaacagtgggttgctgcaaagttcacgaactcgttcatttaaagaatccactatgaccctagcaacgcccaaaatgcgatttgagaaagttttttcttgcaaaaaatcacgcaatctttttatagtcgaaataacggttgatgctgacgatttttcattagaaaactgaaattgtttacaattgttttagttttaacatatttcacttgcttttaaagtctctcgatgaaaaatttccaataaagggcacagttcgcgcaaaaaatcaaagtcggtaatttccaaatttggtaaattttcagggacaatatctaggcgcgacttttttgatgagccaacaccaaatcctcgtcttttccttcaatagttaaaagaacgtttttttgttcacgaaatgtcatcatcatttcaaaggtcgagttccaccgggtcgggcaggccttaatttaaaagaataattgtgaaaacaataatttatgaaaccattgtgagttttttttgcttagaatttgtcttttcttgatagtcgcggagcaaggacaggcctttacttgtacgaaaaaaagtaaccaaagaccgaattttggaaatgagtcctgccaactcaggcagtcccaatacgtctcccataacaagatgaagaaaatggcacacacattgaaagcttaaaaaaataattataaaaaacaaaaattaggtaaaacctattcaagttcaaaatatttgtggcccttatcatgttttttgcgttgtcgcgaaccaaacaaataatttt

SEQ ID NO: 13358 - DNA, 2807 bp, Heterodera glycines
tccgcgtcttgtgggcactgcacgcgttcgatcactccttttgcgaagctgaattggcacggggtcagcagctgctgcttttccttctccgcaatgttcgtctgaatttacattttaacaatgtaagctatgccattgctgcatgttcacctcttcaaatgcttccatcggctgcacttcttgcggctgcgacattttgccgttctgttgtccaacccgacactgctccaatcgcagctgtgcatgccgttcggatgcgaagtgaatgttggccaagcattggatgcgcgtcaacgctttttgctgcgggttggccgcgctttgttctgccgattggagtccggaggcaatttgggcgttgtagatgaagctgtactcggtgtccttctgctggaacggctgcagcagctcggcggcgtcgttgtcgcccgacgttgggccaacccgtgccgtgccaaagttggcattcgccgaagacagaaagccgccaaaactcatccggttggaatggcgtattccgctggtgccaacactgaggaaggcggtgaccagcaccaaaagtgccgcggtacgcatttcgtttcttttttgattgctgtgttgcgatcactcactaatcagtcggaatggtcggttggggaaggaatgaatctgagggaggggagattcgaatgtgctctcttctgcctccgatgcgctatttatacggcccattttcggtccgttttgcccccggcggcgtcggacagtcgccgcaagggacagaaatttgggaattgttttgctgataacagtcaaatgtacaaaaaacagctagccaaattgacaggcgattgaccccaaattgacagctgctgctgctgctttggctgactgattgtttggtgctaatttaatttccccccggcgcattccgccatcaatcatttcgcatatgccattcaattttttttacttttttataaaaatattttttggtaattattttttaatattacattttgcttttattaaatatagacaacaaagtctattatgggagaccctgtcagaagttaacgaaattttcatcctgattttgtgcaaaatccaaggactaagaccccctagggcataatcacgaaaatccaatccattcacagactttaagctggattcttgaccgattttcggtattccctttttttatacttatttcaggttcgaatgtgatggtgtaaataattgtaacaccatcgctaccgtacaatgtttttttttttgctctttttgactgtaacaattggcaaaattttaaattgagaaacaacgcaaaagtttggcattttattcgttaaatttttttttaattattgcactttttccaattccttttcaattttccgcattttctcttttagcaaacgtccaaattcgtttagcatttttttatggaaactctgctggacaaaaccattttttcggtcatcgacccgcccaatttgcgcattaatttgccgcgatggtttacggttttgaaatgtttttttttaattgtcaaaatttgcctttttcagttcccctcgcccatgcaaacctttttcttcattcttctcacttatttcctcgtctccggtggcattgtttacgatgtgatcaacgaacctccgtccatcggtcggcacatttcactgatttctcccattttacaaatttgtaattttatactttactaatcggaaattccgacttttgtcaatgaataatgaacgttttagttttatgcaataaaaagtgccgttctgcattcataacacagacaaattggtccttcttatgccattattttaagtagagaccggattttccaaaagtgccgggcccggaaccggtttccggtttggtaaaaatttaaattttcacatgtatttcacccaaaattgaccataaatcgtgccagatgtaaaatttcggctctacttcacttcaggcgtcaataatgacctcttcaataataaaatttcaaaaaaataaaaaaattttaaagaattttttgaaaaattttttggtaaagtgcattagtacaggaaaacctagtaagtaattctccataaaaagaaaaaaaattctttcttagatatttgtggaaaattttttaaagaaaattaaggatttttagggtccggcggtgccgataggcgccgccgagaaattttttgaaaatttcgatgcaatttattaacagaaattgtataaaaatgaagaatttttggctatatcataaaccggtaaaaaccggtccaaaatgccggtttccggaccggtttggcattttcgaaatgaccggtttccgggcccggcctctcaaaaaccggtcaaactggaattttccctaaaatcgccggaccggtttccgggcccggtaaaaaccgggcccggtccggtccgttctctaattctaaggcattaaaatttgtcgattttggcatttgactattaaattgtcattagacgagtaatgtgcttcacttttggtaatttcttcttaattttgccaggttccacggtggatgaacgcggaaacagtcggccaggcaataaatctttgcggattttcttttgaaatttctgaaaattccccccgttttcagtggccataatgccctaccgcgtcaatggccaatacattatggagggcctcgtcgcttcgttgatgttttgtctcggaggttggctcccattccatactccccccccccctttttttctattttacgaaatctttaaaatataaattaaaatgcccccattttcggccttggcattat

SEQ ID NO: 13359 - DNA, 920 bp, Heterodera glycines
aaaaagagcgccgcaaaaaaatgatgtaaaaagtcattcacatgaaaaggaaacacggactatagcttaatcaaataaggaaaaagtttttaaaagtcgtgcaaacagttatgtggggttttcggggatgctgatcctgaaaatgacacccgttttggccaattccgaaccccgaacttggattcgaacaaaaacttgaaaattcaaaattttcaaaattcatttttatgttcgtatccttacaatgaccattctttgatgttgcaatgtttgcgaataaacttagattgtttttaatcgatttttgaatagaagtgagaatttctaaagttttgaatttcaactttttgttcgaattcgggttcggaattcgaatttgaccaaaatgaatgttagattcgttatcagcgaccctaaaaaccccataaaacgtgttttcacgacttttaaaaacttcaagaaaatttttgtcaaaaaggtgtggcaccatctaaactattaccgtctcgggttttttgggtctcgagtctcggggtcaagtctcggtctcgagtctcgggaaattttcggtctcgagcagcactaatggttggtacggtttctccgttcggtccaaccaaacaaattgagtcgttttttgtagacattacgaattttcgaatttgtcgtaacccccgaaaatggggggggggcgtaattcacattatgacgaattacctgtaacaaacatctaaatgtgtctctgcagagcaggattgttgacggaagtgcgtacgaggagggaatccaacagcacaaactccaccgactgaaggaatcgctcgaatgccatgagaaggcactcgaagagtaagggcacaaaatgcatactgcagggattgatgggtttccggggcatcaaaaattgcgaatttctaacc

SEQ ID NO: 13360 - DNA, 4005 bp, Heterodera glycines
  unsure (1)..(4005): unsure at all n locations
tgcaagggggagacgacgaaggaggggaaggacggtgaagcaagcatggaaatgaagagagagagagagaggaagagagagcgatggcaccactcactcgcccattgatcattcatcccatttcgaatttgcaaattttgtccagttttgtaaaattttaaatttccattattacaaaaaatgcaaatttcgacacgattaagaagctttccaatatttgaagtgctcgcccaatctctcacgtccgcattattgttgtgcaactgaccaatatgggcaaaagcgaagcaaaagttgtcatggatacggacgcggagagggagaagagaatgcccgggggggggngggggggagtgaccaattgccaaagggcaacgaaatgtccgaacagcacgcactaattccatccgatgtatacacttaagtcacttattaacgccttggggaacgaccggcgactaacggcgatgagtgacgaatcaaaggaaaaccgacagcatcagcacatccccaaatggctttaaaaagtgacggacaaatgcccaaagagacacatcgccagaggaattcggcgcgaaagggaaactgcccgatgatgccgatgcttcttctattatcacttttggcaattactgtcattttgtcggagggaaggccaaatatgtggagaggggacggagaaaggaaacagacggaaataggcagagagaaaagggaacaggaaaagcagagagacaaagaggaaaagttaacggaaaggggagaaggcaggagaaggtacagaaggcaatcactgccaacggacaatgtgttggtcagttattggcttattggcatttaaatttgagagaaaaaagcggaaaaaatcatttaatcttataaatttatttgatcattctccgtcttttcaggtgtattcttccaattcgaatgtgtccatcgccgatcggatccaagttttgtccaaagaatcgcaaattcgaattttggagcgaaatttaaacaccaccgtttggtcaaatgcgtcgcttctgcaggcaaaaaatgcttacgatattatgtcaaaccttaattttgtgatcagatgtcacaaaatggtgagcaaatttcgatgagtgcgtcgcaagcgatcgctttggtaatgaaattgggcggaggagcgcaaatggaaggcacgggggacactttacaggtggagagactaattaagggataaatgggaagaaagggactaattaagaaataaatgggaagatagggtagggacaaattaagggattgaagataaacaggggagagagggaggggacaaaggagttggggtgcatttttgtgttcagctaaatgccagcagcgatgggccgtcgtcccttccgtccgttgactttgtcccttcccgccgcatggaggcccaactgacgggccaacgtgtgaatgtgtccctggctgacttggccacccgtgccattgccttcagtgcgtccggcgcgcgcgtggcggcggtggtcgccaccgattgggcacgacagaacgcgcgggaagaggtgcgaattttgtcaacaccggcgggggaaggcgagcagagagagctgagcgttgtggccaattcgcctgagtatcagtgagagagtgcaacataatgctaataaattgccgttcaaatgctttagggtccaaattcgactgatcggtgccgaggcacgtgccaattcatccaaatgatttctgaccaaattcgccccctccccgttcagtccgcccttctcttccgagattctcatcttcaaattcccgcagaccaccggtctcttttgctaaatgctctcgactggcgcgtcactgttcggtcggcactttcgccctttgaactccatgccaccgacagccgactccaattgaattgttttgaagagtcgctctccttggtgcttcttcccgacgcacttcaattgcacattggccaattatcgaggtaagcgacgcgcaaattaaatgtgctaattgatcagaagcgaatagatcactttaaccggaaataccattnttggctgctgatttttcaagttttcatttctgcttacatttggccattcctttttaattttcgttccgtcgattcttttttaatttttccctgaattcgttcgcctttttccgtcctctcttttagccttgccattgtccgttcttccgttttgcccggaaaaatgcgcattaatggggcgattgcgaatacttcggctgccaattcgctgctaatcaccgatcggatggaaatgatttcgcacgacttgagcctttttctgagtcggaacggatccgccgactccgaccaaagggcaaaggccgacgacgacgaccaatcagtgctgatcgatgccgttaattcacaccttcggctgttccattccaatcacacaatggtaaatatttgcataaacttcgaactttcagcttttaggcttcattgactgccgcaaaacatttcgtagaaattctcgggggacggccattgctgcaaattttgacgggaaatgtttctgtggagatcgaactggttaaagaaacgaaaacggtggccgaactgaacactgacattgtgccgaaagagctgatgaggactgaaaatgccggtgactcttttggcagcggtgggaatgcatttgaccattttggcatttttcgtgtctttggaaggtccctttgctattcggcctaatgtcacccatcccatcgtgctcaattggactcattctccgcccaatccgtcccaactcggctcttccgtttccgcttcgtccccccttccgtcgtccgttgcgcccgctttgaatttgtcttccctttctccggcatcgacgccctcccgcccattctctcccgccaccccccaaatggccgacccttccgagctgttcactttccgtcactctttcccccctccttccgtttcgccctcttccgctggtccctcctccaccgaatttgaatcgcttgtgacacataatgagtcggcgtccgcttttccttcccccgactctgaactgttcactttccccccgtctcttgtgcccgatgccgactttctcgtcggccaatttgaaactgtgccctctcagcggaccacccaaagtcttttcccattgtcagcgaccatttcggcactccaattccccgaagaaacggcagaagaacaacagcaacacattgccgaacaattcccgggcattcgacgggaaaatttgctaatttggagaccggaagaaaacgaaggaacggagggaaaggaggggggagagaaattggagacgtatttggtggatgaaaaggaggaagagggagaggaagggaagaggccgagaaggacactgaacgacgacgtcaatggaagaaagacggaagaacgaatgccgagggcggagatggaagtggacattgctgtggagggggaggaggacgtgagggcggagagactgaggagagagttgggggaaggcatcgagaggatgttggaagagtgtgaagagaagaggacgaaaacaatggaaagagaaacagatagagaagagacactacggaacgagacgaacagagaggacgaaaagataacagaaagcgacggagcgagtgcagtgagagtaacggaagtgaaattgaaatatttgggaaagatggactcaagcaagaaggaggtgatcagaatgcacttcacattggaaggggaacagaatgaattggagaagggcattcgaagaatcggacagatggacagagaaacggcggacaaaacactgaaacaccaagtgactaatgaggggagggagcaattagggggtacggataaacagtggcaaaaaataaatagcattcaaatttcggaaaaataaatgaaaatctgcgaattttttcacatacctattcaattgcaaacaattaaattaaacgacttttgctgctaatggggaacgtgtttattgcatttttgaagaaattctttaaaaaaca

SEQ ID NO: 13361 - DNA, 1586 bp, Heterodera glycines
aaaaaatcgatttttcaagtgtcgttgggggtactcaaacaattatggggagcaaaaatccaacgcagaattaaagtacaggctatagggaagctattcccgagggattcggtctccccataaatctgggcgcatcggtttggggggactgcccaaaaacaaaaaaatcgattttttcaagtgtccgtttggggtactcaaacaattatggggagcaaaaatccaacgcagaaattaaagtacaggctatagggaagctattcccgaaggattcggtctccccataaatctgagcgcatcggtagggggacggcccgaaaagcaaaaaaatcgattttttccgtttggggtactcaaacaattatggggagcaaaaatccaacgcagaattaaagtacaggctatggggaagctattcccgaaggattcggtctccccataaatctgggcgcatcggttcgggggacggcccgaaaagcaaaaaaaatcgattttttccgtttggggtactcaaacaattatggggagcaaaaatccaacgcagaattaaagtacaggctatggggaagctattcccgaaggattcggtctccccataaatctgggcgcatcggttcggggggactgccccgaaaacaaaaaaatcgattttttcaagtgtccgtttggggtactcaaacaattatggggagcaaaaatccaacgcagaattaaagtacaggctatagggaagctattcccggaggattcggtctccccataaatctgggcgcatcggtttggggggactgcccaaaaacaaaaaaatcgattttttcaagtgtccgtttggggtactcaaacaattatggggagcaaaaatccaacgcagaaattaaagtacaggctatagggaagctattcccgaaggattcggtctccccataaatctgagcgcatcggtagggggacggcccgaaaacaaaaaaatcgattttttccgtttggggtactcaaacaattatggggagcaaaaatccaacgcagaattaaagtacaggctatagggaagctattcccgaaggattcggtctccccataaatctgagcgcatcggtaggggggacggcccgaaaacaaaaaaatcgattttttccgtttggggtactcaaacaattatggggagcaaaaatccaacgcagaattaaagtacaggctatggggaagctattcccgaaggattcggtctccccataaatctgggcgcatcggtttggggggactgcccgaaaacaaaaaaatcgattttttcaagtgtccgtttggggtactcaaacaattatggggagcaaaaatccaacgcagaattaaagtacaggctatagggaagctattcccggaggattcggtctccccataaatctgggcgcatcggttagggggacggcccgaaaacaaaaaaatcgattttttcaagtgtccgtttggggtactcaaacaattatggggagcaaaaatccaacgcagaattaaagtacaggctatggggaagctattcctgaaggattcggtctcccccataaatctgagcgcatcggtagggggga

SEQ ID NO: 13362 - DNA, 2253 bp, Heterodera glycines
cttttcctgtattccttttaagtcaaatttatttttcatttgaaatgtcaaaaatttgaaaatgtctcaatgtggcaacatatcccaaaattaaatgttatggggcatattttgattcttttctacttttattaataaaaagcgaaaaatttgttcaattgaaataatacaattaaaaaattaaattgtttattgagaatcaaaaaaaaatccttcatcagtgatttttttgatttaaaagaatatttaacaatttatcgaaatgcaaataaacactaattctgaattattttagctagaaatcctaagatttccattcagtttaaagagtatggttggagcattttattttattttaattttagcaatttgtttcaatttatttcaacagcagctcacaagatgagcaaaatttccgtcctaatttcccatcaaattcactcaattttccttctcagttagtcctttttcgaggctgtcaatgtaagcacgccacgggtggacagatgagatttcaatgttgccgcgtcgacgtcatttggcagtcggtattgacggtgaatttcgcgcttaacacttccgtgctgatctgaaattttgacaaaacaaatcaaaaattgatttctttcagcggtagtggcggaggggaaaaaagcgtttctaaatttttgaatcgaaatagaaaaatttagttttaaaaaacagaccaaaaaaccaatgcattgctctatgaatggagaaaatggagacagaatgtggattttgatcgtcattctaatatgctttaaaagaaatgtggtgtaatgtttttatgctatttggcggtataaggaaacggaaaaccgatttaatttaaaaaactgccaaaacgaacgctttttcaaaatgccgatttctcaattgcctaaggaatattggcagaaattaccaacctttgcgaatttcgtggagacaatgaatgatcacatcttggcccgacactttgaccttgtttttttttttaattggataatttttctcttttcttttggcattctgacctcaatttcttgtggagcaaaaaattgcacgtctaatccaacctcaaatttatcttttgtgttgtgcactttgacaactccgtcagtgtgttgtagcggccctattaaattaaaaatattaatttttgaattaaaaatggtatcaagttttacttcataatggaagaaaatagattcaaaaaacaattaaaaaattacagtcccattgtgatgctgcatcatgttcaattggaattgctgacattgccattttgaaagtttttatacaatttatttaatttaggctttatttaaattgtatcattaataagaaattgtcacttttaatgatttttaacaatatcaaatgttatttgctcaaccgtttctaaatactttttttaactttaaagtaaatttaaattaaataaaaaggttttgcaaccttcctttttcaaattaatataatcaataaatacgctttatttttttcaaattttaatgaataaaattaaattaaaaaatacgcaaaccatttacaaccattaataagagaagcacaaaacgatggttaaatgcttatgaaaaccgtctcctgtgcatttcatcacaaaaatatgtttaaagttgaagcaaaaaggttctttctcaaatccgctgatcagatccgcttctttgtcttccacaaaacaaaaaaaacggcgctaatagacgaacgaaccgttaaattttgagaaatgagcaaacaaaaaggaaaatgggaggagaggcggtaaaaacggatttacgggggggggggacgaaagttaaaaacggaaactgttgctaattgattttaactcaaaaaagcagatattgaggaaaaggaagcaaatttagtgaaaattttgcttaatttttaattattttttaaggcagttacctcaaagtttttttcaattctttaaaaattttgttcattaatttaaatgagttttaattaagtgatcctgaaaaagttttgactgagaggacattttcattttaataatacaacaaaattaaattattgctacaaattttaattagttaaagcattctctctaaaatggaattaattaaattttatgtactcctaataaattcagttagcttttgcttcaaagaattttatttattctttttttttataaattaattctagaagtaccagcaaattttttgagatcgaatcatcgaaattgttttagtgatc

SEQ ID NO: 13363 - DNA, 2476 bp, Heterodera glycines
  unsure (1)..(2476): unsure at all n locations
aattttttatgctaaaatatattttataaactttaatttttaataacaaaatataaatttttaaagaaaatcatatcttaaatttatacatattaacaaccttaaaaacgggtacacatgcaaaagcgactttttccgtgtgttcaacatagttgagacagctaataaaaaatttaaacaaaaatttttcaggattaaaatttaattttactcattctcgaacaacagaacccgcacatggtagtacaatggttcgcactcaaatcgtgttgatccaatagtaaacggacgagcgcaaatgcatttcacctcagagagagttgcgggaattctctaaagaattttaaaaataaataaattttattatttggtattaatcataaataattattttattttttgtaatttggccacttgcatttggcttgtagttcaaaatgtactcgtattggcacaaggcgcggtcaatgattggcatgtttgggtgaacaggctgaaaatgtttaatttaaaataacacattgatgaaacccagcgtattttttaccaattaggtgcttcagagagaaattaatttttgccaaaaatgacttattttgagggttttagtttaaacttaaaaaatcaaacaaacaaaagtattggtcagcaaatagttgcaatgaaagactctgaagatttaaattttcaaaattttagaaaatttttgtaattgaaatgcttaatttttcaaaaaattacctttttatttgggggtggggtggattttcggcgcccttcccaagcttaatgctggcctgccaccaatgggcccaaaaatttagttttatttttttacccttcttataaaataatgagtccctctcataacatttgaaaataaattcttaaaattatacaaaaaaattaattaatattctgaaccttcattctccgatgtctgatgtcacagcttggctgttgtcggtgctgtgttcccatggttatctgtagtccgttctttatgtcatcgggctgaaaagtgtgtgtgtgtaaaatcatctgcacaaaatctcattaatcgaaattgtcaagaggactattgacaagttaataaaaaaaatggtggcaaaaccactaatcaaattaaattgctgtacttgaactctgcgcaaaatttgctcatatgacggcgaaatgggtgtgtaatgggacacatttttgtggtgtaaccaacgcaagaatgcgtagtggtgatccgtttcggcataacgaaaatagcattcgttgtgtagcgtaatttcgccgtcctgcagctgctgttgatcaccaccatcttcttcgctgtgcccatgtttggtgaataccgtattgtggtgcttttgatgtccactaaatgggagaaggngatactgtaaccgaaacggcataagtggcaactgtgaatgccaataaatggngtttgtgcctatttttaaaaaacattatatgtaatcttatgcgatctttccgaaatgaaanacagagaagggtacacctaccccaaaaagaattttcgatttctcatggcctatgcggaataatacaaatttttttatcaacaatgaggaaaagtataataaaaaccaaaaaaatgctctcccttgactatgaagcaagctgcaaatgcttaaaaaaaaataaaatatgcttaaaaatttttaatttaaaaaaatttatttattaatttttgaaaaagtgaaaaagtcataaaaatccctaaaccattcttaaatttgtaaactgaataatttctagacttttttgaagtaatttgatttcttacgactatatttttgaaaaaagtctctattttgtttcttaattttataaaaaagttttttttattttcaaatatgtattagcaaaagttaaatttgttatcacaacatctctctcctattaaactaaacacaaatagtcttaaaatagccaataattattgtttattattgtgataccgatattttctgaaggaatttacgacttggcacagctgaaggacgagaaaaatatgaagaacaaacacaaatggtttttgttccattttggtttttggcgttttgttttcgtgttgtcttcaaaaattatttgtttttatttctacaaaaaaattgagcacgtntaaaataaggcaaaacaattaaggccggatttaggtattaaaaagttgaaaggagaatgaatttcatattaatgaaggcaaatcatgggttttaagttgtcaagtacataaactacacgaaagcttgaaaatgctttaatttaatcctaaaattattatttctcttgagaaaaaaaatataaaaaatgaacatattaattaataaaatttatttaatattaactaattcggattctataataaaactaacaaattgctttctttggttgcaaaaaccggtgaaattataagtatagaagccaaccaaccaattagtgtgtgtaatagcgagaa

SEQ ID NO: 13364 - DNA, 2577 bp, Heterodera glycines
  unsure (1)..(2577): unsure at all n locations
ccccccccncccccctcgagggagtatcgaaaaatagccgtcccggggcagttattataggaaaaacggtagaaagaatttattggtccaaaagcgagcgagtacagtggaccatgcttgggtgtataaatctaatttccataagataaccgtttcgggataaaagtgcatgaaaaaatgtgccctgccactcgcttagcccattttggcattgatcactgccaacttttttggcattgccactacctattgaaattttatgcctgatgaaaatgtatagaaaaatgtgcccgccctgccactccctcacttaacccattttagcgtgatcgctacaaaattggatttttatgtttggcgaaaagtgcatagcaaattcattcaaaatattcattcatttttattcacaaattaaatcaaaactctctcattagaaaagactgcttctagtgaaaaagaattttttttcaaaatgattggacctattcctgctgctatggcattgctgctgctcgtcttatgctcgtttttaaatagtaaaattaaaatatttttaacatttcgtaacagcgttgcctcgggttgataaaaagtttgggtcgggtttagggtttcgggaagccaaaaataccggattttttggatcgggttggcagaaaaaatcccgggtcgggctttgggtcgccaaaaagagcgggtttcggttgggttggcccgaataaagttcgggttaggtttaggggttttgggtcgccaaaaagaacttgttttgangtcgggtcggtcgaaaaaagatccgggttataagggtttcgggtcgtccaaaaaaccgggttctcgggntcgatcgtaaaaaagctcggacngcttattggggggtttggggtaacctacggtaacccttgttttatatgtatttgataaataagaattaaatttttagtggagaaacgggaccgatttcaaatgtacccccacaggcctcaattcaccagcttcatcaattttgcaccaaatgggaaccgacaatctgttgaacaacaaccaacattaacaaacacaaaattgaaaaagagcgtagtagcaaaagtggtgatttaggtatacaataatttgtaaaaattaaattttgaaattattaattttaggcaaaaacagcaaacacccgcacaaaaaagagtaagtaaaattagattaagcaatcggcaaccgaatccattgaactgttcgaatgtgttgtatcatatagcaggaatggaatcgggttccagacctttttttcaaaaaatcccggacctgtctggagtttttttttgaaagtaccccaaaggtactattagaggaaataaaattttttaggtgagattttaagtgatttttgacggaaattgacccaaaaagctttagaacaattattgctaaaaatactataaaaattcactcgctcaataatacaattttttaaaaatctaattcaaacatagttaaaagagaagaaaaaaaaagaaaaaaagaatttttaaaaaaccgaacattttcccttttttaaggttagtttttatcctttttttgattaaagcaaatccattgaacttttcgaataagttaaatgcaaacattgatagattattttgaaaagaaataaaaactaaaaaagctttttgataataccttgttttttaaggaattttaattgaaaggcttgtgcttaggtatttgctagtcatattttaatcggaacacgttctttggtttatatcaattctgtcaaaattggtcgaaagcctacctatgcagtttttcgcattcagaccgaatcaattgttgcaattcgaattttcatggatttcaaaattagaattaataaaacaattttatagatcagcaaccaaaaagcctcatagaaaacttggagttgagagtaaggtgaaagtggaacaaaaacgcaaaagcaaaaatttaagtgaaaagaaagggcgatttgggaaaatcatgtaagtggggaagacaccaataattgagcaattatgatttatttccttgtcaaggttttacgtgttcatgttgatcactataattgtgccccatgtgccgcaaaatgtgacgctcagtatgtgtacaataataaatagggctgccaattttatgtaaatacatttttttcctggattctacgtagtctaattagtaggaaaaacatcttcttttttccatttgcttataaaagttgggacttttatttacatatttttatacatatttcggacttttagtacatattttcagatttttgggaaaactgcttaacaaaaatgcaataaaatcgaaaaatacacccctaagaagagatttttcaaattttttttaaatgcacccctaaaatttgagcttttcttactcttcaaaaattttcctaaaaaattaactttttggctttattaaaattcttaaaattatattttttaattaattcagtgtattttttggatttttgtttgtcaaatacctatttttcatttttttttctacatgtttcatacatatttcgcaaattttttttacctatttatgtatata

SEQ ID NO: 13365 - DNA, 1979 bp, Heterodera glycines
  unsure (1)..(1979): unsure at all n locations
agttcccccttccatttgaaagcccccctttcattagaaggcctccctccatttgatggctcccctgctcatttttgagcggagttcgctccattagaaggcatagaggaaatacgataatgtctaacaaattaaataatttaatttaatctgtattttgttagtcggtcatcgatgacagctgtaaagttaaagatggtaaacaaatatgtgacacccaactggagatcaatgctgatcagatggggcaactacgaagaatgcttgttagcacaaaaatgattgatcagagcattggaaatgacaatcgtcgaaaaacattggagggacagacaagtacataaaaagccattaagaaataatataattgggttatatttcacgaatttttatacgtccaatcgacgtttaccggtccaatcaaattaatttagtaatttcataatctattgcggaaatccccccttttgaattgcaagggataatccccgtctcatttcctccaaaaagtcaaagcgcagcttgttacaaatataaacgatctagtaaacgcataaaagtcgatcgattgtgtgcataaaagtcgatcaattggacgcataaaattgatcgattgggcgcataaaagtcgatcgattggacgcataaaagaggatcggacgaataaagtgaaatagaaccgaataaatttatattcattaaaatgtataggtattcgaaaaaaaattcacaatgatttacctagttacactctctttggcaaaccaatgtgatcatcctgtttgggtgttcagcaacgcaattcctaatgtgcaaatgccggtgcttttggaatcaaaccacggccagcactttccaattgcatcaactcaggcagcggcacgtttatgggttgaacagcataactgcaacgatgtcagaattaaattaagaaacattatacacatacataagtgtataataagcatatattaccccataattcctatattaaaggccactggggctctattttttaacctcctcaaatgtggggctttatttctgagggggggggggggagtggctctatatttccaaccctctcaaaagggggactttatttcaagggtggctttattgcaggggagatttaatgtaggaattacagtatatataactagggctgctaaaacaggcaccagaaaatcgcgaaaggcaccaaagagggcattaaaaactttcaaatacgaatgttttcaagatgttataagcaaaattcttagaaaatcaaatatttttatttaaaaaaaactactctttcggagtgcattttttaaattttgatagcaaaaaatcgattttactgctgtatctttttgaatttttggacaagaaaaatcgatgataagtccatccttaggggtgcattttgctaattttcaaacaaatttaggaccaaaattcaaaaaaaaccccgccaaaaagggcatcaaaagggggcatcaaatgtaaaaaagggggcatggaagggcataagggcacgaaaattgcaatgctaataataaacaaagaagagtcacataatatttgttcataatatgtcaatgtataaaattttaaaaaaatgttttttttagctcaccgatgatgaaaaacaaaaaaatttaatatgcaaccctgctggggccgacaaactttcactctttgaatggacctttgatggtattagccagttcattgatgtcagttatgtggacggtgccaatgtgccgatgggtgttcatgtgcccgaattcccggacaaagacatcattatcaacacgcccacgggcactacccacacagtggaacaactgtttgaagatagcaacggtcaacttgttgtgccactggaaatgatcatncacgattatgccggtgtaagttaaataattttacacagaagagtgtgcaaatttgtggtttgtccagccaagtgtacaacgtttgtttgagga

SEQ ID NO: 13366 - DNA, 2532 bp, Heterodera glycines
aattgctcattaactaattagtgataatgcataatgcattggttggtgatgattggtcccttccctccgtccgttcgctttaatccgacccatcccaaagtgcgaacccttttccttcattttcactcacaaactccttttttactttgtgtacagtacatccaactctcgaggagagggcaactgcccgaatcggtcgtgccggattagtccaaagtctgtgccagtcgcccctcggctggactttgatcggctaacttttgccagccttttttctgccggctgagctgcgaccaaagtgccgacacgtgccaagtcggcctttgcttttgtttactgtttttgtatattttgtatttgagaggcataagctaacaacagcacggcagcagagcacaagcatttgcagaataataattgagcatttgaattaataaatggaaaataaattagacatataaacactttaaattgcgcgacctttgctctccaaaaatgaccgaattggcgacaaaacatggcaatgcatcattagcaggcttttcagttgctaatccgtcctttcccatataagccgcccccttttaacagtaattccccgtcccctttttttgcctcccctttgaatgtctgtccattttttgacccttttgctaattgccatttgcttccttgttttgtcactcatttgttgctttgttttgttgttgttccattatttggccaaacaatgctttgttttgttttgcttttctttccgttgctttgcttttgtctcgcattacaccaattgtctcgtcttccgatttatcgccacggctttttctgttgacttttgcgcgttaatctttccctgggttaattccgaagctttttcggtgtttgcggaaaatggaaggcggggaattcggagaggtcgcgagaagctcgagctttttccgtcatttcctcgaccaccgcccctcggcttttcttcttctccgaatgaccgtccaattcgccctttttgtttttggtcctttgcccctcccctcacactttggggcagtgactttttcacctttccccttttagctaattaatctcccgacacaaagtgggcagaatattgagaagggggggggcattaagcacctgagcataaatccgatttgggctctctctccgaccatttaatgaaattaaatgccgccacaataaattgcaatgaaaagggcgcatttgctcattggtcattttattttggcacttttgggcgcattgaccagcagcagacgggcgggagagaaaggctaagattaattagcaaattattcggatgggcacatttcgttgctccctataaattctctccactttttcagccctttccattgccccctccccttaattttgctccaaaatgctccaaatttggccctctctcgccatccttctcctccgccttctcatccgacttggaacagttcagagccagattgacgtacaatacgacgacgtcaacagtatttatgtggacgaaattgacgacgatcggtcgatggttttggacggggaaaacactgctgagtcatcggctggcaaattgccattctcgagaatgtttcggtctcgtccatcgtcggcaccgtcgtccactcggccgaacattcttgttctgatggtggatgaccttggctacggagaccttcaaagttacggcaatcctactcaggtgtgactgcttggcaatgacttaactgtcccatctctcaaggaatggacgccggtggaccaactgatggccgagggggtccgctttaccaatgcttacgctgccgattcgatgtgttcgccgagtcgtgccggcttcatgaccggtgccccctccctcccatcctccaattcacgcctcccctcctgtccttaggccgcttgccaatccgtctcggcgtcgtcggtggcagacgcgtgtttctgaacaccgacacgggcggtttgccgaaaaatgaatcgacaattgcggaaatgcttcgtgaaaacggtgagaacaaaaattgaatgaagaaagtggtcaatagcttggacaccggcgctcaattaaggctatacgacgggaatggtcggcaaatggcacttgggcatcaacgcattcaaccgctccgatggcactcatttgccgagtcggcgcggcttcgacttcgttgggctgaatttgccattcaccaacaattgggaatgcgatgagacaaaagtgttcctggccaagaatgggtgcttattcatcactttgcttttcaggatttcttttcctctgggccaaaccccgagaaatgttttttgtacagcggtgatcaggtgggccttttgggccttttctctttgtattgtatttctttctctcactctttttctttcttccttttctctcccttttcagtattttttctctcactctttttctttttcatccctttgtcgcttttcctctttccctttcccttttttccttttcgaagcttccccccccccatttctcttcggcttctgatc

SEQ ID NO: 13367 - DNA, 3280 bp, Heterodera glycines
  unsure (1)..(3280): unsure at all n locations
gcaggtctcgtacaacgcacgttgagatatcactctgaacagtctgaatctaccatgggagngaaaggngggcattggtcttttactggaactttaaattaatggnaattngttggagnaattataagggaattctgggaattggnaattagaaanttaattgttggtgttannaggtaattanatgatatnggncatnttaaagaaatttaggaaagaatgaaatttagaggaattttgtgnnggtggaaagtcangggacgattggtagggatgggtagtagatagaaagaatgaatggtagaaaatgatcttcctttgccctaaaggtacgtcagccaaacttgcccggacagtcagctgatcacacactcccctccgctggtgtacgacctttacagggacccattcgaaatgtaccctttggtggacagcgcaggcgaatggacggtgtccgtcgtgctcgacaaagtcggcacaatcttggagaagcacattggcacaatgtttcccgtcccaccccaattgggacacttttcgccggaagtgaaacgggtgagttttgtgctcatagtgtgggaaaatacttcaatgcatttttaaaattggcagtgttgcgattggccaaaatgccgttgcgattatctgacgaaggagcgaccgaaaagtgaggaggaggcggacactttcaaggagagatggacaggcatttgaggcggaggagcgagggacagaaagaaaagagaatggcgatcactcggccgatcaatcgcctgcggcgttttgccgaacatccacattttagggcatcgacactgtcctccgctttgatcaatttcgattctccagattctccgctgttactgattgatcactcccctcccctcttccaatttaattcgcacaaaaacttttttgctatttttctaatgggccgatctttttttgcttttagacaatttagagactaattaaaaaattataatgaagaggaaaagccaaagcaaaaagtaacttaattttgtgcagatttccacaaaacaaaaagactttgttcagattaaatttattgtaaaaataggaaagttttaatagaaaatgttttattgtaatatttataaataattgaacaacaaataataattgttacacatattttgatgaataaatgaatattattttttaaaattttcgaatgaatgaaaatgtccaaaaaatgaaaaatcggattggttttgccaatttaccatcgatgcttttcaactttcgccccctcagcaaacattcagcaaagtccgcacgtccgaccacagaaaatgcgtttccaatcatacgaatagaggcgaccgcggcaaaaacggcgtttatacaaatgacatctgataatgaaattaaatgacattgaacttaaatgtcatcggcgagggatttttcccgtcgaagacattacagtaatgcgtgggttactgtaaagaaaacagagttggaccccttggcccaccaattggtcattccattgcccccccccccctttttcgctaggacctcgtgtctctgtccatacagacggtgctgttcccgcacaatccgcagctgtttgggcagtcttgggaaagtgatggaatagccttcgattgggaacaaaaaaatgagtggcatttggccaacttttgaaatgaatgccaattccgtcgtccgttccccccaattttcctcccattgccccgtcccacccgaactccggcagtccatcggtgcacatccggacacttggaatggcaaaatgattcgttagtgtcattcttttcggaacattggaagcggaaaagggccccgcgggcggagacaaaacgaccgcggggacgggggcggggacgaacgaagcgaaagcggaaacggggacgacgcgggcggggaggcgggggaacggtcgaaagcggggaaaaagggggccaagggcgaggcgaagaccaattgcggagcagcaacagctcatcccccgcaagggttttgtgctgcttttctgaaacgcaatttatgcacgaaaatggacaccgaccacctcactcattagtcactaattgtgcaattagttaaccacaagtaattaattacccaaacaattgacttgcccaacccaaaaagatgaatatggcacagtgaaaattgagcaattttttttaatttccaaaatgtttttcagaattaaaataaaggcctaccgtttcggctcactttttgttgataaatcatcggaacgaaaagaaaaagcagaaaaaaagaacaaaatggaatttggcacataatttttaaaattagcgaaatgaacaaacgagcgaaaaatggaaatttaaaaagggagggggggggggacaaagcgaatttgtgagttggggagaaacaaagagacgaccgaactaacggaaaacggagcatttccttttgtgtcagctcgttttaatgctttattttaatgaaaaagcacagctgttttgaagtgtgaataaatttattggaaaaggcagaaatagtccaaaattaaatttgatcaacgcaattgataaaattataaataaattaataaagtcacaataactaggaaagaggcaaggcaacaagaaaagaagcgatcgaataaataaacattatgggaaggaatgcaatggccaattatgataaaaaaaaacacccacccccaaaaaggaattgtccgcctttcattcgttccgatcacaaaatcaaattcgactgatcagtccgtatttggtcggctggaggagagtgtccaccacgtcggattccaattggtcgagctgctcaagcaccgaactcagatcccttaattggcataacaagtgcgttggttaattagctaattgccctttcttcttccgtttattgttttttccgctctcttctaaattggcactgtttcggctttctctccgtccgcctcacttttcttctttgcccggttcggtgcgcagttcgatgtaatatttcactttcggctccgttccgctcgcccgcagtgtcaccgcacttccgtcgaccaaagtgaacgtcaccatttcggaggaggtgctcagcggcagaatggccctgtcatccggttgagcgttgtcataacctgcaaaaatacccttccgtggttttgttttggcaattcgttctcctcaaatggcccacctgtcgtcaagtcgcgcacaaatttcacatcgaaattctgcccaatcaatgcgggataatcggagcgaaggtccgcaaataatnttcttcg

SEQ ID NO: 13368 - DNA, 1167 bp, Heterodera glycines
catgcactttttctattggcccgtgtcaatgctttgtgctgaatttcagactttgttcttcctgctcagcactttcatcttcagaattcccactccgattggctgttcccaacgatggcattcgccgctggcaaaatctcattgaaaatttccttttcgcaaacaaaaaaaagaaagaaagaaatgttcgtttggctataaaaataaaaatgaattttcagtgatttatgttcaaatttcattaatatttcacaaaaaataaataaaacaaaagaattaatggccattttgtactcctccgattgaaacagaaacattcttttgtccgtccgttcgttggacgatgcaaagcgacgaatggacgggggagaacaaagtcacggggacaaagtcagtcatcagagtcactcccattccttcctcactcaaagccaaagcagctaattccgtcgaaagcccccccccccttgcggcaaaagcaaaaccctctctcttattttctaagcccaaccaattcgctttctcccttcctttctctctctctctctctctctctctctctttctcattcactcatttttgcttttcttcactcttttccacttgttttcctctcaccacagaaacactcacaaatctctccggataaaatcatgcgaataaattgtgggtacttaggaagaattgagtgaggaacgagcagagtcttattattcactcatccaacggaaggtaagaaaagaaaagagagagcgggaagaagagaggagaagagaagaagatgatatagagtaaagagaggagaaagaggagtgaagagaccgacggaaggaaaagacaaacggacggacgaaggaacggaggaaagagtccaatcgatgagaaaagctgaccgatgaggagaaaaaaagggatggaagaacatatgacgcaatgtgaaaaggaagaagaagatcaaagagaaaagaaaaagaggaagagctgaggaggagagaaaaagaggaagagctgaggaggagatcacctgaggggagaggggggggcattgttttgcccggagaagcgggaggaaaaaggaagtgtaatgtggaggcgaacgcgaaggcgagcggcgacgacaaaagcagtgatcggcgagaaagagatggacggacgaaaatagcgcga

SEQ ID NO: 13369 - DNA, 1031 bp, Heterodera glycines
ctttttcgctgcgctgtgctaatgatgcgttcggtcagttgttgcgcctccgctggtcccccttttgcacttcccccccccattttcccaattttacatttttctctatttttcatccccccccccctcccgccggtgttgtaatttccattccattctttcatttcacacaaaatgctctcagaaaggccaaatttgtccccttcgtcccccaacggaaattggcaaaacgacacttttcaaaaaatgacaacgaatgacccaagtgtaagcggcgacggcaccgccacgaacagtgcgacgggggcacgcattggtgagggaaacatcgccacggaacagaagcgaatgttccgcttcctccactcggcattggccatcgtttccatcctttgggccaccgtttgtctgttcctttacttccacgcgccctcctcacaggtgaaatgcccaatcgatgctctttcgtcccaccgttttctccctttggcaccactctctcctctcttttcgccagagtcaacagcttttcgactgtcgatggcatttgtccgttctgctggtccaagcttcgtttggccatgtgttcgtcttctgctcgcgcagtgccctccttttctgtgccgctttcgtgtccactcaatatgccattgtctactcactgctcactttggtcatttactcgttggacaccgttttgcttatgctctttccccgcccatcggctggtgagcagcagaatttaatgaacaaataaatgccaaattctttcattttgtccattcgtttttttcgttaggcgtcggaatggattttggcccatatctgaaattgaccgccattttcatcgtcctctctacttttgggttcggcttatcattggcccacatgaaaaaaatgctgcaaatcggcaaagaattggccaaacaaaacgaaacgacaaaaacagcgtcggccacttttgttggacaggacaatttgcgaacacttcgggtaactaatttactgctgcccttttgctcaactattaa

SEQ ID NO: 13370 - DNA, 2399 bp, Heterodera glycines
atgactttcagttcttcactggtccggagagtgcgcatgttcgcttcgcattgtcccgagtacaacacgccccctcaattcgaattctgccaattcaaatcccccgctaatggccattccctcgcctttcagacctttctcttcctcagtttgttgttccatgttggccggatgctgttcaatgccttcgtgttgtggtgtttggcaccgcgtgcattcggcacggcactttcactccgtgtcaaattcaaaatggactcggaaatggcccaggcggaccaacaatggactgagacgcgaaagcgggagaccaaatggcgagtccggcagaatgagtgtcaatgccaacatttgcttgtatgtccaggctttactccgtggccgcctgtgttttggccgtggcggttggccatttgctgctcaatttcggctacgttttgcagtcgatgattttcgagtcgttgtccgtcgccactggcctttccttcgtcttttccatgtgtcttctcggcgctgtcggcttttacgctgtccggcttctccgtttctgcttggtattacagttcttccctcgatgtttttttctctcttttcttttcctctcccttctctcttcatccctccttttttttaattttccattccattcagattctttccgcgtacatctctttgaacttgtttgtaactgcttccctgcttctgttcgctttcatccaagacttcttcttcttggccacaacactcgatgacgaagtaaaaaaaaaagcgaggagagggggagcaaattcaccatcaatgcttgctctgatcagtgatcattgctctgactgatcgtttgctctgatcagtggtcatttctctgactgatcatttgctctgatcagtggacatttctctgatcattgatcactttgccctaatcctctgatcattgtggttgtgggtattaaatctgatcatattacttcctttgcgtttctcatttcgtcctctttagaaggatactatcgccactgcccttaatacttcgtccgcttcctttcctttttcttccgcccttaaaaatggctctttttctgctccgccggatgagtccgattcgtctgacggcggtggctccactctgaagattttgctatatttatccgattttgccctttccgtcggcacttttttcatcgccggtgaataacggcacagattaattaattgcatttgtctttcatctttccattgctttttctttagcttttgccctccgttatgccatttccaccctcgtcaggacaaaaatactccaaactcagccctcaaatgtgcaaagggccgtccgattgctccgcgcactttccctcgttggcattgtttccgctgccattgaatttgtccttttggcagaagtgcgactttaattttcttttttttaaattttatatttttgtttttaaatttaatttagcttcgtcttggcaaaacttcttcaatggtccgtcctttgtcattttttcacttccttttccattttcagtctcatctttccgtcaactccgagcttttatgattggtcttccaaattttattaattaattagtttttattacccaactaattaattgtctcttctctcaggcttctcacttctgctcaatttgttttccttttttatgtgactcgctttgaacgcttccaagcactgcttcccgtccaaatactgcaggtaatcagcgaactgatgaatgcttttcgttcaattgctgcatctccccaacaactcattaagcttgcctcggttgggatcactacgcttgatctgatcggacaacagacggacattgtccaaatttacgtgaacagcgttttgcaggtcgtttttacgccactaacaataagctgaaaatgatgccaattttaatcgcaaattcagttttaccgcgtcactgaagcgcttttccgtcgtccgcttctttcctccgccgatggctccgcctccaccgttttcgtcacccattcgtcctctttggccattcccctgcacctttttgtcgatattttggttatttactgtccaaataatcggtaatactgccgatggttgcccgccccccttttttgatgaaaattttttttgttttcaaaagtcatgaaaactgcttccagggctttccagggtcgctgatcatgaatccggcatcaatgtcgacctattttgaacaccgtacccgaattcgaacaaaaagtcgaaatttcaaaattaaattttatgttcgaatctgtgtagaatgattattttctggtgtttcaatggtttctagttaattttgcttgttttaatctattttagaaacaaaaagcgaattctgggaggttttattttcgactttctgttcgaattcgag

SEQ ID NO: 13371 - DNA, 2206 bp, Heterodera glycines
  unsure (1)..(2206): unsure at all n locations
ttatgcgcagtgagcctcctanaaggcacccgaagcacacacaatttgcgtctgtccgtcgacgtccatcanaatcaaatcccttaaaggtgggcaaatacaaaaagaaaaaagggacaaaagtgcctaatcggtcccaaactgggataagtgtcgatgacattgacaaacgaattcaattccgtatctacgggttcggttgagagacggatgagctgagagtcgccaagacgagagccaacaaatgccacggaattatcctaaaaattggaaaaatggacgggggaaaaaggggaaaagaatggcaaaaccaaataaacaatgcattcggggatggagatttcaccgagaagttcaatctgaggaacgaatcggttggttttaacaaatttagcgataaatacgcttttacttttatgtcccgaatttcgtcctctttggccgggtcgcggatcagcaacaacatgaacagtctaatttttacaaggatatttaacaattgttcattttcagatcaccttccagccatatcgcccagcaaaaagcgttcccccgtccggtcgatgcgcccgcaacaattaaaacgcgccatgtgaatgagaggcggggcaattgctgtgtaatggcttggtctctaaattaaaatatcatttttctatagcaatattcgtcgttccctctgcccttttctttttttaatatattttcccatttctccccgttttgaccgtcctctgttcggctcaccttctggtaaatgatcgattcttggcccaccacaattaatccgccgtaaggcgacggcaccggcaccaaaagagtggtcgctgcttcgatattacctgcccaattagttgtgttttttttgtttagaaaagtgtaagttcgcagactttgttgccagagcggagagtgcaattctttgttttccaaatccaattcgcagactttcaaatggcgaccattcaaatcctggtagagataagcgatggtcggttcatctgaaaacttggcattctttataatccaaatttttgtttttaaaagattatttagcaatgtcatgtaattgttcgctatgctaatttatgctatgagaatggtacaaaaagtatcccttcagccaggggcgtatctataaacatttttcgggggggggggggttgctctttacccaataaacaaaaaaccctttttccgctgctgggtaagcactttttcactaaaaaggacccaattttggccgttttaaggcaaaaaacttagtaaaaatagtggaaaattgaggtccggcggtgccgataggcgccgccgggaaaaatttttggaaattagagtgctttttgttacgaaaatcgcctataaaatttttaaattttcgtttgggaggaaattcgaaaaatttttccattatttgctggaaaatttttaaaaattttcatttcggggggggggggaattaaaattttgaggtgtaggcacaaaacggaaaagtacctaaaaattttcgggaatagcaaaacttgcccgtgttttccaaaaatgccacgtccgtgatgtcgtagtcttcaaaacgaacgttgaaattcttcaaatcccgcccgtcctgccattggatcagctttaagtgggcctcgtaaagtcgcagtgcgatcagtcccgactcgtgcacacatgtaatgatccccgtctcggccggccttcccactttgtccgccacgtgtccaaatgcgcgggtccgcggctgtccgtcctccgcgaaactgagaatggccaagtgatatttggcggtcaaaatcagcaaactgttcagttcctgcagaaacatttggttttggattatcaaccgggacaaaactgcctaagatttaatttaaaaaatccctattattttttataattatattttcaattaacattttaatactgtcaattcgcagtacggacctcgccgggaagtttaaaagaattgatggaggcgattcggccaaatattggaatttcgcggtgcggtttaaggccctcagcggtgaccagcaaatgctccacccgactcactcgcgcgaccatcatgtcaagttcgttcgtattgcgaaaattgccaacgacggcgccggtcactacacaaaattaagcatttctattttaagtgtccctttcttcacaacctgccgtcggtttttgcaatgatgcgcaataacttagt

SEQ ID NO: 13372 - DNA, 1480 bp, Heterodera glycines
  unsure (1)..(1480): unsure at all n locations
ttttttttttctgttattcaccgaatatcgctaaagaatgaaacatttggctgttcgctttttgcgtcaaattaatctcgctcgatttcatcagacacatatccattgtccggtctgaataaccacattcacgttgtgatccacagcttgattttcgggatcgttttcagggagaaaaaggtatttctttatcaatgctttatttcttcattaaacaattaaaaatattcagcgattgaactctgtcgtagcattttggcacggaaactttcgcttgatctgttaaaaatacgcaatgaatacgaaatctggtgtactgcatttaaaaatcatttgaatgcggaggtgtttgtttctctctctgaaatattcttggaattacttgttaaattaagcacagccctcccctcgaaaagcggcacatccgtgggaaattattggacagctccgctggccttttgtccgttttggaattgcccaacgatttggaccgttacgtcccctcaaccaacagcaaaagtgaaggatcctccgtttgcgatacgacaaacaacaatcagtcactgatcgatgctatcgtctctcaaattaacaaaaatgctcatcgatggaattccgtccaatttcgccgtttcattctcagtgcactccaacgactaatttttactgcgctacaaccaaagccacaaatggtcacttttccgcatttggtcagagccgcggttatcgaagcgtgcaatttgcggtttgactcgtttccgctggtcgtcgaaaatgactcctatttgagccttgcaggtgctttctgattagactacgattatttggcttcaatttcaggcgtcgatttgccctcgctcatttcccctctgatcaaatgccgattttccaacaaatccaaccattggccgctggttttgctctcttcaggaaacgtttatccgtctcttttttctcctcggaccaacgaatccgcaccattcggccaaaatgcccaactttctcttcttttaatggatgaacactcccacaaatgttccgaaactgtccaacaattggccttgttgttgcgggcctttctctccgaaattggcctttcgtttgacattggtttttctttttttcaaaaaatgttgagtaattaaatgcattatttagctgatgtcaatccgccgaatttgtttctttacgaacggtcggccttttccttttgccactcgacgatggaattggcccgtttctctaacatcggttagtttttatatttccttttaattcattaaccaaatagaaatttaggcgattatgtgagcaggcgcgctcagataaagaaaataaacgaaggcggtgacatttacttgaaaatggcttttgtacgggtgaatttggatgccatcgtcaattgttacaaattgaccatttaatttagttttctaataaattcttttgactttttcaantgtgttaatatccgtattct

SEQ ID NO: 13373 - DNA, 1453 bp, Heterodera glycines
ggtacaaactgcagatttatttgaattttggcttctcttctcaaaaatcgcttcttttaattaatcttaaattatgcacttggtgtggcaaaaaatcacagactttgacaaaaacaaaagggggcagaaattttttgaccaaagtaaatagctattcatgatcagagtaactttaaaattgggctctgttgcagtttaaacgaccataaaagacaactttaatgcactattactttttctagaaccaccaaaatttaacatccttgatatcactcgatagccccaagaatattctattagcctgcaaatttcaaaaattttgttatgtttcaaaaagttatgcccagaaaactttaaaaaacttgttttccaaacaattttatcaaatcttttttaaaacaataaaaattatgaaattcaaaagggtgccttttcgtttttgtcgacctctactctatacaagtgccctaaattactattgttaattcagagagttaaagtaaaactttctcattttggcctctattacatctccaatgacagcgatgacattaaagaagcaatttgccctccaatgtatcatttccaatatttgttcaacagttatttagaattttaatttaggtattttgcaccagaatgtgtgttgaatcgaagggagaaattgtccttttgcactgacatttggtccttcgggattttgcttgttgaactttttacgggatggcaatttgccaaaatttggagtcggaagcaagttgtgtctgtgcttcggtcaatcattttcaaaagttattttatcttaatttaattacttttccacgcttcgttttctttgaacatttttgctaattttagccaaaatgggctcgtgccttgaaaatctgctcgattctgtcgaagtttcccggcccaccttcaaagagtcgcgtcactttctcaaaaatgtcctttattctgtgccctttgattgtctccaaattgctcccgtggacagacccgactcggcgactttactcaaaattttagaggacgaaaatcgacgaggagaaaacgaaatgactaaagatattgcgactaatcagcccattgatgaaacaattgattcgattaaaggtaatttggcgaatgtttgtctctcaattgacttaaaatgaagcccctgctcattgtcagaacaaattcgcaatgagtcggaattggccaaattcggattcaatggccaaacgatcaacgaaatgtttttcctgtggaaattgtgcgggagcagcgtggagagcattctcatccgaaacggagtcatcaaaaaccggccgccggtgctgacacttcccaggtgaaacactgcgagtttgataatatgttagtccaaatcaaatgaaacagaaatattgaaaaacaagttctatggcaatcctgtggggtttctgatttaaatttattgcatctcgag

SEQ ID NO: 13374 - DNA, 3550 bp, Heterodera glycines
ataatagattaaaatttgaaactcccattctgcaggatttacgattaaatacgagtccctaaatttgtcttatgaaattgcttattgtcagattagtcatcgatgatttgcaactttacgggaatgaaactgctcggaaagtcaatttgtctctgaatgtcgccgaacttccgttgagcaacctttttgaagtgccatgccattttcccatttgcctacccaattgtttagagactcaatgccattcctcgcgacgatttgcatctgagcatggaatttatgagcatttgtggccgggagggaaagtggaaagaaccctctccgaccgtagaagactcagtccaatctttggttgtcagggaaagggacattgcttaccaggtgatcagtgattggttggtttcggatggaatatttctctttaaacagatttcccccttgtttaaacgctctccttttgtttaagtttgaacggatgcgtttgtttcgtcgtctgttgtccgcctttcctttcaaatccgatttgttccgtttcgaatgtcaaaaggatattccgccggtgtatcgtggtgccatctgggccactttgttgggtgttttgcccacgtcttctgctgacgatgggtcaaatccccaggatgagttttacaacattgacacattttcggagcattccgctgatcgccaacttcaagtggacatcccacgttgtcaccaatacgacgaattggttgggaaaactcccatccgttttaacaaactttgtcttcctccacttaagatggcttctccgatggcccatcatcggatgaagttgctgatcaaggctttgctcgtctctcgccaggacgatgactttgtttattggcagggactcgactctttgtcggcgccctttctcattttgcacttcaatgatttatgtgccgtcaaaatgcccttttcccccgttgaatttgctttttccagcgaccgcttttcgttgtctcaacgctttcattgagcgttaccttcgcggctttttccttcgcgacaattcgactgtgattcgcaattatttggctgagtttatgcgcatgctcgagttcgtcgactcggagctgttcacccatctcatttcgttggactttcttcccgaactctttgcaattccgtacgttttccatgccgtttaattttcatttgctgtttttgaggtggtttttgacttgttttgcccatgttttgccacttcataaattggttggtttgctctttctccctttttttctgatttattaaatcgctcattttcagtttcatttatgggattctctgcttcttgccgattcgtattttcccctgtgtctttttttatttttaaattatttttaatttattttttagttttattggcgttgctattctcatccaactcaggtctcgtctcatttctgtcagttttaacgaggcaattttgttgttttctgacttgccaggtcaacccaatattaaaaaaaaaattatttgcttaataatttgttcatgtttagatttacccattgatgaaattgttcaaatcgctaaaattcattatgccaaatggttatcaacaagtgatgggcaaaacacgtgaaaaattataattagggctgagattatgtattttaaatcgcaaatagtgcctaaataagtgaaaaatcccttaatccccccccccccccaaataaatgctaaaatagaatcacaaacatttcaagcttttcagaataggtgcaaaagtaggtgaaaagaaagtcaaattttaaaaatctcccccagccctgagagacttcttaaaaataggtaaaacctaaaaatcttgccctaattataatcaaaatattttatagtgcataatttatatattgtattttaaatatttatgtgtatgatatttttaaaataaatgcataaatatttatacgcattgcattctccatccaatcactgacaatgattcgttgtcttttgcctcataataaatttctgattttaatatccataaaaaaaattttatcgttttttctgaaatggcaacgattctttctcatttcggcacgccatcagctgacggcgtcagcgcaaaaaaggtgacagagcggcagccaaagcaaaaaggagacggcacaaaagaaaatgggacgccgaatcactcgacaaagccatgggtggagaaatagtgggcaattagttattattgtgggacggcctggtaaatgtgctgtttaagtaggccgaaaaaagtggaggaggtggcctaccaggaggaagtggttgccgtgctgaagagatgtgtgcagggcgcggatgtggggttttggcatttgcaattttactttttaatttataataatgccgactgattattctcattcagttgccgaatttgttgttttatgggccacccggaaccgggaagacttcggcagccgtcgctttgtgtcgtcaacttttcaaaacagcacaactttacaaggacagggtgttggaattgaacgcttcggacgagcggggcattgacattgttcggcacagagtgcgtttaatttttgccaaaaggattcattttcatcgtttaatgattggcggactttcagataaaagaattttccaaagtggccatttcctctgtccgcgttggcaaagactcggtcgtcccgttgaaagtggtcattttggacgaggcggacgcgatgaccagcgctgcgcagtccgcgctccgacggacaatggaaagcgaaacgcagtcgactcgcttctttctgatctgcaattacgtcacgcgcatcatcgagccgctcacgtcgcgttgcgcgaagttccgcttcaaaccgctttcaatggccgcgcaaaaggaaaggtgtcattttgagacgggcggggggggggcgacaaatgccgactaataaatagtgacgcggacaaatattgacttgatcagaatgttggacatttgcaatgctgaaagcgtccaagctgatcaggaaacgattgaagaattggttaatttctgttgcggtgacctgagaaagtccatcactttgctacaatcgttggcctcccttggccgccaaatttctgtgagcgatgtccgagaggtggcgggcaaaatccccgacgaagaagtggctttgcttataaagacgtccgaatccaaaaataccgaaaaagtagtcccaatgccatgtttaatttcattagatcatttacaaaaacagatcctcgacaccgttcgacagattatgagaaagggttacagtgtcacgcaaatgcttatacaattggcggacgttctgttggaggagagcactttggaaccgatcaatcagtgcagagtattcgagaaaatggcggtttgttttaaattatcagggttaccataacctacagtaaggagacaaaatgttttacggttaaggaagccgagaaatgtttaacggacggggcagacgaatacctccaactgttggacgtagcactgacaattaagaaatgttttatgaagccaaaccatcccaatgaaaatgat

SEQ ID NO: 13375 - DNA, 2993 bp, Heterodera glycines
tgataaaaatgagattttttttagaaattaacttgttttttgagcagttttttcaatttttggcacatattttggccttttttggggtttttagcacatattttgagagttttttgcacatatatatgtacatattttgcgttttttagcatatataaatccgttccctgtttataaagatataatccggaatagtcaagattcagttagtccggttacactatatagtatcagcataagatttacttgtagccgcattcagaaaattattcagataccagaatacaaaaacccagaaaacatattctttggttccgggcattcttgactattttaggattcgtgaagccttttgtttttgctaaatcacggttaaccggataccggaacttcctgatttttttgggtccggaagccctgaaggatttaagtacgggtatttgacataaattttttggagaaattggcatgttttcaaacgcaaaaaaggccacatttaatacataaattctactttctaccggtggcaattaccgtaaaacttgcctaatccaatctcatgtacaatgttccaccaatttttataacgttcatgaagcagtttggtgtcagaaagttcgtagtttctttcatgcagatacttggtcgttattttgttaaattgttgtacaaattgctcgtaaaatgtgtttaatttggacacataatcctgctcttcaccattgtccagtgtctctttgatagacgccacagtaagcggcggtgctacagtatcttagaaagaatgatcaaaatgaattgcgagcgtgttggaaaattgcaaattcctacaccctgcatttttcgtaaatcagcaacttagatactgtaaggaagaagctggctgggcgattaaaacgcggaaagcgggggttgttaagatccataaaagaaagggcggatgtgcctcggtagcggtagagctgcccacggaaagggtgcatgagtgggttcgattcccacccgaggtttaacattttgcccatttcttattatactttacccaccaaaaattggcgtagtttttcagaaaaattgagtagcaaatagatatcattcattctagccctatgtattctttattaggaatttcaaaaattacattaaaaatcaaattaaaaaacaacaaattaaagacactctcattcggtttgaaatgcaacagacgacttcaaaacaatggttagcatcaattttggcatttttgaactattgacctttttccagaaatttcatagcaaaagtgccataaaacgaaaagtacaccccctaagaatcgatcacaacaatttcagaaaataactcctaaaaattgaccaaaaggtcaaaaaataaaccctaaacatgaaaaaattttcccaaaaattcgccttcaaaatttattttttattttcttgacaagttggcattgttcaggcgaaagacttttggaattattgtgcctaaaaacattgaatttttccaaattttaacatattttcgcacctattgcgtattttgggcgtttttatccgtggtgcgacttttggggatttgcaacttggggacccgacatttggggacccgacttttggggatcccgacatttggggacccgacatttggggatcgacatttgagcaaaaggcacttaaggaaaccacggatatttggcaacccgacatttagggacccgacatttggggattttaataaaacaaaaaaaatattagaaaatttaattttaagcccaaaattagacaaattgtgccagctttttacttgcttcgacaacgagcgaatgagctcggaatacaagttgttccaattgcaggacaaccaatcgcaatattcgattactttgggcggtattgataaaataaattgaattgtttattcattatatccaagaaactatgtgcgtggtcacgatggaagacctccactgtttcctgttcatacctggaatcaccatgatagtgttcttcaggacttggggcgcacaaataacgcccaagaagggttccatttggctttaagaatgcaatttaacagtgtgcatccgccattatcgaagtgaaaatcgcgtttaatcagcttaatattttaattatcagagttatcactgttctgaagaaagaagagcgaatcgcagccgataagctgcggcagtatgagttggacccaactcaagggataagaattcgagaacggaagaaaacataccgtgaaaatgatttggctatcagaaatttggttgaaggctttgatgccattgagaacccaaacgaagatgagattcttgctcatctcagatcgttgcaatacagacttatgcgcaatgattttgagaattgggacgacccaaatggtgattaattctgttttcacatcccgttggcacttgggaaaggcactttaaataaaattggaaaaaggtctactgtagttaaaaaatgtattgtggtttgtctattgtgttgtggttagtatgggctcaaaattctgcgcctcctcgcggtgagtccggaaacagagttaatttttaaaatattaattaatttttttgcaatggaattaactctggctaaagcagacgtaattttgtctaattttgtggcttagaattaaattttttaatttttttttgttttattgaaatccccaaatgtcgggtccctaaatgtcgggttgccaaatgtccgtggttttcttaagtgtcttttgctcaaatgtcgttcggtccccaaatgtcgggtccccaaatgtcgggatccccaaatgtcgggatccccaaatgtcggatccccaaaagtcgggtccccaaatgtcgggatccccaaatgtcggaatccctaagtgtcggatccccaaaagtcgggaaagtcgggtccccaaatgtcgggatccccaaaagtcgggtccccaaatgtcgggtccccaagttacaaatccccaaaagtcgcaccacgaat

SEQ ID NO: 13376 - DNA, 4273 bp, Heterodera glycines
  unsure (1)..(4273): unsure at all n locations
agaaaaaagcgattaaatacaatatttaatttaaatttttattctcacataatggcaccggcacatccaaaggcnggtatgtcgatgtagagcgagaacgggcaactaatgaaatttaaattaattaggcaattaaaatgcaaaagtcaaaatatatgatgaattttttacgaggaacagatttttaagttttagactttttttttttgcggatagttcttgatgagagaagtacgaaatcaatctaacattttttttcaaaaatacaatcgattttttaaaaagcaaaaatcctggcgccatgatttggcggacaaccgaaataaaatcttaaaatgtgtttgatttacaattgtgtaaccgaaatggacaaataatgaggcaattttggaaaattcacacatttcttgacaggtttttccaattttttagcaactattttggcatttttcagttttttagcaactatttatgtacttatttcgctatttttagcaactaaaaatccgttccctgactattactatgtatttatggaatttaacacatttaaaaacgaataacaaatgatacggaagcgctacgtgcagccgcaaattcagtcccgcgcgattcgcttggcattcgcgcagtggacgccgaacggtaaatgccatacacgcgacgtggcattatttgatctaaaaataatcttagaagggaagaattggttgttaaataaccaaaataagatttaattattaatttaaatgattgctggcgaatgtttaaaaaagaaattaaaattaagcaaaaaattttcaacaaaaaatagaccattcaattttttcagactataaaaagaattatttaaaaaaaaaatttaaattaatataaaaatgggtaaaaatccattcaaaggaaataaaaccgtggacggaaaattttgtttaatgctctaaactggcaaatatatcagttgttttcttcactgacgagaaaaattgaattcgtgagcttattgccgtgggtaattaagccaaaagggaaaagcaatcgatttgtttgtgattgctttcaacttcaaaaaatgggctaacataggcgagaaattggaaaagttaaagaacaataattgtcaaaaataatttaaaaattacaaaataataaaacgaaattatttcatctgccatattaagctgattttaacaatatttagtgataatggccataattgtcattttctcgatcagatttttctccctcacttcaccttttcctcctcctcccgatttgcttcgtccacaaataattcggtgaccaaaatcaccgagtccttttcctcgtcgtaccacccattggccgggtccataaatttctaaaatatgatttaaaattaattcatttagtaaacatttcgttcctccctcccaaaaaaaacagattcaccccttttattccatccattttgcagaattaaaaatatttgatgttttaaaatattctttaataaatggtgctcgctaaatgggtcttacttataatggtaacggtgaaaccactaattaccgttgtcgccgacaaaaataggtaaatgtgagttttggaatttttcttttttaattaaaaaagaaaacaaagtaattatttttcaacataatttgactaaatcatgggaccgtccctggggtactggtgttttggggttcgtcggtgtcgatagacacagacggagaaaattttgaattggcaaaattgcttttatcaatttgaattaaataaaaatccaaactgctgctttctgtgccgttcccaattcatttacctttaacggcatataaaccagacattccgggatacatttcgtgatctcatcattcaccactaaatcctttttccccttcttttgtgaactgatgagaaacgaagccgaacacaaaggggtccaatcatctgaaaagtttttaaatcgaagaaacattctaaggaaaattagaggcgcgccggtggcggtgcaaataggcgtcaccgggagacttatgtaattcatttaaattattttttacagaaaaaatttcggagcggtgaatccggatcttttttttttttgctattcgggccaaaaaaattttctccggtcttcttttaaaaaattcagcgactaagagccaaaagcaggaattttagcagcttttcgccaaaaatggcctaatttttgccattttggggtcaaaatttaaaaccaaaagaagtaaaataggggtctggcggtgccaataggcgccaacgggaaaattttttaaaatattaatacagtgattagaaaatagattacaaatttttaaattgttaattttttctggaaaaatttttaattttggaggggcggaattcacacccccgccccctctggctatgggcctgccagcagaggagggcattcccccgttttcgtccccccccccacaattttatttatttttccgctgactttgttcaccaattttttgttgtcgcattcaagataaacggaaaattccgcattcagatcatttctttttggcggcatttcagctagactcatgacaatgcttcttctgttgatgatgccaccatgcactgattacagaaaacagtgacacctgatgagcatatattcaagacattttggcccataaaacaataactgttgaagtgaatggcatggacacagtgaaagatttgaagcaattggtagtattcatgttgcaacttttttataagttgttcaatcgcttagaaaaaccttaccaaaagcttctaaacatgtagagctttcgaatgatgccaaatttataaaattttaacaacaatgaaaaaagttatgatgttttatgcttggctcagacgcatcggcaccaccggaccccaaaaatcccaattttttcttaaaaaattggctcaaaatcgcaaaaattggccattttttggtgaaaatctgttgacaaatcacacccaaagctcaaaaaattttcccggcggcgcctatcgtcaccgccggccccaagttctcgaaaagttttttggaaaaagcgcgccgaaaaaaacggtgtttgaaaagcaaaaaaaaggtcatcggcggccgacctcccacacccccctttttaatgtatgcccccaaataacgtttttttgcattttctcggcaactctgttagaaaaaatcttctctaaattttcaaaaaatttctgccgtctgcttggcaccgccgttggcgatgcttttttctcttttgcattttttagccattacttttttttcattttttaccctttacatttttccctctcttttttagcgtcaaaattttccgctttctggaagattttcccgtggctttcttccccccaaacagagtcaaaggcggtggccgcgttggacttgggcggtggctccacccaagtgacttttttgccgaacgatttcaacgccgcgctcaaaggcctctccaagcagaaatatgcgcacaaactgaagattttcgaccacgagctgaggctgtacacgcacaggtcctttctccgtttccttagcaccgtaaaagaaaaaaaaattcccaagagaaatctgaaattgtcccctcttataatactttttccatagatacggcccaaagacaaaaaagggcaaaattcgtaagaaaaatgaaaaaaaaccccaactagactaatttgtaagccaaaataatgggactgctactgcttaaaacaacgaaaatttcttttttttaaaacccaaaaatttttataaattccaaaagatttttttcaagaaaaaagttttcttttattttatttccttattttttgtctccggttcagttatttgggcaacggtttggtggcctcgcggctcggcatcgccaagttgagctcgcccaactggaaacccggcgcgatgccgtcactgcacacgcactgtttgcccaagggctttgtgctggacgactgggactacgcgggcaatgtgtggctgatcaggtgggggaaaggaataagcaaaagcgaactgatcaaacgaaaaaaaatgaaatgaaaaatttgtgccaaaattttgactcaaaaaagtgccatttttatgagtcaatttttatctgatcgacaaaaaaaggtagcggaaataagggagaaaaagagggacacaccccaaaatctcgccgcagaaatttcaaaaaaaaaattttaaacagaaatttttcaagaaaaaaaatcagaaaattttttataagaaaatattaaaagaaaaaatttaaaa

SEQ ID NO: 13377 - DNA, 701 bp, Heterodera glycines
aatttttttcagtgtaattggcttaaattttcgttcccgtagaaaaaaacgaaatctttggcatttgagacctaattttgggacccggcggtgccggtaggcgccgtcgagaacgtttttgtaggtttttaatgcgatttgttaccagattttgatcaaaaagtgctaattttgtgaatttccggaaaaatttagcgaaatttttaggaaaatttgggtgaggtatgtctcagagagggtaccagcaaggaaattcgaaaattttcagcaaaaataatccctaaaattttcgggtacgtacttcgcgaacccccccccccccccaacttactattgtccaccgccgcgcgtcaccgaataatccacacgaactttcatcccatcaatcactgcatcgaccaaattttccttggccttaatgtttacttttgtttaatccaaatttggagaatggaaaaatatgccataattttgcaacgattttttttgttcaaattcaggtccggaaagacaatgacaattgggcaatgtcatcatcgttttttatcagtgactctgttttaaatgacttaaaaatttaaaaaaaaattttcagcgattttttcaatttatgaaaagttactaagtttttctcaaaagttttcttaaaaatcgctgaaaaaattttcaaaattttttttctttcttagaattttcttata

SEQ ID NO: 13378 - DNA, 4157 bp, Heterodera glycines
tatattctagagttgagcgggaccgggacctgaacacggacaactgagtaccgaagtcccggttttgaccgggaccgggactagccccggtttttcccggttttcccaaccaaattcccggtttttcaacccgaaaaggtcccggtcccgggtttgcccaaaattcccggtcccgctcaactctagtatattccataatttatctatttatttttaaggaaatgttttttctgaattttattttcttctttttcgtgttcaatgttgaacaacatttcaccctcggcgacggatcaaatggaacacggtaattaattatgtaattaggagaatgtgacgaaaaacttgaaaaaaatcggaaattttaccaaattggatttaattaatctgaatagaaaatttattttacttgaaaaataatagaattactttttgccaaataaaatattttaagagattaattcttttaccaaatacggaaatttagcaaaaaccttcccaaaaatcaaaagtttgacaacagaaaattgtttatagcatatgagcaataaaaagttaaaaaaaataattattataaaataattatgcaaaattaaagcactgtgtcaatggaagcgactgaaaatggccccaaaacaatcaaatttaaattgttgtatagaaattgttcaaggttttcttggacctatttttttaataattatgtaattgaacaatagacacttaccaattaatgttaattaagcttttggttgtgctacaaaagtgcattgaatgccacaaatttgtcgtggaaattggcgaaacgtttccgattcgacaaaatgttgagcagcaacccaatgatcaatgacagtgatgatgatggtgatcagttttgtggacaaaatgacagaaaaatccaatttttgattaaaaatgaatcaatcactatcggaggccaacagttgttcagcaggtcaatcaattaatggcggattaaggaattgatttgaatttcttcatattccaattcaatttttaaaataatttttatgaatttttttctttaaattattttctcaaggaaaaagttccagtcccgatcgaaaatcaaggtccccccggtcccggtttttccaaaaatccccggtcccgctctactctattacaaaaaactattagtttttttaaatttttttaaatttaaaattaaaatactttaaaaaaagttttccctttcttttggccaaaacacaatttttgagaatacaattcattaatttttttttttcttttctgtggatggaggtcatttcttatgctttttatacaattttgttgtgaattttttgaaaaatttattaaatatttaaaaaaatttggatttgcaaataattgtttccttttaatttaattgaaaatttaaaaaattatcccaaaaataaattttacagatcgaaaccggacggagaattggcttttgcgctgcaattggaccaaattttgggcaaagttttcgctttcaatttaggcaggcatttttttagaaaaaaaatatctgccaaaaaccaaaaatttggcatttttttagttgaacaggaaccaatgaatatcagcaacgaattttttgaccattcaaattttggatcatttttaactgattatgccggactttggctgttgccagcggacattgcgccaaaattgggtcaaaaatccaccaaattaacttttgttgtgccggatgaatgcatattcatgccgaacagaaccattgtgccgccactaaagtgccgcacttttaactttgaagcggttacacggcatggccgtgccaagagacgaatcaatccactcgtaagatttgtgttgagggaaatattttatttattttttggcatttcattatttggcactcgctattgcgttttcattgttggcatatttctttcttgcgcttcttagactctttattttttgtaaatattttttatttctcgaaaatgattttttgggtgtttttcttaggcatttttcaatggttggcactttgatttttatttgtctatttctttggcacttttttctgccttttttcccttgggtgcatttgctattcaattttttcttcttttacatttctccatatttggcactttttgggtctttttctttggcatttgctattaattttttttcttttacatttctcggcactttttatacatttttccctcccatcatttttcagatttacaatggcactaacacggagataaagcatttgccatggactgtgtattttgagggcattaaaccttttaatgccacagcaaatattctcgagtcgtgtactgcttcgttgatttcttcacaatttgtcctgttggcagcacattgtttaaaaggcgttaacaaaattaaattgggtaaaaattgaaaaaaaaaaataaaaatggaagatttaaaatttaaataccctaaattctagtgatgctcgagagtctcggtctcgactcgagaaaagtctcgggtttttttttggtctcggtctcgagtctcagtctcgggttttcaagtctcgattttcgagactcgagaccgagacttttttacacccctaatgattgttggcctttggtaaacttctatttttataaattttaggttttttttgttaaaatttgttaatatatgcgtggtccagcgggttgtgttcttggttttggtccttacttttgcgttggatcagttcccctccaagtatcattttttcttctcatttttcaaaattaatgtttttttcgatgggagttcaaacacaattttaacaattaaaatcgtaaaaatgtcatttttggactaaatctattaacaaagtgcactaaaaatttcaaaattttctccggcgaaaagttttgtcagcgctaacaatgaatcggatgcaacaacaacaaatgctggagcagcagcctcgggcaatgccaacaacaaaaagcatgcggttggcacagtgccaacaacaacatcaccaccaaatgccatcacaatgattgacattgaggaggaagaaccactgctagaaaagatggacaaagacggtgtaagaaaggtgccagaaaaaacgggtgcatcccaaaatctggccaccgaaatctcgccgatacaagatcaataaaaaacttcaaaaatagaaatgcaaaattctagcgattttcgaaaattatgatgaattactaattttttcaaaactttttcagaaaaatcgctagagaaatctttacaaaaaatttttcttgaaattttcttataaaaaattatcgaagattttttcttaaaattatcttacaaaaatgtttataaaattttaaatttaaaattcggcggcacggttttgttgcggcaatatttcggtcggaaaaatttcgtcccatctccgaaaaactctcttggcattttgtggaattttgaaaaattgaattttagatagaaagtcaaaagaccagccgcggcagagccaaattgccaaaagcaggacagaatggaccggtcagtatttttttttttggcattttgtaattaatttccattaaaaaatatcagtttgcaagcccacgaccaagagcaaaatcgagcgggccaaatgggccggtcagtgattgtttggcattatgaaaaatgattttttaaataggagactggtactctggtccgtaaaataactgctcctccaacacattctgatcaaacacaattatcatcacctcatcagtccaaacctcagcagctaaacaaccaatacagtaatccgaggaatgcggacagtacagtaatgcctaatgaggtaatgagcaaaaacatttttcattgaaaattcaaaaatggctaatttctgagttagtacttggctcttaatgttaaaggaatatcgttttcttcctgaacttgcctatctattattgttttgtatacatacaaaaataaattaaaattaaaagaatacatcgccaaaattgcttgggttttcaaaattatgtctcacgccgggctcggatcgaaaattttccaacaatacgagcatccaagccaaaacataagattttagggtcaaaaataagaacatttcgcaaaattgcttcaattcagaatgatttttcaatctattcgatcgaaaa

SEQ ID NO: 13379 - DNA, 1292 bp, Heterodera glycines
ataaatgacaagaaattgatgaattcgattgtttcaaacgaaaaatatgatagttaactgatttgttcgcaattttatgatgtttaaaaaagtgaggatttttcattccaattgaggatttttttgagatattttagtggcaaatgaggattttttatggctgaaatgagtattttcaaattttgagatcgaaaccctgttttaaatcaatattttattagaaccaggggctcgcaagtttttttcaaaataaggactaaaaaataagatttttttaagggctcggatcgaaaaattttcaaaatcagaacatcgggccaaaaaatcagattttggagtcgaaaatcagaacattttgcaaacttgctttaaatcagcttgcgtaacaattaatcaattaaaatagcatcaaatttgtagttttcagccaggaccgggacctcgatttttttcgggacctggaccggcaaccgggaccaaccgggaatttttaaaaattcaaaaaaattcaaattttaatttttttcaactgaaaataatacaaaattaaatttttattttgttttttatttaatacaatccaaaagttaaagttaaagctaaattaaattaataaaaattttcaaacaaatttctttaattatttcaaacaattaatcattttttgggctaaatgattgaatataattataaattaatatttgcttttcatatagcatttttcggcttgctttttcaaaaaatttttgggaaagaaggggtccggcggtgccgataggcgccgccgggggaaattttgaaatttgggtgtaatttgttaacagattttcaacaaaaaaggtggtttttgggattattaagctcaattggtaggattttcattttaaaaaaatgataaaatgtgtcaattaaaataaaactatgaggaatcatattttgtcgataggaaacccatgagtatacaaaaaaaaattcaaaatatgtcagtttctgtagagggattgaaccagaggaaagaagaagtgaaagtcaatgagactagccagtaggccatccgcacaatcataagcgttacttttaaagaatatattaatatatttttaaaagcttttccttttaactccaattttatcactaatttttcactcagacccccattcttaccagtgcttgttttccccggttcccggttgcgttaccgggaccgggacctgagcttttcaaaatccgtgaccgggacctcggatgaccgggaattcccggcccggtcccggtcctgtggcactccagtt

SEQ ID NO: 13380 - DNA, 1310 bp, Heterodera glycines
tagggttcggaccccgtgggcgggggcggaggatggcgggggtcagagtcgcggggacgggggcacgataatttcgccgccgcggggacgggggcgggggtttgatttgaattaactcctaaaaatttcacaaaaaattaattttttatgaatgatgtgatggctccacattcctttagtcaatgtatcgcctcaattcaattccttttggcataaattacacagattttgcctaaagaattaccaaattttagagatttttggctaattttttaagaaaaaataggtttttggggggcggcggtccgataggccgcctggcgaattttgaaatttaagctcgatttctaacagatgtttacaaaaaaatagatttttacgataaatttttgttttttttaatataataaattatcatgatttattcaagcaaaattggaactcagatttttaacatattttcttgtggcacattttccaaaaaaaaaaaacttggtgaatgtacgagcgtagagagaggtccggcggtgccaataggcgccgccgggaaatttttttgaaaactatggatctgttaatagattttgtccaaaaaatgataggtttttgctatttttagagaattatgccctgcgatgccgataggcagcgccaggcgaattttaaatgcagggggccgttttaatagaggttttttggaaaaatgccaaaatacggaaatactcgcgaaatatggataaatatgaatatagaaatccatccaagaagcttcaaactaagctaaaaacatgtttttcgtgcgtttcaggcctccaatagttcaggaaaaaatattgatttccatataattaccagccctattattcataagtggtatttttccaatcttctgattttctcaaacaatttgtgagtccattgcttggccgacaaaaatcagcatttggagtcaaaatcagcattttgaaaaaatcaaaaagttaacagattttcagtaaaaaaatgataaattttagcgattttgagcgtttttgggtcctgtgatgccgataggcaccgccgggaaaatttttttggaaattttaaagaattttattacatcatatcgccttattttgaaaatcttgggagtttcaaataccatttaatttgacttttatcagagaccccaaaattcaggacaatctgaaaatttaggacatttttgatttttctctccaattcaggacaaatctgaaaaaccaggacacttgggagccctgattaagaatgaatgcatcggaatgaccttttgataaaaatattagtga

SEQ ID NO: 13381 - DNA, 970 bp, Heterodera glycines
  unsure (1)..(970): unsure at all n locations
gtaatgatacaaataatacatacatatgtaagcattttatagaatgaatggtaatcagttagcaaaataaagcatgcttaatcgagtgaatattcattaaaaaaactttctattcgtaacttgatcaaatttactatgcttntaaattagatggttgcaatttatagacaattaaaaataattttattttttaaatccttaatttagtgccaaacttcccggtgcccaaacttccgcccccattgaaacaatgcagcataacaatattaaattacaataacccatcactatatattcttctctttaaccgagcgagatgcagttaatgtgcgctttatccaaggagtgatttcataggacttacactcttttaaggtaattttgctgcacgcgaggatggtcagacatttgtgatcagcagaagaggcaaaagttaaattggaatatttcttgaattaaatttaaattacgggagggggcgagcggcggcagaataatttaaaacaccttttttcgactgaggctttttgactcataaaatgggtgctaagtctttatataaaaaccttcaaaaagggcgtcgttatataaaaagctatcaaatgaaaaatttcaacctaaaactgtccataacttttgtcaaagtcaacaaaattaaacattcttggtatcaagcgatagcccaacatttctctattaatttatctaatttccaaaaaatttggtcaaggttcagcaaaggtatggccaaaagtacacaagcaaccaggttttcaaaaatttttggccataacttttttaaaacctaacgaaattttttttaattttgcaggctaatagaggacacatagggttatcgactaatgcaaaaaaattaaaaactaaaataatttctaacagaaatttttaattaaaaataaaattattttgatcatcaaaaattctgatcaaaacattcttagaacgaaca

SEQ ID NO: 13382 - DNA, 5098 bp, Heterodera glycines
gttggcaaagaaaaaagttatagccaaaaacttgtgcccgtacgaaaacgaccccgaccctgaaagttatacttggttgaataattgatcaccataaaaatgatcaatttttgatcagtgccatgactttttgtagaagcatccaaattaacaatcttggtatgctttgatagctctaagtgtcctctacttacctgtaaaatttcaaaaaatttcattgtgtttcaaaaaagttgtggcttgtaattttcataaatttatttggtaaatttttttgatcacaacttttttgaaacttaacgaaattttttgaaattttaaaggcaaataatggaacactttaggctatcaaatggtaccaagaatgtttaatttggatgcttcttgaaaaagttacggtgccttaaatttgtaaaattattatattgtcatgtcaatttttcgtggtcttgtaaactgaaatagagccaaatatattttttattattattagcttatcattcaattataaatttaaataataattaatcattagaataaatcttcggtactgaaatgacccgccccttctgatcaccactcattcggactttttgcacttcgacacagcaccgattttttgtatttcctataaaaaataaaattttctccctttaaacacaccgcaaaaagcgtggcattgaagcagacggtgccatctgtgaaagggacattttcgcttttatctttaaaaaatgctaaaaataattaacccaccgctgttcaacggcatattcatggacacaagacgctgcaaatggcaaaaattattatttaattaattcactaattaatgagagcaaaacaaatttgattgttttggcctaattaatcaatgagggcaaaatttaatttaattgtttttttggcccactttgcatgccaatcggtgcgggcacagtttgccgaagccgagcggtggcgaaattttgcgcagcaatgtgaccacgtccaggtgcttgatgcgccccttggcgtccgggtcgtactcggaccacaagcggacaaactcctcgagatggtggggcccgaggatggaccaatcgcgggtctgccggggggagggggtaattaaattttaaaaaatagaaatggcgccaacactgcgccagaaaaccccaattttttggggggaggggtaattagagtggggtcgattgggcccaggccgatttttggggtataactcctttcatagtttaccgaattgaatgaattaaatcccattcaatagccctgagtgttctctatttgtctgccaaattatgaaaatttcgataagtttcaaaaaagttacaaccactaaacttaaaaattgttcccaaataccgcgctgggcctaatcggcggggcccaatcgacccagtccggtaattatgggtaaaagtctaatggttcaggctttttaaaaattttgagtttttccatttaaaatttcgaatttcgcagtaaattgtttggtatggtcgccctattcttgaaattttttctcaagtattcgatggctaatttgtaagcgaatcgaagcaccaaatagtcaaagttgtccatgatgaccgcaacaaacaggttgatgatgaggaaggagcacagcatgaagaaggagatgaagtaggggtaggcgaaattgacacctgcgcaagaaaatttggaatttttttttgaaaatttaaatttaaaatttaattttccactcaccgcaacccgcgttcgggtcccgcttgtagtcatcactggccgggtcgcacttcacctcctcccggtccgagcaggacaacatgatttcttgccaagcttcaccggtagcggaactgtgtaaaaaatactgcttttaatgggctaattaattaattaattaatacattaattaaaccaaaatgaatcgaattagcacctgccgactgaaagagttcagaatcaaaaaatgggaatttccaagaaatttatagtcccttcgggaatgaaggcactcgggaatttgggccgagaaaattggaaccaaaaatcatcaaatttcccgtcgggaatcatgcgtggtgagaaaaaatttaccaattttggctcgagaatcatgactaattaatcgtataataattattattccccatcagataattagttggatttgggataaaaaaagccagggaatttcccagttttagctcgggaatctcgactaacttaatcgtataattaattattaaatcctctaccggaacagcacaagcaccgcagcggggaatgtgtggaaattgttgttccgatggatttccgtgtcgtcgtccaatgccactttgccgaacacttgcatgccaatcacagcgtaaatgaagaacagcagcacaatgagcagggccacgtagggaagggcctggggcaattttgaaattcaaaatttaaatttaaaatgccaaaatggacaaattccaatggacacacctgaaaggatttcataaatgtccacaacaatgtgcgaatgccttcccctctgctcaacagtttgaccaaacgcatcacacggaacagacggactgaaaaaaatgtaattgaaactctttaattggtaaaaaaatgccaaaaatgtcacggggggattctgatcacattccgatcagagacttattgtattatgaaattacaattttccgatcaattccattaaaattaaatggaaatttaaatcagattagtcacgcttaaattttaattagaaacccaaaatgccaccaccgcggggacattgatcattttcgatcagaattattggaaatgaaaattttcgtcagttcccactgattccgcttatcctttagactctcgctgacctgaagctcaactctctatcaaatagaattgtttttgatcagaatcacaattttcctttttggaatgttcgtttaaatttgatcgcagccaaaattcgatcggataaattaatcatcgatttttgccaatttgattttaagataatatgcgactgatcagtcggctcaactctgtcccttctcccctcccccatttttcaattttccaaaattaaaactgacaaaaattgatggaaataatgtttgagccggtgccgccaattttgccgtaaatgatgtcgatgaatgagccgagcacaatgacaaaatcgaaggaattccatcggtcgccgaaataatttttcggatttagcgcaatgattttgaacagcgcttcgaaggcgaacacgccggtgaagatcaagttgagcacgtccagcaccacgtccatttcggggtctgaacaacacaaaatataatttgacggatttttaatttaaacaaaaaatgagcgattggaattttgtggggactcaaacgggacgggacttggtcagcaggggtcaaatgaacatttaaaaataaaaatttccgttctagatttaattttaacaaaaaaattttttggagatgcagggagttgaaccccggacttctcgcatgcgaagcgagcactctaccactgagttacatccccaattaataaatctgtctttattgcataattttaatttgaaaatttattaaaacgatagagtaattagttttaattgctttccaaaaaatgcaaaaaaaattttggagatgcagggagttgaaccccggacttctcgcatgcgaagcgagcactctaccactgagttacatccccagacaataagaccccacttaatatttcttataagaggaaatttaattgaataattgatgaattaaatttaataatttcaatattcctttgctcaccaggcggataatgcttcagtgccaaagtggtggtgttcagcacttaaacggcaaaaaataaaattgtcaaaaatgagaaaaataaaactcactgataatgatgaaaatggcgtactcaaagaattgtgaggtgacaaaccaccaaaccctggcaaaggaagcaatttcatttaaatatttaatttaaaattagccaaaattggtgccaatgcatcaaaaaatgcggcacaaaagctccacctgtattggaaacggttgcgcggaatgtaacggcggtggggctttgctttgagcgcaaattctgtgatggaaaaatgggtatagaaattccgaattattgatcagagattatcaaagtttaatcagagtgactaacttgatcacaattcattgatcagatagattttgtgaccaaaaggtttggtcagagtgatttttcacatttcattgatcagagagatatactcgatcaaaatggttcgatcaggctaatctgagcaagactaattgaccaaaaagtttgatcagaatgcttttatcataatttaatgatcagaatagttatgattaattctgatcaaaatggtgaacaatgtgtttgtgattattcgacaacttttttgttgttttgttcctttgctccctaccgatgcatttccgctggtttttgtccaactcgcagttttcatattcacgttcgccctcattttggaaggtgacaatgacaaaaccgacgaaaatgttcatcatgaagaaggcaatcaccacaatgaaggcaatgaagaagatggccacctttaattggtgctaatcattgcctaattacccaattaattaactaataattgaccacccacaattaactaattaattaattgtccactcaccggctgtcgcgcgttgtgcaccgggccacggttctcctcgttggagttgatggccacatacagcaggtcgggccagccctcgaaggtggacacaacaaacagcgaaatcattgcgtccatcacattgtcctgtgattatgggcgaaaaatttttttggcaaaaataacattgccgtattgcctaattaattgctcataccgtcaagagtctcgaaccaagaaaatgtcggcactttggtatcgggataaacactatgctaataattaaacttttgttacccatggaagacgaagcgaaccatcgccaaatgacgggggatacttagcgcaaattagcaactatagagaggtaattagggccaataaggcgccccctttggacagaggggtccttattaattt

SEQ ID NO: 13383 - DNA, 4139 bp, Heterodera glycines
  unsure (1)..(4139): unsure at all n locations
tttcttagataatattgacattttaaattaaaaatttcgtttattgaaaaaaataaataaattttgggataaatttttgagaaatttttccaattcttagggtgcatttttgaaaatttttctggtcgattcttatgggtatattttttgattttattgcatttttgttaagaattttttgaaaatccttaaaatagataacaaaaatgccgaaataggtataaaaataggtattataaaagtgggtgtagaagctccaaaccaagctaaaaactcgttttttatgcttatctcaacgttacaagtgcgcaaaaattttaggtacttaactaaaaatcgcatccctattaatgacccaagcacaaatggaaggaaatgaggaatggttgtgtcctccagcagcagaagatggtccttcgtttatcgacattttttggcatcatttgctgggaaagacacaaaaaatgaacggaaaagaaaggggaaaatgagaaagagtaaagggagggaagacaagaaattaaagagaagagatgacggggattttttaagagagtgggaagagagggagaggaaaaagaaagaggacgaaaaaggcagtggacaatccgtcagttaggacagacaatccgtcaataatggacaattcgtgattttttaaaatcttgctattgcgatccattcatcgtagtaagtttttataaaatcttgaatttaaaaaaaatttacggaaagattgtccatcactgacggattgtccattcacggattgcccagggagcctatcaccgccacatatcatggctttttacaaataaattaacacatcgaagcaatgccatatgataattaattctaaattacatgaagttccacacgaacgatcaatgatttaattacaattattgtaaaaatacaataataaactgttttattttttgattttgtccttttgtctctttttccttatctccgctcaattctgatccaaaagccgtcacttggcttcagcacaagctcaggaaggccgcgactttcaagctcgtgttggacagaaatcactcgaaagcgacgaaaaattttcgccaaggaaattttctgctcagtgccagcaaatttttgtcctaaaaattttcattttttgttaaaaatttcctagtattttgtacctatgcaatttcgaggcccggcagaaaatggtaaatatgcgaatggctctttgtttcgccaaaggacattttcctcggaaaagtgttcaggatcgtagtcatccggtgcatggtaatactgtaaattgaatactgtaattgctattcgaatttaaatatgtagggaatttgaaactcgcaaaaaattactcttttgtccctgtgaatggagaagggggcgaccatcgctgtgcaaccggccggaattttgaagccacaaatttctgttgtttcagtaatatttcttaaatattaaaaaaataaaaggaaaataaattaaaatttttcaaaattattttaaaatattcaatttttgggttaaattattttttaaaatgcaactcaaaaacattatttaaaaatagacttaaatatacagaaatgaacctgccaattaagggaacggaaggaagaagacgcattgtttcacgaacgcacttaatgatgaacaatttttgagaaaaagggcgaaaattttagaatttaaattgatttcttaataattagttaaactttaaaaaaaaattcagaaatacctataaattttccaaacagatttatattcgtaagtttaattttatgctagcctgttaaatgtcttcaaatttcaaatttttcgtttgccttcactggctcaaagtacacttattgtcaattacgtcaattttctcattgtaatatttgcctgttccgtgtatcgcatccgtggcaaatcgtcataagttatgtccctttcggcacattccccaaacaaattatccatttctgtatgcagtcgttcctgtagttgcggacggtgtccaagcgaaaatacggtaaaaccaacacttaaattaatgtgagtacggtaaatgttgatttaatcgaagaaattgacatttttgaagcaaactttttgagatataaagcttacttttgtatggatttacattcaagaaaatttctttgaatatgaagtcccggtgcaaaaaaaggccgtttttgcagttatttttttaaccatttttggaattttgattcatattgtttttgggtaaatttataaattaaactgcggatatttgaaattccacctgcttgcaacagtgtcatgaccttcgaacataaatgtctccacctcttcgcggatgtcctcgtcactgaagttgttgtgttcctaaatacgctatagccctgttgcatatcataaactttgttaacaaacaatatgtaataaattgcgttaagccaattttaaacggtagaatcttagcaaatattctcatgtattacgataatatttgcctgtaagtccaacagtatgtccaagaagcaggcggccgccgactttgttccggtttttacatcgacatcaataccgtttccattttgactgattacggtggtgtcattttgctgatggctttgaacgccgttttgctgcattttaatatcattttcctgttgttttcgctgtttttgttgttgttgcacagctcgttcacgcttacggctggcaatgacctaataattagtgactagttttatgccggcatttctttatttattttttgttattaattatatgataaaattctttttcaaatttcagttaaaatagacaatttatgcaatccgatttaattcacataattaaaagaaatatgaggcactgaccccttgggtgaactcggtaattgccttcaaattgcgcttaaattcgcctccttttccggacaaccaccaaacaggggcaggccaaagccacggggaacgcattctgaaattaatcaaaagattaggtaatagcttaaattagagggttatttaaaaaaaatacaatacctcagaaatgaaagttcgcacatttttttgaccgcctccacatattttgggttgccgcctcgttgcgcgtccaattgcgtgcccattgccgcctctgaaaaatgatttaaaaaaattaaattaaataataaaaaatgtgtgctttatatctttatagagttattattatttaattaaaaaatgatctatttaatttttaccgccaattatgataaaaaaaaatatatttaaaaaaaaatgtcaccacatataatgtccaatgcataaagtttgatcatccggtaaaagtcaaatgggtatccatttttggcacattcatccaacaattcaaccaacacattggaatgtctgttgaacacctaattttgttaaatattttttaatttaaattaattagacagcgaaagcattgaaaatgaaataaaattaatttaatttttacctgaatgaaatttgcaagaattttaaagtgaaatgccggcgtcaacaatttccgtcttcgctgccatttttcgcccgtactgttaatggaaaaagaataatttattttaattttaattaatattgtaattgtgtgccttgtcaacagcccagtgccaagccaatctcgcaataggctgtattcaaatggtttggagatgagagcattgcctgagaaaatcgagaaaaaatattttaataaaatatttttgaacttttttaaaaaccaaaattaaaaaaaaataaatttaaagtgggcaaatgaatttaaatttccatttttattttgtcggcactcactttccaaaatggcctttgcggattcgggcttccagaaaatgacgattggctttggccctaaaaattattaatgtataaatttgcctcttaattgtaatgcttgtttttattgcattagttaattaccaaatactcaccgatccaaagtcgcataatccccggattgttcgcattgtttctggcactttgccgaattcaaaagtgtatttgcgaaaataatactccatttgataagtgctttctgncattttatagaccaatttacttttttattaagtatttattttataattgctaaaagcgcgagtatcagtgatgtaaattttt

SEQ ID NO: 13384 - DNA, 1437 bp, Heterodera glycines
  unsure (1)..(1437): unsure at all n locations
tgaaatcaaaaaataaaaagtcccacttctctcgcccttcataggaacccacggtggggngcgggatttctgatcgccattaaatttttgctcattccgcacgaatgcttagtaactcccgaggcgggcggtaaaatgtggacaatagagacgcaattaaaatttgacgcgggcagaggattaattcagatgtacaatcattcacaattatttagtggggtaaagctatcgctattataatgactttattttctatttccgctcactcaaacgacgcccatttattgccattgtattaatgagtatgacggcaatggtgcactaattgcttctgggacatttctttctctaaatttaacgagcaattttatattgatttatttggccaaaagactatctgaattatggaaataaatcgccttggagggagatcattcgtttagccatctatccgtagtaaatgttcggatgaacaaaaatgtgcaatgtcttcccaaatggacatgagcacaggcaatttgtagttgggtgggtggatttacaaaaggaaaagcgcaagattaatcatggactaggttaatgaaaatgaaatttgactttctaaacatatatgtttaatgaacaaatgagtggctggcatctttttaattgcctttttaattaaccaactacaaattgccagttcaaatggcgaaggcgtcaatgtgtctttgttttaaatattgtacgggagtgggtaattgtacatctttatcatcaacatttctactccctccacattcgtttgtccgcatgatccactgttgtagcgatgtggaagcagtagccgtggtaatttagcatcggcctttaagaaggaatatgatttttaagacaatgaaaagcgtgaaataatttacgaaaattgaaaatgtgctgaaaacattttaaattggaagaaatggacattttggggccaagcaaaaaaaaaaaaaaaagccaaaaaatttaaaaaatgatctcgtccatttgccagaattttgatgagaaatcaaaaccctcgtggtgccaacccccgttttttttttgaggagggtttatttacgtataaactcaaaatgtccataccattaaaagttcgccgagaaagaagccaggcgtgccgaacagtgtgtattgccttccgctcttaacctgcgtataataaacagtttcgtcttcgctgcaccgtttgccctgcccctccatttggccacctgttgttgctgctccccctcctctgatgttggttcgctcctcactaccatttcctcctcctcccgtttaagcaacacaatttcttgtgacgagtcgacttcatccttcagcttcgagtcctcttccgctttcactctctgttgttgttgtttctcaaaaggctgacgtntgtgtttttttgggcagcagcagccaagccgt

SEQ ID NO: 13385 - DNA, 1970 bp, Heterodera glycines
ttttaagacaatgaaaagcgtgaaataatttacgaaaattgaaaatgtgctgaaaacattttaaattggaagaaatggacattttggggccaagcaaaaaaaaaaaggcaaaaaaattaaaaaatgatctcgtccattgccagaattttgatgagaaatcaaaaccctcgtgtgccaacccccgtttttttttgaggagggtttatttacgtataaactcaaaatgtccataccattaaaagttcgccgagaaagaagccaggcgtgccgaacagtgtgtattgccttccgctcttaacctgcgtataataaacagtttcgtcttcgctgcaccgtttgccctgcccctccatttggccacctgttgttgctgctccccctcctctgatgttggttcgctcctcactaccatttcctcctcctcccgtttaagcaacacaatttcttgtgacgagtcgacttcatccttcagcttcgcctcctcttccgctttcactctctgttgttgttgcttctccttcgctgacgctgcgttcttttgggcagcagcagcagccgtttctctcgacagtttcgactgtgatttgcgctgtttgggtgcaaccattggctgaagcccaggaatctttgtttttgaatttggccggtcgtccgataactaaagcacttttgtcaccaccgtaagcaatcggaagtgcggactggcttaggcttttccacaattaatttcgatttgcacggagccggcgtcgaagtccttctcagatcgtacgcaaagtccgactcgctttcacttaacaacgcttgcccatagaacagcggggccgacgaagaatgcgagcactgtccgtagctcattcttcttccgttgaagcgttgtgtcagtcatttattttcggtttgtttacccaccgactgatccctccgctgaatccgttctgaagcaaatcggccgaaactggcacattgctgttgaagttgagcagcggcaacttgttcttcttcttcttccgttgtctgttgtcgatttggagttgctgacttttcttggctatttccaattcgtgtttctgcaagaaatgccattttataatgccttcacaagtgaaattaccttgtaaaactcgacatcacgactcataagccctttcccgcaacgacaagggatttcgtttttgataagtgtaagcccttttcgctcccaaagattgcatctgagctgcgaggaagtccaaccacgggcggagcctaaaggcagcggaagcgatgggtaagggaacccgagacaaataaatgaacgaatgaatggcagaattggtgacctcgactgctgagaatcttcagaagattctgttccaattgttcgaagcatgcttcgtgcagcagaaatttgaccaagttacaattgtcatttgtacaacgcatgcgaacgccgcactcttcgccgtctacgttcgtcggcaaagggacttctgaaaagagaagtggaaacatggaaaatcaaaaccaaatcagtgggttaattaattacctttacacatgcaagagacttttggcacgggacagtccgtcttttcattgtacatgcgagattcagattcagtgagattgctgaagggtaaaacgtgtaaacaaccacaaaacaacactgcaaaagtgagtgaataactccgattttcccgcatttagttgctaattgtgcacccattaaaattaatgggggctctaatgcagtttatgagtccaatcgacttttatgagtccaatggacctttatgagtccaatcaattgacaatcccgggtttttatacaataactttgttcatgttcgaacaaaccctatctttttggtatcattcgaaagcgcaaagtctgaataatgtaataatacgagaaaacacgagaattctaacatttcaagaaagttacaaacgaaaataatcagcaattacttaattaatcaaatctt

SEQ ID NO: 13386 - DNA, 2126 bp, Heterodera glycines
cgaatacccctgtaaacatgtttttatcattaaaaaatgtggtctaaactgtacaagtaccaattaatgttcagtgctgattaaaatttctcacctactcgaacatccagaaacttttttccgcttagacatctgaaagaacaaataatcaatgtaattgaattctcaagtatgtaaacatttcacaaactttttctcggataattgagacagctgttctggaaattaccatacaagtgaaacaattgaatggctgtggaataagagacgattggactttaataggtattgcaattaacttaattaagttagatttgtacgagaaaatttaatgaactcttgtttttaatttgattctcaagaattaaaatgcatggaatgattgcttcctcaaaaaaaaaaaaaaaatttgaaagcaaaaattccgctgaatcttgaattttctcgtcctaaaagtttagtaaattaaaaagtgatagctaatttacaatttttattaaattttgaagagctgaaagtgaccgaaccaatgaaaaaactacccaaaaaaagggagcacaatcaccgaattgcttaacatcaattggttctttcaattaattttccttcatacataaatgtataaatttctaccaaattattatttttttgcatgggattaacagaaatatgagaacggaaaaacgggacaggagataaaaagataggtagtttgaatatggaacgaacttttctctgaagtgatctgtaagtgatctctctcaaaaatggcagttatttaaaatcgtcaaaattgaccaaatccaaataagtaattgtatttttaaatgtggcgcccccacaaagtgtccaagccacgaaatgtccaaaagagtaaaaacccacgaaatgtccaaaatttttcaaaatttataaaaacaaaatgagtctaatttaggatttttagggttttcggggtcgctgaatacgaatataccctttatattaccccttgcctaaccttaggcccatctgaataataaaaaactcaaattcaagatttggacattttgtgggtcagcggttacatttcgtccaacctgaccctatttcaccactcatttttctcatatatttatttgtttactgcttttgacttacctacacttactctttttagcttcaaatttttgtggaatgacctgattttttttgttttgtgtttcgaaattcactaccactttcattcaccagaaaatggcgactctttcacgacaacaaaaatatggcgtgagtcattttgtttctcttaattggcttctttctttaaatgtcttggttgatttacattgttttgttgacagattttgtgagccactcaaaactatgtaaaacagccggcaaatgcttctaccctaccaaaaacattttttgttttttcaaaaaacagcggaggcagttgccccccatttttgaaaaaaaataatttttattttattttatttctaaaagtcatgaaaacatgtttccaagagtgttatgggtcgctgctcacaaatccgacacccatttcgaccaattccgaaccccgggcccgaattcgaacaaaatgttgaaaattcaaattttaaaaacgcaaaattacgccctccattttcattcactcttttgcagctgattttcctggtcggttggcttgccaacctgttcctgtgctgtttggttgcttttgtgcttgtccgtgcactgttcgctgttgctgaacctgaccattgggtgctcgtctccttttggacacacatttgcctcttcctcggcttcagcattgctttcctacttttcctgctgttcaacaattacacggacgtcatttttgccactgtttttacggagtgagttgtttcaaaattttatagttttttagttgctaaaaataaaaaaatataaaatagttgctaataactcgaaaagtagcttaacaaccccactaaaaacatgtttttcatgaatttcaggctacggggagctcaggaaaaaaatactgaaaaaacaataaatcccatccctacttattattacggaccggatttgtatggatttccatgtttttttttgcaccctttatttcgacctaaaaaccatgtaaa

SEQ ID NO: 13387 - DNA, 2740 bp, Heterodera glycines
  unsure (1)..(2740): unsure at all n locations
tccgctttgttttcggtgcattttcctcgtctcctcggctggggcgtnggtcggcatntggtcgaaatttggggcttcattttgctgtttgggttcgttttntaaattattgcttttatacaaccaaaatattccattctttttgtgcgtttaacattttttagattttttttgggttaatgcacaaaacagaaaagtacccaaattgtgcgtcattcgaaatttattttaaaatgtttaaaatatttcgaatgctgcatatttatatttaatttttaagctgccaaataataatgttggctcccctgaagaaagttttgaatcgttttacaaaagttagcaaatgcaataaggaaaaagaaattagtgcaactatttccaattattagacgttcaaattgaccattttcttcccctttcatttgcagcggttttcttccgtcggctgtccattttcttagacaaatgccagtggtcggcacaattctgaatttacccggaattcggcaggtacaaaaaaatatttttaactcgaatctttcttccttttaaaatgtcttttctcaaatttagtgccttgacagatttgcaactgtacataaataccccgtctgatgaatgactgattggatgaatctgaactcagtgatcgctcactctttcgtcgtttcgctgtttccgtcgcggggttttgcacattttaagtgaccaaaaaatcgaataaaattttaattatttttaaaccaattaatgagcgatttaaaattaccatttgattttttctgtcaaaaagggaaatgaatggtcactttcatcccacatttagtggcctctcttccgccacctttccacgcattatttattattcctttgtttttaattggttgtctgatccctttgagctctcagatcactccgatcccatcgttttatttaaatcactcattttcgttttattatcaaatgattgtttgtttttacgttaaatgttttttcttttttttgtctgaaaacggaatcgaaataatcaaaattcaaaaatgttcgtttccttctccaaattggttatccgtccacaatttctcttctggcgtttggactgaaattgaaaatttgttttgtttttatgcttacggtaaatggtaaatacagtaccccggtgccaacattttacaatgccaattttgcctttgttgggaatttccaccaaattcactcacttcaattcggacattcgtctcaaatagcgcgtctcttcgctgcttctgatttcaacttcggacattcgcttcccattgcgatggcttctgaataaacttgctctttctttttggcattttccgctgattttttacctccgccaccgccgggggcgccattcgatggccaaccaaatgattaggacgagaagcgcaaacgcaaaaatggccaaggagaagagaagcatcagaaaccgctggtggtaggaggcacagcaggcggagtgacggcattcgaaagcgaagggatgggacggacacggcgaagaagcggacgaatagtctaaatgattttgttgggtggcactgctggcggagccgaacagtgccatcggcacaattgcaaaagcggcgacaattggcggaggacggcgtgggatggacattcggcggggaaaggaaaacaaaaactgaaagattaaaagttaaaaggaatgggataatcttgagtttcggggtggaagagatgagatggagagagcaaatttcggcatttccaattgaaaatgggtgggctaggcggagaaggaggggggggggggggtgagagaacggatcttcaagaacgatgcgagtgccgttgatcagtccttccttatcgcttttgttaataaggaggacaacgacgcttccgaccttgagtcgcagacggtggggaggcatcccagagtctgtgcgtcggttcaacgctgccacttctaactcgatttcatcgatgtccagtggccgctcgtcaagcggtttgtccgaggacaaatattcgcgcacttgaccaggcacgttcgccatcataatttcgttgatctcatcgcacgtgtcaatgtgaggtgcgaggatcagacgattgagcagttccttgtcatttccaaggagtctttggaagtcgggatagacaaagtctatcaactcttccctgctcagtacgaggaactgcggaggaatccagaagtgttctccggtctctccgaggccgatttggcggcacatttgcaagtacgcttgctgtccttggcccaacctctggtttattgtcaatttcatagtcgtgaattgacaaaacagtggagaggtttgaaagcaggccgtaacttgtgcagttaggccttcgtgaggcacgaccggcagtgactgtttaaagtcaccgctgaatatgacagtttttcctccgaagaggaggtccttgtgctggggaattgccatttctttgcacactcggtcgatgacctctatcaccgtgttgtgaagcatggtgatctcatcaatgatgatgagctgggcctcacgtatccgtcgagcaaagaagctttcaagcggaatgcttggaagcttgtctagcgagacttctctgccgagacggaacgtggaatgggctgttttcccatatggcagcaagatagccgcacacccagtggatgccgtagccagcactttaaaggtgtatgggggctttcgcaagcgtttgataattgaccaaacaggaa

SEQ ID NO: 13388 - DNA, 1714 bp, Heterodera glycines
ccgaaataaagagtcaaaatcctccaaaatggcgtaaatgcgggccaaaaagcacgaaaaaagggcgatgaattgacaatgagatccttacaattaagaggccaattaagtatgtaaaatgtcaattggaatgtaccgtctctttggcggattgtctcctccaaatactgtttgacaaactctaatggaatctccggaaaagtaccatcgatcggaacttgactttgaccattttgtgtgacggggtccatgccaagttgtggccgctggttgacaaccaatgaaagaaatgtgagggcacagtcagtgccatcaatggacgacaaaagggcaatgccatcggagaaattggcattttggaggaggagaaaggccaacttcttgcgcagatgatttaattccttaaaaaagtgaaatttaaaaaagaaatacgacaaaataaataacggacaacaatttccacgtcattcaaacaaaaagccgcacttttgccaagcatagaaagggcactgtccaaatttccgagttgaatttgttcttcaatctgttatgaatttattgttagcgaagcattcgtcattttccatcggcaataaattcacttgcacaacgacagagacggggacgagttcgtacagtgccgagtcgccgggtgatgcgatcagaataacgccgtcaatgttctccaattggcaagtgatcggcgcaggtgatcggccgcaaatgttttgccgcacctcttgaacttcatcggttggaaaagcgagcgattggaccaaatgggcatcgacggtactgaaagaggggggaattgggaagaaatcatagaaaataatcttaaaacttctgttattataataatatttccacctgaaaatatacacggagccatcttcgcttaacacatgcagaaacggctccttcagagaaagcccgacaattcgactccgaccactcacggaaatgggcggccgggaggaaacgccgtgcatattgacgaacaccaccaactcatggacaccgctaagagcgaattcttcctgaaaagaataatgttttatgtggatggttcatttattcatagcctcccatttcctcaattctttaccattccaaaggtacaaattgcgtgtccgtcggtcgccccatcgaacagtttgagtgctccgccactctttgcctgcagattttgcacataaaatgctccggagtccgttgaataacacaaacaatgcccactgaaagacattttgacgacacgtccgatagtcgagacctttcgaattgaaaaggatttatataatttgataaattgtcgttctgtatacctttcgatcaccgacaaattcggcgtctgcgaccgttccaatgtgtacaaaaggcttttgcgaatgggcgacggctaattggacggcgaaagggtcgtccaacgacggatgagaattgatggcacaacgggagacggaggaacagaaattgagcacctaaaaagggaaatgctaaaaaaacacggagactaatcttggtaacattcggtagctataagggttctctcttattattagtcacaatgtttgaaaaaactggccccaaccaaaaacttatggcaaacaaaaaaaaatgtgaagcgaattttaaaatttttagttttactagtatttctgaaaccaaatgaacctttttaatttttaaaggttaatagatacaaaacttt

SEQ ID NO: 13389 - DNA, 1139 bp, Heterodera glycines
ctggagcaattaattaacttatttgaaatcgaaaaaagcagaaaattgtaaaaagaaatcatttgtgtgtattaataattgtttcgttaaaaaggaccgaaacgaacaacacaaataaaatgagcacaattaatgataaaatgacaacaacagcagaaaagacattggtccacaaatcaactactgttaagttgaaatgagagaatctaacaaaaacaaaaagacgagaagaaacaggttttacagtgtttcaatatcgtaagaaacgggggaaatgtttacagaatgccgatgatggggtaatacatacttgaaaaaaatgtttttcaatttttttcggaataaagtagggttttcggggtccgataatcagattttctgttcgaattcgattacgaattagaaatttatgcatcatccggcgttaagaaacattatgcaaatggaagtggcaatgggattcgtccactcgagatttggccaattagaggccgaatttaaaaagaaaacgccataaaaataaattcaaatatatcacggtaaaacttttaaaagaacggtttggaaccgctgataaaaatgcagaattaatgtgtaatttaggattttataaaggtattctaggtaaccttaagcttcttcgctaattttgccaaatcaattctttctcttcgcactactttctctcttctctctgtctctccatctctctctctttatctctcttttctctctctctctctctatctctctctttcttttgcttttctctcacttttacacaaactctctctctttatctctcttttctctctatctctctctctctcttttcctcttttgccccgcggcttttcctcaaattgccgcagcttgcaaaagcacaacaaacagcatgacttgggaaaaaaggagtttatttatagtagatatatgcagacagtggaagcggagagaaaagccccagcggacaacttttcgatggcaccgcttcgaattgacgcaaagtgtgccggccgggacggtaaaatggcattggccagtaattgtagtgccacaacgaattcattcctcttcacctcttctcgcaaatgtttgggaccatcccttagtacacgactccagtcagcaatgcttaa

SEQ ID NO: 13390 - DNA, 2064 bp, Heterodera glycines
  unsure (1)..(2064): unsure at all n locations
tttgatttgatcacttcaattagcactggtcatatctcttcttggctgatcaccacttgatcacnnatccctctttttgatcgtgctttgatcatcttacatttcttgctccgatcagccatttctatgtgcttttctcctatggaccagggctggccgtgatcacggatcacggctcacggatcacggaaatcacggggtttttggggtgccgtgatctcggattacgggtcacggattttttcaaattttccgtgattttgatccgtgattggcattttatatagggaatttttattgagacgaaaataggaaagtggtgtgaagaattttttgagaaaaataaataaattctttcctgcttacaaattagaaagtaaacatatatatgtagtctggtggttaagccttctgtctttctttgtctgtcccttgggttcaattccccattgggataggacaatttatatattttgttttgataattttaattgaaatttaattaacaagagatttcataacattgaaaattatttttctttattttttaaaacgtccatagaccaataaattaaccaatgattggacatattttggacaaaatctgtcaacaaattcactcaaaatttcaaaatttttcccggcggcgcctgtcggcaccaccggcagacggacccccattttaccgtatttttgaaattttgaccctaaaatggcagaaaaattaccatttttggcatataaactgctaaaaaccctattttttctctccgtcgtttaaatttaaaacgacaggcctaatcaaaattttcagaaaattttcccaaccctctaagaattttttctaaaattttcccgactttcagaatcttttgtggtgttcagatcgtcatgaaggactgagcatgttggtccaaaagattttttcagcatcaaaagttagcttacaaattagaggaaatttttttctctacataaatagatttttggttaaatttaagaaaaatttgaaaaattttcttaataaattagttaaaaataaaaaattttccttggagatttctacaaaaagctctaattttcctcaaaaaattgccaaaaatcgtaaacttagtcattttttggaaaaggtcgccgcaaaaaaagcggtttatatgttttggtttctttaaaacattttttgggaatttttcccgcgattaaattccgttttttaaataaatttaaataaaaaatcattagaaaatttttttttataatcacggatcacggctcacggatcacggaaatcacggggattttggggtgccgtgatcacggttcacgggtcacggattttttttaaagccccgtgatcacggctcacggatttccgtgattggaaattcaatcacggccagccctgctatggacccatcatcacttctcgcgatttgagcaaaagttttatcaaaacggaattttcaccagaaatttttaactcagcgaattggccttttatttaaaagtttcagggccccggccaatcaccgaaagtgcacttttctctcgttttttccttctgatcacctttttctccccttagttttagtcatcgtttcactctgttgtgtgtttgtgtcccttcgcttcatttaatgatttggcaacatttacgcctcatttgcctcacaataattatttaacaaatgaattgaaaaatagcgacgcatttttattttattttatttttaattaattttttgatggcggcggcaaaaaatattcgtacataaaaaaaggcttaagcaattgcgccattaagctgcagcagcagaagcatcaggttaaaatctgtattatgcagtcagtcaatcactcacttttctgtaataattaggattagccaacgacgcaattaacggcgcttaaaaaacactctcggggatttacagattatttttcctcctttttattgccgtcaaatgctcccattaattagcacattgattattagccccgacttagaagtgcttctgtgcggatgaagaagcgttgtcaagggccggtacaaagtttttttgc

SEQ ID NO: 13391 - DNA, 4103 bp, Heterodera glycines
  unsure (1)..(4103): unsure at all n locations
attttggggtcggaattccgatttccgtaaaaattttgggcctcggataccactcctggtgccgatttttacaattcaaagtatttacatatgtagcgtgttcacgaaaatttttctacttcatagctcgctccaaaaaattaagcaaatgcctctgaattggggcaaaatatttaatttttaatagaataattcacccttatccatctcaattaataatcaatctaataaaattagaacggaatgaactcaaccgaatttcggcattacgggcgcaaaatggtcgattatgttgcggattatttggagaccattgaaaagcgaagggtgagaagcattttgtgtgttgcaaatgcttttttctccagttattgcatttttacaaatttaattaatttaacaggttttccccgccatcgaaccgggctatttgcgcaaattgcttcccatggatccgcccattcaaccggagaattttgaccaaattctgcaagacaccgaatcgtacattatgcccggagtaagaaaaattcataatcacgagaccgcaattgttgagagactgtaatttcgtagaataaaattttttcaaaatatatgaaaattttgggaaaacccaaaaaaatatatagtttttgaaaaataactcaataaaaatggctgcttcttttcaaattaaaagaattatttttggtctttattaaaaaaaaatctatttttgaaaaaaattcatttttttatggaaaaacattgcgctaattaatcgatgctttacttcctttaaggtgacgcattggcagcatccccgcttccacgcttatttcccagccggcaattccttcccatcaattatggctgacatgctctctgacggcatcggatgcatgggcttttcatgggtaagatccagtatggaatttcggcgtatggattgggtaatagggattggctttatcgggctcaaaaggtcggtgggtgttgaagttggccaaatcggtcggagtttggagggtttcaatttttgccttatgccatacggtaacatgaagtttggggctataatattaatttttaaaattgaaaaattaaaaaataagtaaataccctgtgatttttacatccttaaataacccaagctgtgcttaaaaatcttaaacagactgagccttgaaatgtacaaaaaattacataagtatgacattgaaacataaattgtaatgcatccagcaaaataagcatgtttaattaagtggctaattcgttaaaaaatttaagattacgaaaatttcgacacagcgaaaatatttcaagcagaatttttgatggataaaaatatatttaagaaaattactattcgccttacatttgggaggcaaaaaagatgaaaaaaaattttaaattaaaaattttgcgattttgtccaattttctgtgccccttttaaggctgcttgcccggcgctgactgaattggaaactcatatgctccaatggtttggccaaatgcttggacttcccgccttctttttgccgtattccaaaaattccatcggtggcggtgtgattcaggtgtttttggtcccgtttctcagatgccaaaattattaaaatctggcaataattaattaattatccacagacctcagcgtccgaggccattttggacgcattgttggcggcacgctttgacaaattgaagcagctcaaggaagaatcaaataaaacagagggagagctgctagacaaactgattgcctactgttctaaagaggtgtgttgtgccaaggggtgcactaattatcacgccgtcccgccccccccccccgccctgaaaatctatttgatccgaccagtccgacaaatgttttttttagagttgtacgggaccagaaattttggcaaaaacatgggacccgaactagaaaaggcttgatcaggatagagacctggatttttgaccggtaccaatgggtagtttttccaaaaaccgggaaaaaaattcaaaatattttttttccatgtttaaaaacaaaatatacccgtttgtcttaatttaaaaaaaaacaacaaaaaacaatgacaaaaatgcctaataaagtcatataaaacgacttttctgccgcattattatttttttaattttgcactaaaaatacttctttttttatatgctggatttaaaatattaaacctaaaaatacataatttaaaattaaaaaaaaatatatgtattaacaaagagaaaaataattaaaatagttttgtttatgaagcgaatttaaccaaggcgaaagcattattaaagcattttgtcatggaaacggtgtgcggagggacaagcttttacgtgtattggatttttcaaaattttgccaaaaaaatctcaaaagcggattagctttaggaaataatttttatttttccattaaggcccattcatcggtggaaaaggctgcaaagatttcgatggtcagagtgcgcctattggaaaccgactcacgccttcgcttgaggggcgaaactttgcaaaaggcactggacgtgagttggatgttaattcgggaaacgttaaggctttcacttgagttcgtatgggtttttggcgttgccatttaagcgacgccattttggtgttcaatttggacgttatctttaaaattgaagaattattttatataaatcttagaaaagctttcattttgaggaaaatgctaattttattaccctttttcaattttttttgtttgttgtcattttatgacttttatttgaataattgcatgtcccaaaatcctttctctaacggttagagtctaaccgtataaaattgtgtgataaataaattataatattttaataatttctaatgaggcaattaacgttaaaacatttgtcaacgaccatttctgctctttagaaagatcgcaaaaaaggtttaatcccgttcttcgtctcaataacacttggcacgacttcctgctgctcatttgatgtgctctcggaaattggaccggtcgccacaaaaaacaacatttggctccatgttgacgctgcatacggtaggtggtggggggaatatggtaacggagaatatgattttcaaaaattttattttaagctggttctgcgatgatatgccccgaatttcggtaggtttttttgttgttttactttgtaccatttgcagtgggcaacgatagctcattacctcaaagcaaaaaaaaaaatttatggaaaaatctgaaaggctgtattgaaaatttctgcaaatcttccaacggtgtcaaaaaggccttgcaaaattttcccaaaattcatgttttaaattagaaattaacatagcctatcggaattcccttactttatttttttcataaatcttttttttaaataaaatttttctgtctcaatttctagccccattccggtcccccatggatacggtggtggacggcacatcaccttgaatcacggcacttaatacattaattaatttagctatttaatggaaggcattgaacatgcgatgtcgttcaacacgaatccaaacaagtggggcattaaataaaaactgaatttaatagcaaaaacttatatttttttcatcatttcctcagatggatgcttatcgcctttgattgttcggccatgtggttggtattgggttaatttttaagttagaccagcaggaatttcaatcgaaaagcctaaaatacaataggagcaaaatgcaaatttaaaaagtgaaaaaaatgtaaaagaaaaatatttaaaaagtgatttaaaaaataacgacaataaaaggctgggccgcccggagataggaggccgggttcctgttggcgcaagtccgccagccaggagcagctnttttcaagtttttccattttcttgaaatttaagatctttttgattaaaaaaactttttgcgggaaaccgatacgggcgatggacatagtgcaacccgccagccggccggggccggaaaaaaccattgaaaaaaagtttaataaagatgatgaatcattgtaccatgacagcatgtggaatcagatcacgatcagcacctcgatacccctactatctatgaattgcataaaaattt

SEQ ID NO: 13392 - DNA, 2992 bp, Heterodera glycines
cgtccaatgcttctccgaatggtataaatagcaatctttgactttgccgcggggggataaaaactcattaaaaatacattggataaatttggcgggcggttccaaatgaatgtttatcaaaagacagacgattcattcagccaatgctatttttattagcaccgaatgatccgttaatttgtccgccgattcgctttttaattttaatctccgcttccaatctgttgagttttgtccgccgatgtgttcgcagttgaaaggctttcatggttcttaaagatttctaaaaagcattgtttttgaaaaagattatctttttttgaggctgcgcaattttctgaaaattttaaaaataaatatttatagcctttaattaaattcagtatccaactgatgcattcggtgtggggtacgttcacggatcaaaaagtcttttttcgtaatagtcaatcatttaaaataatctttgtgccaatttagaaaattttaaattttggtctgatcatttaaatttttggtccgcaagtgtccgtgcccagatcaattagggcactaaacatattccggaaatgttacaaaacaattaagcttcaggcgattgatttgcatatggtctattaaataaaagaagttggggacattttgtccatttgcactctttgttcacttcattaatttactacttttggaacgccgccagacaattaattttagtgaataattagaacgaatcatttgaccattagcattaattatgtataaagaacaaaccgctgatgatcaccgtgccagaagaagctccatagtcggagaaggcgaatggcaacgaaaagaaacacccgtcgcaaaagccaaaccaacggcatcggaaaaatggctggacaataaaattttaaaactccgaaatttggttaggcgaaatttttgtaacggaaggatgaggggggacagaaaaatgccgaagaaatgtcgaaaatgatggcatttgggggcaaactaaggaattaagtgatcgaagacgactttctaaaaggggagagaatgggagaaatttcaagaaatttatgtttttgggggcttttttgatttaaaatttttattatctatacattttactacttagctaacacttcaatagcatatgtcaacaattacagaaaatacggcttttttgcaaatccgtcatgacggattatgcattttttcagctttgttccccaaatagttttccggtctcgatcagaaaggaatacgcccaaaaatggttgggtgggtggttgtttccaaaagttgaaaggtttcctggatacgttttacataaattacaggcagaacaggcaccaacgaaaaaaacggaaatttatcgccggcatcgcccaatcattagtgctgtttaagactctcggtcacgagtctcgactcgaggtctcggtctctagtctcggggccaaatctcggtctctagtctccgggaattttcgatctgaaacagcactaccaatcatatgaattttaaaatttgcaaaaaattatttgaaatttaggctaattaacaagccaaaaagcataggtatattgtccgtctcatcctgccagcccatactgaaacgtagcaataatcattaaattttattgccgtttttccgttttctgaaaaattgccgtggatgcgttgtcgatctgaggaagctctctctgcggatatgcttattcgggacgtgcttcattcactaggatgggcgagatgaagcatcaccggacatgatcatcatcataaaaatcatcatcatcctctttctgcttcattgggaatatgttcttgaatgggtggaaaggggataaatgggctaaaaatgtgccgtcctccgctgctgatccgtatctccgcaacgccgagccgaacgggtcgaacgccgtaggcgcaaaagtgtggcggcgaatgggacggaacaaaaccaagtgcaaaacgggcagcagtagatgatgctgagcgagatggtgatgaggggcaggcagcatggtggacattattcattaacacaaaacaaagtgcgctaatttagggtcaatttgttaattaccgttaattaccgcgaaacattttgtgttttgtcgagcggaaagtgtttttgtttatgaataagtcaaaaaaaatgaaggggattctttggtcctaaagtatttatagcagggatggcagggtattccgacttcctatttccgaaaaatttttggacctcttaatgccattcctttttcatagggttatttctcgcaatcttattctcagttaacatataaaaaaaaggaattctctcttactgtctcccaaaataactataatgtcacgagatccactttgacatgtgattatcatctctcactagattcaataaattaaatggttttctgcacttattctaataaataggcgaataaagaatatttatttaaaaattaaaataaattttaaaaatattgaaaaaaagtttactaattcgcccgaaacaataataaataaataatttaacaaaaatggacatccaatttaaatttcagcagctttaaccggttgtgccgcagaaaatttcagcggtgcccttctctgcggatttgccaatgcggacgacagagaggaggacgacgacatcgtcggcatattattcatcagccagcctcgggttggcaacggaatgcgcgggattgtcgaagtgtgtgccggtgccgtgttcgtcaatgtcgtcgccggcacgatcgctcgtcgccacgggtggtcaagcgattgccacgcttcgttggcctgctgatagcattgacggcacttcggtttgtgccgtccacagcagcaacaacagcagcagcacaacaatgccaaagtgaagaggatggagcaaagtgcaaccaacagcattgccagcaagtacagctccaaaccggtgggtgggtccaaaatgccagctgaaagggcaaaggtggtaaggaatttgggcgg

SEQ ID NO: 13393 - DNA, 923 bp, Heterodera glycines
ttgtgtaaatataaatatctgattttcaagttattcacgtaaatttttcatttgttgaggtgagacacattattatgttaaattaacgtaaaattcgtattcaatgtccatttttaccctaagaaaaattcaaaaaaaaaattttagcggtggagtcacaaaacagaaaaaaccgaaatttgagagattgaagatcaatctcacgttggcttatcactcattaatgatcagaataaatgaaaaggaattgatccctctatgcattggatttaaaaacataattttgaaaattaggatttttctgaaaatctcgggtgacggcactcggaattccagagttcgaaaaaatacggaaattttatgagcctgccaagacaaacaatattgggaaagagaatccgggatcggctgaaatcgtacgattttgacaatttaatgatgaaaaaaaaatgtacaaattgctggtgtattaaatgagagagttgtgatctttgatcagtggattttgatcaaagtgtgagtgcagtgaccagacaacgatgcagaaaagctaattaaatctttcctaaaaacatatggaaacagctggcatttaaagaccagtttaattgggatttaataaggaggaggctgcaaaaaacatggagagaaacaagaattgctaacatcaattagcagcgatcactccgatcagactgaggctcgaagccagactgatcaggcttacacatatggactcacccttacgcagtttgatcagcgaaaaatctaacggcggtggctttacgctgtttttgtttgccgatgcaacggcatttgacgaaaggatgcgtgccgaagtgccattctcgacaaccgcaggtggtgaagcggcgaaactgatcagaaaaaagagccagccaagcgcaggattggcaacttcg

SEQ ID NO: 13394 - DNA, 3286 bp, Heterodera glycines
cggatgagaagggaagctaaacattgaatacctctcagtgccaggaaccaatgagtgccgatggggactctttcattttcggcgaatagtatttgccaagagagagagcaacgacctttcgcttccatataataggtgaatgttgattggctgaaggacagggattaggacgatgatgatgattggttgaatgaccattcctctaggtttaattgttggaaaaaatagagttcgggagcaaataaaataattctcctttggaaaatgtttaaaaatgaagaaaactcttaaattttattcataatttggaaaattatttttttaaattaaagaaaatgtcaaaatctcctccgtctaaacgcgctcgtcgttttttcattgaagagctacttcgtgagccatacaatgagctgtcaccaccacataaatcgcctaaggaatttgttaaaaacttgctccgaagttgaacacgttccaaaatttcaatggatgaaaaccaaatcaatctaagacgtgcctgctgaaccagaagggcttctaatcggcattttccaacagtgcatttatgaaacgattagtgacagccggttgaggggagttgagccgacccacctcggctgcattgtttccagtgcgctacttacatcagatatttggatcccacttcgacaaatgacaactgatacaattaacaccattctcaaccgtttcaacgacgtggcacaaagcaagaaacaggatggagtgacgctttggggcgaaccgtttaccgtgaccatgaccacagtcaaccgaaacggactgcccgagaaacgacaactgaaaggaggagcagcgcgcaaattaacacacgtccaccaccaaattcattcaattaaaaataattttatttttaaaaaacatagatacaaaactttgatggagataactactgtctattcttggcaatgcaagcaacaatgattcgtactctcggtggtctggcacgtcaacgattttatgactacatgaatggaaaccattgtttccatggaaagctgaaaactgaagctcgggaaatgatgaatgccgtcaatgcaccgccaaatctgccaaattatgatgccgaaactctatttcatttatactatttaattaaatatgtacattaggcattagtctgaatatttattgaattaaatcacaataattaatcaacaaaaacaagatttaaatatcatatgtttcactgatttaaaaaaataatacattggcaaattgtataaatcgttaaggagcttaaaaagcgaccaattgtaaagaaagtttagaaacgcaatgatttatattagggtatcgataatttgtgaaaatgggcgtcgaaaaagcaattgtttcatgataaacagaaaacatcaaataaacttttttatattttaattatttcgtatggtaattaataattattctatggataccttattcaaagaaaaacttattgttaaaaatcaaatcaattctactcatcttccataagatatatgatgattataaaatactaaaaaatttaaaaaaacattattattcctttttttatttttaataataaagcatttagctgaatttatcaaaataactttattatttatttagacaaccctaaaatataattcccttcaggagatgagacgaaaaataagattctaatcgcgagatatggtttttattaaatcttgaaacaaaatattaaatattaaatcaaaaattttgaaaagttgtttaaaattttgcgatagtatggaaaaagtattaataaattaatttaaaaaaaatactattataaaaacaaataatacataaaaacatttattattaaaataaaaacgcttacaacataattatatctcctctttatctccatttctcttcctgtctttttctttttgtctctgtgtctctctcttcctttctccccctctgttaatctcccctttctctccaactccctatctttctctccctcggactttgctttaactctctctctttctttttctctacaatttccctctctctattttttcatttctctcctctcagtcagtctttctctttccattccttcctctctattacgctttatttcaatcatttgcactctttctcgctctctctcttctttctctctctctctcttgtttctctttctctcgctctttcttctctctctctctccttccttttcctctcttcttattctctttttgtttaactcactcacacttccccttctttcttttaatttcataataattttctcattttcaattcattaatttttcaaagtttttcgcttcgataaataatctttttaaaatgtgacatacctacacatcaaattagtatagttattaattaaatttttgtaataaataaaagttgaaaattatatttattaaaatattatattttatggaacaacctaataaaatcttactttcaattaccagaacttaacctagaaataaataaattttaaattttctcgcagacaaaaaaaattaaaaaataccagtatatttgtaattttagctacatccagaatttcattccaaattcttgggggatatttgacagttttaaaaaattttaaaagataaaagattacaaataaagtaactaaaagatgcattcttataaattatttcactaaaaaagcaaaaaaggaatttgtaaagaaaatagctgagcacttaatcagctcaagtagaaatatatttataattttttttcttaaataaacaatatacttcaacatgaaaattaattttttatctaatatcagaataataataataataaaatacctattataataatcaattttaagaaaatttataaattcataaacttgataaataatttaaaatattaaataaaacttcacaaaaatacaaaaaatatatttaataataataatatcatttcaattaaaagcagggtttgtccaagatttaaaaatattaatttcaagcaacagatgaattacctaataattttaatcatatttgagatttgagaatattcaaactcttagtttgatctgatgagaataatttaaattaatttttcttcgacactttgccattctcagcattaaacctaaatttttgtataattaataattaatgaagaattatattttctattggtaaattcgtaaaggttaaataataaaagatacctgtacattatgacaatagaaaaataaataaataaagggcccccgaggtgcgccgtgattaac

SEQ ID NO: 13395 - DNA, 1036 bp, Heterodera glycines
  unsure (1)..(1036): unsure at all n locations
aaaagttggtaccggtaccggttttgncagtaccggtcagtaccggtaccggtttttttgaaattaccgattaccgctcactctaattacaactttgaaaatattttttcgaatgaatttaatgatcttattattgtaaattatttatttgctcatttattcctaatccaaaataatcaatttaaatgtgcttgtttttacaatttgtcttggcaaaaaatttttccattttttatttcaattaattaatgaataatataaaaaaatgtcaaataaacaaaaatttacaattcgattaaaatatctgttaggaaacaaataattttttaaatttattgagaaattttgtcatgagcaaaaacaaaaaaaaaagttatggcatgtggcggcaaaagccagaaaaaatcaatttttagggttttttgggtttttcttacctaaagaaattgcagtaattttgcatgcttattgagttgtcatgagtttttgtagatgcaccaactttattaagtttgattgtagaagaaaatttattaccaagtcttggtcttgattttcgagactcaagaattaggcagcatgccgttgtggaccaaattttgaatgcaatgacgtcgaccaggcactagaggtgcgccgtgactgaaaaaacccgtgaaaacacggatttgatttcgaatgaattttttaaagaaaattagttggcagtgggcttatcgctcatttctggtctgtctttgcatggccaaattccaaaagcaccaaaactgcgaattttctcttccattcacaaaatgctctcaatttaatctttcaattttttgttgtgtatgaataaaaataagaacacaaaattatcactaaattaattttcagcatttttttgttcaagttaaaatagttccaaaatcaaattatttttgagtttctgatttcaattaatatttcctaatatttatttatcttagcttgttaattatatttatctacaccataattgatgtaaataaatagaaaattttaaaatctattgcat

SEQ ID NO: 13396 - DNA, 4192 bp, Heterodera glycines
ttattttggtggttttttgggaaaatttaacaaaaaaccacaaaaagcctcaaaatttctagaaaaaaccacaaaaagcctcattttgaaaatttagcctcattggcctatcaaaaaaccacaaaatgaggctaaagcctcagatctgcgaaccctgtatttacctaactttaattgtaagatacggtttaacataacttcttaactcattgtcagccagaattaaactcctttcacgaacatttgattttcagaaattgttgcactaattgctaattattatggccacaaaagcttttcagcatccaaaggatcaactccttgatgagcaatgcaaatatcttttcaggttacttttttgttaatttctcaacaaattgttagccaatttcgtttagaatgtccaacgaaatgaaagatgatgagcagcgattcaattttgtccacgggtagggtgttgcattggagggacatttaaagaaatttaaaacaggcacatttccgccgtcgaggatgggcatgaaggaaggcgagcacaagaagaaaattgtcaagtccatgggcatcctgggctctcaaagtattcaatggcaaaggaaagattcaaaacggacttgcgaatggttggacttttggaaattggtggtgagttgggtagtcgggttttcgaacaaattttaattatctcataacgccggggtttttttggagggcaaatacagcaaagacctgaagatggaaggagtgatggaaaatctccaccggggtcggccacttcaacgcacagcccgccttttatctgatgtgggccgaacatggggccgcactgtacaaccgagccaactttgacaagatcttggccatgtgtgaaagcaattgcaatgtcaatgcttttgaatgcgtggaattgttcaggttgcaatttcgaacatttacatttattacttgctcctaattttgtttagaccgctgagcagcaagtactttggcgaatcttccgacgagactgacacagtggcactgatcaaagtgatcgcggatcgtccggaggatgtgcgcaggactctgacaatgttcccggctaaactacaggagcagcaacaacaccaccatttgcatgtcagtcctcgggacgaattgccccaagagcagcagcagccaaaccctttgcccacctgccgcgaagagtttcctcaggagcagcagcagcctttgcccgtctgtcgggaggagttttccatcttccgcgacccggccaaatccatggtccatctcctcataatgctgccctttcatcggctccccaatgttcagatttgttgcgaccttgacgacgtcactctcgctggtgcgcatggaaaatttgctcccacagttttcacttcgacgcctcgtcgttcagtggctttttgcgccttcgaaccgccaatgatggaaatggacaacgatgggctgatggggcctgcaccgtccgaagacagagaggaacgggttggcggattgtttgcaccggtacccgagacgggcgtgtccaaattgcagcgtcggcttagtctggttgggtggatgttccaattgtttaatgcgtttttccctttcgtccaggtgggcgattttccgacacacgcagaaaagggctcacaatcggcgaagaaaaataccggagtcagttcaatggggttactgtaaatccgatggtcgttggctgtttttctgatttgaatagagcataaataaatatatagcgtatcactttttctgcctatttatcccttaattatggggtgggcggtggtccgtcagcataggcttatttccgtattaattatttcctatgccatttcaggggaagaaaatgactacgaatgacattgtgaaggcgttgccgaatttgaagatcggctcgaccattatggaggagacggaagaagacgaaaaggaaaattctttcgcttcgccccaccggaaaaaggcgcgccagggaacgaatgcttcgcatccgccttcacttgttcactcatcaaaacagacatcgcaactgaatgacgtttctcacaaccagccaaaggccgtttcggcagaaacgccgacagaagagggacagcccgaccccgacaccacccatttgggcattgtgtgagacataccttttcatactattgtttgatttttggaattggaaaagataaatttgaaccaattgtgtaaattaccatttagcgaacaaatcaaaactgggactgagaacccatgggacgaagaaaagcgcaatcagattctccaaaccgcacatgtgatggtcgaaagtcacgcatttatggtaactcaaatggtccccatttaaagctttatttttcttcgattttattagacggaaaagtgtcctcgtttcgagttgaaccgaacaatccatttgggaggtgaatcattctcgattgaagacctgttgggccaaggcggatttgcgcgtgtttacagggccaattcacgtgaagatggttgcacttatgccatcaaggtgaattggatttttagtgtatataggatggacataaggacaaatataattttaaatccgtacggaaataccggtcttaaaaaaaattcaaattcgttttaatttctcatgcaaattactcctccatttcagtacgaatccccggcttgcccatgggaagtgtacatttgtagcgcactcaaaagacgcattccatcccaattcgctgcttatctaatggaagtgagagacgcgtacattttcaaaaatgccagtgccattgtttacgaatatttcccaaaagggacacttttggtagggtgaaaggcattcggatgacctgatgagaattttcaggatcttaccaatgtctacaaaaagaacggaacggtggtgggcggtcttcttgctacttttttcggcattcatttggcacgtgcgctgcgccaagtccacgagacggccaacataattcacgcggatgtcaagccggacaacgtcatgctgttgacggcgtatgtttcggattgaaaattgtgattcatttctctcttggccccattaaatgtcccattttggcacatttattcgattttagtcaaatacagtgcacctatttttacagtgccttgaatgcacatgattcgctggacaatttgctcaaaacccccgtgctgaagctaatcgactgggggcgatccatcgacatgaaccatttccaaggagtcgaatttcacggaaaagcgggcaccgaaaatttcgattgtgtcgaaatgaaggtggttaacatcatgaatttaaaaaaccgccttacttatagacgggcatgccatggactttccagactgatttctacggtttctgtgccacaatgtacgtgatgatgaatggcgaatatctggtgaccttcaaatactcacaaacggacaaagttgttcccgtgaagcagctgaagaggtgaggttgccattttacaacttgattttcggtgcttttctttaatcaattgttccttccgattctttttccccctaatttttccactttgaggcgcatggctctgtacgacgtgtggacgcagttgttcgatcagttcctgaacattcccaactgcaaacagctgccaaaatggttaaatacattggaccaaatggaaagccgactggccgaggctgtgaaaacggagcctttggagtggaaaagagcgatcgaacggttcaacgaattcgtcaaacaacgggggtgaaagaaaagggacaagacattggatcggacttttgtgcaaatgatataacctatcccaaaatgcttttctgcttcatttataaaaataactgtccaccccacatcaataaatgaaatcctgtatagccatcaaatggataaaacaatgactcctggaacgtgtatcactatttaaaataattacactaactatgttttaaagaagagatttattgctctttaagtatgtgtacaacaattcaaatgactaattaagttgggcaattcaacggacgatcgaatggaattgactagacaataaatgaaaatgcttaagtaggaaaaataataatgctatggcctataataaaagatggacaaatgaaaaggaatatctgtgcgaaaatgttgatcattctgttgttttttcaattttgacctaactcaatcggccgagccagtgaaatgggt

SEQ ID NO: 13397 - DNA, 1934 bp, Heterodera glycines
cttggcccatattatgtttttgcgaattgcgtcctcaacctcgtcccgaggtcattctcactgaaaatggaaattttttaaaataaaacataatgccaactattctaagaaagtcgttgcgaaagtttttgcggacattcgtcacactgtttttttgggtccttaaaaggggagaaatctggttgagttcatcacttttctccttctatttcacgtcaagtcagcacccctcgtcatcaacatcagctctcttcatcactgctatgcggggagctccttcctcacctctcatttttgttatagtatcccgttattgtcaattgtccagatcatacaactggcgtcgactcataaaagtgcattagaaccctttttttccgtcgggagtcgggacaccaattccaaaggattacccaaaatgcggcgatgccctccaaaacaaaatttggtcaacaacttactgagtgaatttatacaaccatgcatacaatatatacatctctactaatacaatggaatacaaacagtttatgtatacctaaataggttatctgatttatcatatatatatatatatatatcatccatcacatcgtcgtttcatcgcattgtttatgttttgttggcatcagcatcgttctacccgtttctgcgtaattgtaagttgattcgatggatccacgcgggttttcggagaaaaaactctttcgcgtacaaacacatcaggacaatgctgaacacctaaaagaaggaaaatgctgcgcaaaaccaaatgacaaaaaacaaaattcaccaaaatggtcaacggcaccattgtgtgatccgcttggaagttgacgcaagtccataagtccgtccaatagaacagcaaattgaatgagagcacagcatacaaacaccagtagaaggcataaaagaaggcattgaaaaaggccaagcgcttaaaaacaaaaacaattaagcgacacaatggttggtaaatgcgttttgatactacgcgaacacaaaaactcaaccacgacaaaaacttaatttcaactcgatcaaaaaatccatcggattttcgactaaaaagcaaatttggacgcgattttgttggggctacgcgttgcggcgatcactcacttcatatgcttccacagaacgtcgcatttttgtgatgccctgccacagaagcccgacaagcgaccataatgcgctcatcagtaggaaggaaaaattggacaaagcgccatagttgagggggtttctgtttttgccaatccagccaaaaaatgaaatctgaaaaagcaaacacaattttatttcatcgttattattcgttttgctgctggttgaccgttatcggaatgcaatggcgtccagcgggaggcattttcgcggccaattcgtccatgaattggtggtgttgctgttcatcgattggtcgaccattggtgctgctgctcatcgacagttggttgtgccatttgtgctcgtcgaacaaagcgcggaattcgccagtttttgagtcctttccgatgagtgtaaagcttttgcaatggccaattgagatgtcatggaggaatgcctgaaaatccacacacatcatcattttgatcatttatgaaattcaaatgaattggcaacaaaatcaaatgaaatttgtcaacaaaaacaccaacagcacacctttgggtcggcaaaagtgccgcagaattcgcgcagtgaacgaagttgccaaatgaaggccaaagtgagtacaatttgcaacagctttaggtagacgatcttccccatgatgccgccacctgtgacgacttcttccgtttgctgtgatagattaagaagcagaacgatgttttgacgcaacgggcaaatagaaaacaatgatgaatataatactgagggacgcaaaatgagagcattttgttgaaagcgtccctttatatagg

SEQ ID NO: 13398 - DNA, 809 bp, Heterodera glycines
  unsure (1)..(809): unsure at all n locations
aaagtcaagttctagatgaataatcatagataaaatcaattattttgcaaaatccgagctcagattcgtgatcagcgtattttttagcctagaaaatgcccttccgaattttttaattttatttttcgaagaaaccacaaaactttaccattgccgaattgtttaaccatctttgacaaattttatgaaataaagtaaacagtgctttaaatcttctaataggttagtgcttcaacaatactcgattcacaattatttaattaggacgtaacaaaatattttcaataaaattatttccagttgtaaaaattaattttttgcttttaatatttattaggtgggaatgtcatttttaggcgaatgcctaaaatttctttgcatagataagcacaaaaaatgacgtttttcacttggtagaggaccagattcgtgctaagcgcctcggattatccaggaaaatatctttttagcaatttatttaaaaaaaattcgggaccaatgatctttatcattgccctttttgctttgcagccaattttcagtattttggaaaattccatatacaataaaaatgaaaaaaaaattgttttttttcatccgaatcagacatagcccaggggaaaaacggcggtgattttctcgggccaatcgaacagtccgtagctgcgctggatgttgtagaagaaaagccaacctgtggaaaaagcaaaacataaatttgggatggtatgcaacagggacggtcccagattnggggttttgtggggggggcacctccccccgngcgcgnacccttttttttttttttt

SEQ ID NO: 13399 - DNA, 4583 bp, Heterodera glycines
  unsure (1)..(4583): unsure at all n locations
ctaaattatanttttatgtttttgggaaattaattccccctcactatttcaaaaaatttcattggagtttcaaaaagcttattgttttaaaaattcgcactttttttgaaatttataaccatatctttttaaatattattatttaatccaattaaaaatactttcggaaaatgcgcatttttcgttatttcattacaattgtctacaaaatttttcccggcggcgcctatcggcacccccccccccggttccccaaatttttttttttaaagcgtgccgtaaaatagtgttttaaaataaaacaaaaaaagccgttgcgtgcttgacctatttcccaagctaaaatagaagactaccaatttttattagtcaacttatatcaatttttattaatcaactttccacaaattaaaaaaatccctgtccctggcggggcaccggctcaaaattgggacgggagtcccggaaaagtgggagtccccgtcacggggtcccgcctcggtctattttcgaagtcccggccccggtcccggctatttcacaattccagtctctactaaaaatacataagcgcgatttttgtttgcgggatcctacgcgggactcataatttaatttaggttaagaattttaaaaaatcatacggagtctggtactatttgggataaagaataagccttgcattacggattgggatcacgcaaaaatccgacgcggaacgatcccgcgccaatctctagattagtaaccacaaattttttgcgtctaatcaaataaagcaatttcaacggcgccaaaacaacgtgtcccgttctaataatgccctttctgtttaacttttcctaggaattggcactttctaccaatccatatttaccacaattaacattgacttcaaagcacatctctagcattcaaagcaatccttgtcatgtttaagccatattcattttacgctattttatcaacccaaaaaatttttttcacaatttttaataatatttaaaaaatatattagtgattattggttaatttttataaaacataatattgactatgcaatgatttttttttaataaagactaatgcatagcaaaaatgaataataatatgaaatctcagaaatatgaataagtaatgacatatacattttacttaaatttcatttatttttaagcaaatattttaaatgaaaatatatttgctccttttactttatgcctcttcacaatttgttatttcaaactctaaaaagaatgaaatggccaaaaaaattggtcctctcaaaatggacaattcgaattccattaaaaaggttgtaaccaaaaattaaagtaaaaatggaccaattaaaaaatttattaaattataggcatttgaaggaaaggaaaagccgaatggtgtcgaagagtgtaaattgatcaaaagtttggaagatattgtgattacggaactgatcagcgaagaattggaccaatttgctgcgggaaacgagaacgacacaatttagcgacaaaaagtgcaaatttaaataaaattccatcgttgggcaaattttagattttcgaaatttttcatttttttaatcaacaagcatcaaataattgattgggggaggtgtgaaaatactcggcttgagaaattccaagggttttccggtctcaatttgggagtgaataatttttaaataacttctttaatgactatttttgtttcgtcctatattaattttggccaattcccccgtcatccatttcagtacattcccaatggattggtccaacggacggtggcaagcagtatggctggttgtctccgaggagggcaaagagctaaggtgatcaatttaaaaaatttattattttaaataatcatatattaaaaaatatttcaatttcgttaaaattttctattgcacgaatacattcttaccaaaagtatagtaccgttttttacttattttttataaattttaagtaagaaattcgcaaagaaacattttaaaaaactaatctacaaattaaaatgaatatttgaattaaaaagtcttattaagattaacaaatgatttatttagcactaatggcataacaaaagaggttagggaacattaatttgcctgtgcaaattttaatgtttaaaaaatgactcatagtggtcagtttttagacgaaatgccgtcagcaaatgtcaatcatttctttaaataacacaaaattggattaagaataaacagaaattttcttaacattgcaatttttgaccattttcgaagtttattcaatgtaccataaaataataaaaagaaaatccaatgggttatttttcgaatttaatttgttattattttcagattcctgttcccaacaaattcacttatttactactactcttaccttcaaattattgtatgttaaattcaaataattaaaattaaacaaccaaaaagtgaattgaattttaaacattttttgttcatttaaagattacaacatgacttgggaatggtcttccaagtgcttcatcaaaatagagcctgaaccgatcacgcttaacccggttgttgttaatgcttgccaaggagaaaagaaatttgattttgaaaacattcctttgcctgtgccagaaggaatcagagaattttcgcgaattcaagtcaggttaaaaatcagataatatgatttggtcaaatttcacattgcttacagttgtcttgacgaaaatgttatacgtttccttggccaaatcaaataccttttcaaagaggggataattcttgagttggaaaatgttcatcaaattatgcctagcattttcgctgcaatttggccaatcattaaagaagacctttacgcgcttagcgttgactatcatgggcttaattttatgcgacagtgcatctccaatacagtactcacttcatgcccaaaacttcgttggattgaagcaagcaatgtttttccccagttgccggacgacgacgacagtgccgaaacagctgaaaatgcccttcgggattggcttcatctgccattatctgatcctgctaagccgaaaattcttcaatgccgtacaaacgaccaagaagagttaaaaattgaggaaacagcggacatacaaacggtcctttaatgatttttaattaatattcgtttgttcggctttaaattaaaatttaaaattcaagaaaaagttgtaaaatcaaataaatgatatttgctttttatgtacatatttttttagaaattcaacaatgccgatactcgatcttcatacattttgggccttgcaaatccattaattgagcaaaacgaacacgaaaatcttactgagattcgcaatggcattagcgaatgcatgcaatttgaactcaaggtgaatggagacgacgaccgagataattggtttttgttgtcaggccgtacacttgacaccgacaacgattggagttcgttttacgatgaagcaactagcgagctgacgaaaaaaagaaatgttgtctgcattaagattgtcaacgaacaggcatgataatggtaataattagggcttccctttttaggcaaatttgctgattttggaccttttgtgcttaatccctcattttatacctttttcaccatttttggtgactatttcatgattttcggaaaacttttaaaatacaataaaaacaaaaaaatacataaaagaattgaaaaaaattatcaaaattgatcacttaaaatatttcattataattggaattttaaaaaaaagtttgttgattaagtttttttttgttttgttatctaaaaagcgttaataaattctatttgaatattaattaatttataaccaacaaataaacatttattttaccattttcagatcgttgttgtaagctgatggcgcggaaattacgttacttcgtatactgtatcttcctattctgttctgtttgtgatatatgtatcgcaaatatttatcttaaaattatacaaaaaataaaatttatttggtagtactttttgaaaagtggcggagagtgatggagaagacggaaaatgactgtttaatgggtgccatttaatgggacaatagacaaatgggtaggatcaataaaaaaagagtgaaattaagcgaaaaatcaaagttcaaatagatgacataactgacgggcgatttggcatttaaaaatgcctaaaaacccaataatatacggtaaattttggaaatttcaataccatttttaagtcttccaattgcctttcgatattgtaaagataataacatttgagcattttggggcgctcatcgtcgcgcggggtgtgaagccacttggacaatgcctggttttgtgatgccccgggaccatcgtaggacggactctcgggaaaagtattgtcacacccgacgattctgagattggcacactcccgaagaatggacggagaagtcatttgcatcaattcgtataattcatttaacttcagaccagtcattacagcaattcccttagcaacaagaggccaaatatgctttaaaggttgccaagcataagctccagataagcgcaatttcaaaagttaatttttcgtcta

SEQ ID NO: 13400 - DNA, 2686 bp, Heterodera glycines
ccacacgacagagaccgggatctcgaaccgataatacttcctatctcgtgtcgagatctcggcattatcgggaccgagctgcctattcgtgtcgaggcgggaccgagcagcccataggtacgggtctgctggcgagagaagttagacggtgcactctctcgtcgctggagaggttagacggtgcactctctcgccccaaaagaagccaataggtttggggtggaaatcaatcgataattgaagtattctgttattgtagtaaggagagtgttcaggtgatggtggaatttccaaatgaactttgtacgtgggtagaccacccttgagttgagaaaatttcaaaaaatgcaaatttggaatcaaattttgaatattttatatggttttgggatattttcacagtttaatttccaaaaatcccttgagttgtgtcttcaatctttgaactaaagacattttgccaaaataattattaaatttttcaaatttggggcagtttcactggtcaaatttagtcccgttagtcccggtccaaatggccgggaccgggaccgtgacttggaaaatggaccgggctgggatcccggtaccgggagtcccgttttcccggtcccggtgagttgtccaaaaaaccgggaccgggagtcccggcaaaatcccggcggggtcccggtcccgtccgggctctaataattattcttttatgatattagtaaaatatttttttttatttggctaaaataaattattaacttctcagcagcatattaatgagtaaaagaataagccatgaaaatcaattaaaaagggatttggtttgagaaggaatggcaaatgcttacgcctaaaagcctatgtgaataacaaattaatgccgagagtgaaataaaaaacctacgaataaaaagcatttttacatttaattttcaacaaatagcctcgctttataaaaaaatttattttgaaaaattaataagaattcgatttttggaggttcgttggcgcaaaagttcaaaaaatacaatcaatttatatgtacaaactcatggtcagggaaaatattagaaagcttagaaattttcaatttaatgtttctaacatctcaatgtatgggatggaaagaaagaattaatctgatgagagagtaaagggacataaagcacattattgccctttcataaaaagtcagtggcgtccaaagtacagaattgaggcaactggtgcattaattggcatgccttcaaatttggggcagtttcactggtcaaatttagtcccggtccaaatggccgggaccgggacttggaaaatggaccgggctgggatcccggtaccgggagtcccgttttcccggactcccggtgggttgtccaaaaaaccgggaccgggagtcccggcaaaatcccggcggggtcccggtcccgtccggtctctaataattattcttttatgatattagtaaaatatttttttatttggctaaaataaattattaacttctcagcagcatattaatgagtaaaagaataagccatgaaaatcaattaaaaagggatttggtttgagaaggaatggcaaatgcttacgcctaaaagcctatgtgaataacaaattaatgccgagagtgaaataaaaaacctacgaataaaaagcatttttacatttaattttcaacaaatagcctcgctttataaaaaaatttattttgaaaaattaataagaattcgatttttggaggttcgttggcgcaaaagttcaaaaaatacaatcaatttatatgtacaaactcatggtcagggaaaatattagaaagcttagaaattttcaatttaatgtttctaacatctcaatgtatgggatggaaagaaagaattaatctgatgagagagtaaagggacataaagcacattattgccctttcataaaaagtcagtggcgtccaaagtacagaattgaggcaactggtgcattaattggcatgccttcaaatttggggcagtttcactggtcaaatttagtcccgttagtcccggtccaaatggccgggaccgggacttggaaaatggaccgggctgggatcccggtaccgggagtcccgttttcccggactcccggtgggttgtccaaaaaaccgggaccgggagtcccggcaaaatcccggcggggtcccggtcccgtccggtctctaataattattcttttatgatattagtaaaatatttttttatttggctaaaataaattattaacttctcagcagcatattaatgagtaaaagaataagccatgaaaatcaattaaaaagggatttggtttgagaaggaatggcaaatgcttacgcctaaaagcctatgtgaataacaaattaatgccgagagtgaaataaaaaacctacgaataaaaagcatttttacatttaattttcaacaaatagcctcgctttataaaaaaatttattttgaaaaattaataagaattcgatttttggaggttcgttggcgcaaaagttcaaaaaatacaatcaatttatatgtacaaactcatggtcagggaaaatattagaaagcttagaaattttcaatttaatgtttctaacatctcaatgtatgggatggaaagaaagaattaatctgatgagagagtaaagagacataaagcacattattgccctttcataaaaagtcag

SEQ ID NO: 13401 - DNA, 1222 bp, Heterodera glycines
cctgcaggtcctggcttcctaaattgagataggctaaataacattcaaaatatgtgaagatgttgccgaagtgacaaaataacagtggacaattcggcattttctaattcaatttttcgacttttgattcatcgtcaaaaaaaccgtaaataaaaaatgattaatgtcaaaaagtccaacaccaaaatcattcattatgataagacaaatatgtgtgttaattctcttgtttactcttcttcttcttcctcctcttcgtctccttcttccacgtcctaaattaaattcttatcacttttttttcaacaaatcttctgtttttctttttagctcatttattatattatttaaataatgattaatttattattacaaagaccggttccatctgaaaactttcgctaaactaagcgatcgattgtacaatctaataaaatattatggaattttggacttggaaaagacggagtgtccagatggaactggcacatttaactccaattcattaccgcgcatggtctcggacttgtgggctcatcgttcatcagtcggaactcgagaatggttggcggtggtggcacgtgcgggaagcatggaaaggcatttttctgtgcaaaaaattgctgattgtgtttggatgccgggaaaatgtatcattgacacagtatttttaaaaaattaggatttgcagcaacatattataattataaaggattaaaatggactgaattaagctggttccaaatacattaattcagttttttaactcgaaaaattacacaaactcttaaaaagaaaagcatgctgtaagggaaaagctgtagttttcttcctatactaattaaagcatgaacttttagatgatctatcccatttcttcaaatgctgcatcactactaaaatatttttcaaattggtcgagtatttaccagaaaaaaggaagcaaaaattttggtaaataaaaattgcacaatatttggcataaactttgtgccagctcaccttgtcataaattgctcgacgctcagtgaaatttcgtcgatcaatctgtcgatcatatttggatgaaatggcaacttttggctacaagaaatttctgatcatttttgccaaaatgatcgactcccaaaactaaccggaaagcgcgaatttgcatcgtttggatccagccccttcttttgtattttggcacgattgatctgtcgttgacgctcgttcaact

SEQ ID NO: 13402 - DNA, 1399 bp, Heterodera glycines
agataaactccaggaagaaacttattgctgagaattagaagtataaattttgatttaaataactatgcaatttgttaatttaaatttactcgggtggtgccttcactgttgggctcatttggctcacttcctctacatcctcctcaacttcaacctcctcttcactgctgaatgcaaatcaaagtttagattacatattgaataaaataaattaagaattgacaatggaaataaaatcttcaaattaaattagatttcttccattttaggctgtaaaataatttttttaaaaataattctgacttactattcttcttcagacattttgtttcaagagaagttacgaatgccgaacagcacaggaaaaagacaatttgtcgagatgatgaacaacttttgtgctatcgattttaaatttatctataataatgagaaaacgctttaaaatgtttccttcgggaaagttcaaagcatatttaaataaacaaagccattgaattaaaaaagaaatgggaacctaaaaatacgttaaaatttttttcgtgaaaaatgaataaatcggaaaaaaagatataaaacaaaatcacacacattaatctgtcggaggtttgtgggtacagagcatctcacaaatcagcggaatttgtgtgacaaacttttggaggcggaaaatgaaaggaatcgcccgcacaaaagcgacgaaaacatcttccgctgctgctttctctttgtgcgcattgtgctgaggagtaaatgaagaagcttctcccaccccggcggaagaaggggcccattcatcggcaaaatcggaaaaatgaatccattttcccggccgaccgactcacattttctcgacttttcgtaactgcttaaccctccctgcgcttcagttccttgccctccctcccccgacgcccctcttttctgcccactctcattgatcagaagcggaatgggcccactgatcggccttccccctcccccaccccaactttagtcccattttgttgttgagtactgccgcttttgctgcttctgcttgctcctcctccgctttatcttctcggcttcttcttttgtttgtgtacccttcctaagtcgtcggtccctccctccctgtgttatcccactgttttagctgaatggggcgggggattttgacttgtgacagctgccgattttgtaatgcggcattaagttgaagagcacaagttcaacaagcacaaaattttgtgtatttaaatttggaattacggtctgtattttaaacagaatttttgatattgtatgtagagcttaaatgatctttttgactgttataatattaaatagggactcttaaatttgtcataaaaatttgcctatacatattcaggggtggcatctcaaatgactctag

SEQ ID NO: 13403 - DNA, 425 bp, Heterodera glycines
tccgttttgcctttctcagcttcggtccgccgccgcctcactaggttccaaacattagttaaatttgtgatgtgatcgttcgcattttgcagtgcttcgaattttgacagtttttgaccgtttcccttcggtggcaaaacggcacgaagctaaaaaggaaaagagaaataaataaataaagtggcaaatttagaaagggacaattattttaaaaattgaagcggaaactcgccttttcgtaagccttgttcagcaaacgcatccttttcctttcgcgggcatttgcattctgaagaagatttaatttggaatttaaagttattatttattttttaaaccaaattctctcttctccccccccccctctcatttctccactttctctttcccaccctctctctccctctcccctctctccccccctc

SEQ ID NO: 13404 - DNA, 1599 bp, Heterodera glycines
ctctctctctctcatttctccactttctctttcgcaccctctctctctcactctccccctctttatctccccctccatctaccctctcctctttctctctctatttcttccctcctttccccttatctctgtctctccctctctgttttccccttcttctctctctctctctctcactctctctctcccctcactcccttttttcttttttttctctcacctctcttcgtaccctcagcagttgtggacttggtgttttgtagcgtcggtgttccccgcttttttgcctctttttggctgttttttcagttgaatttgtgtggcaatatttcgctgatgcaaatgcacaaattttgatcggtggagaaagagaagaagttgaagagaacggcgaatttgggctgaaactttggcattttgagaggaaaaaatttaaaaagcgtaccgaaaggatttccccaaagtttcgacttattttattgcctgtcttaccattggtgttgtccttctgccaaatttggtattgaatttgtcgggatttggtgtggcacaatttggcaaaagtcccagcagaaaaatgacggatcaaacgccggcgagggatggcacgggggccacggagcaaaatggggcgacggcaagcacgagacggatgaggaagaaacggaagaggatgaagatgaagaggaagatgaagaggaagacgggcaaagggacggggaagaaaccgaagcgaaggcggaagagcaagttaacggcagcataattaggcaattaggcaaaagggaaatggaaacaatgcttagatcggaatgatgtcttaataaaatgagcaaatcaaaatgaattggccatttattttaaggaaaattttgaaattctacgaattcgcgcgaggacaaattatgatcacttagaaacagtgagcattgagtgataggtgatcactccgatcacttcgtcgctctgttcggttcggtttggttctatgccgtggcatttgtgagtgtcgtccttcgtccttccgtcgctgtttctgttccgtgggggcgtgtccccctgggggcggggggtgttgcgacttgcacaaccccagtgccactgacaatgagtgggtgaatgatgtgttgggttggtcgtgatgagtggtgctgtgtggtccccgtgtaattgccctttggctgaacggtctggcgcaacagatgtgccaacggaggagcaatttgatggggacggaggggggggggggcggagggtccctcccggaggatggcccgacttatgacaatttcaaatcttagagtgaatgggggagggggcgattaaagcagtgattgtcgagtgagtgccatggaattacagtatgacagcagaaaaaaaaagtagcaaaatggaaagaacaaataagacgaatgctgcattcatttggtaatctcaatcatttcttgtggctattctcgctgaaagttcctacagatcccttcccgagaaagcaacactctctcgtcacgtaccatcccctgtataatcttaatgtcaaatcccttccggagaaaagtcctaagagcttgatcgataaaatcgttgtctttccattaa

SEQ ID NO: 13405 - DNA, 1170 bp, Heterodera glycines
attttcatttttatggactttcttctgaaccctatgtcaatttgcggtcttttaaaagaaaaaaattcaaaaaaaaaactggaaatctttcagggacggcttccgaccggtcccactgcttttgtttgtcgattatcattaattaaaatagctgattgtctgtgggtgcttcgttgtgtatataaaggaagagcataagcgttgtatgatcaaaaaagagcgatccttctgattttgtctcttggctaatgaatgaatggcgaatgaatccgtcgcccttcccgccaattttacgcacttttcaaaatgcccgcaaagaaagtgcctttggacggtcataaaatgattcactctttcccttccatcaaagtgtgtaaaaatcggatgaagtttatggggcgattaatggcaaagggatgaaaaaagggggggggggggaggaaatgacggggagggcataaaagggcgaaagggaaagaagacaaacgcattgggggcaagaacagaagaagcgggagaagaggcgggacaaacagtagaagagaaaggaggaaatggaagagggaggagaaaggacgagggagggggaggaggaggaaaaggaaatggaggagactaagcaatgaaccaaaaaaacggggctgaaatattttttctccccgctggtcaccctgcaagccccaaaatgcccaatcccggggcactctctgtcaacgggtgcaattgttgcggactgaccgaccaccaatgttcaggttctgttactcatccgtccgaagtccatttatcatttgaccatctcccaaaatgccccgggcaatgaatgccctcctctctctctgctggtgataatctctcgttaattgcatttcttcgctattgtctgtccctttcgctgggtggggggggggggcgtgaatggattcattttgaggatggatgagagattgaccaggaaagataagggggagggatttgaaagaaatgaatgaactgccaaaaacaaacaaaaaaaatgaggggggggggaggggacggatggccaacaccgacgaaacgcactcatttggttaagcaatggcgagaattttggacaatggccaccggcgaacgacacgcaatgattggaagagaaggaaagcaaaagcaaaaaacgatggcattggcact

SEQ ID NO: 13406 - DNA, 3697 bp, Heterodera glycines
  unsure (1)..(3697): unsure at all n locations
ctcaataaatactataatatttgaaatggtaatttaattttgatttgaaatgaggtcatcaatcgttcccaagttgtcattctccgccctcctcttcttgcggctgttggccatcgtcgagcagtccggcaattcgcttcaattcaaacacttggagttgcagttcatcatcttaagtaataaaaaaaaataaatgaatggtaaaaataaaattctaaaattaataaccgtaaaaacagtaaatttttgtaaaaacaaaacccacttttcatttccataatgccctgtggagtaaagaaaaagaattggatatgtctgttctctttggccaattcggcaagcatttccatagcaaacccttaaacaaattaatggattattgtcaaaaataaatggttgctcacttcggttcaccgggtccatgaacacgtcaaattcgtccgaacagcgaaatggcgactccatgcaactgttccacaatgccatcacaaaggaaacggttgtgaatgaccgctcaccgccgctcaaacctaaaaatggaacggaatcggtagagaatgattcggggagcgaactgctctccccccccccctccattctgacctctcaaatcttgcagaattcgtttgctggtcgtgcccgccctcgttgttgctgccccggtccgttttctgctggtgctgggcctctgcatgtcgtcatgtccgtcctccccctcctcgtcgtccgttttttcgcctcccgtgccgggccgttcaacgcgtatttcgaccagctgtcgctcgtcgttgatgttcaggctggcgtagaagttgcgcatgctcatgttgttgcggaaatcgctggcaattttctggggcagcgatgccttcagcagcagaaaccgccgcttgcgacagtctttcatttcctccaatttctgaaaaatgggggaaaatggttattaatggacagaactattaattgcctgtttcctgcgagaccaaacttcgtagtccttcttgaacttcttgtactcgttcgctttctttaagaggtcgtcaactgtgggcacggggtcatgactaggggagagaaaaataagccaagaaaaataaggcaaaggcatgggacacattctcagatttttatcatattattgtacttgttctcctccgttttgatgaagcgctcaatttccctcagatttctctttaattcatccgtcggtggtatcttggtaagatcgggcggaaactcctcttggtcaggcgccaattccatcgatgcgatgtgttgttggagttcagtgttttcatttctgagtgaatgtttacgggttttgttgattttgatgaatttgtccccttactcccaattggttatttccttctgcaatttgtcaattttcttttgctgctgatccgaaccaatttcacagttttcaattttttcatcaattttcctctgctgcaaatcgaaactgtcaatgtcattctaaaaaaattggagaattttagaaataatattattatttaaatatggtatttaatttccgaaaattataacttgaaacaagggggtgcgccggncacccccccccccccccctcgttcgtcgtaaggggggcggctgtaaaggaggggggtgggggggtcgccatggtggggggtcgtaacgaaaggggagaaaagttaaaatttgaacaagttagaaaattcaaaaaaatttccccggcggcgcctatcgacaccgctccaacacctcccacatgttttctggaaaaaaacgcgccgcaaaaaaagtggtttgaatagaaaaaaaaagtcgtcgccggggaaaattgggggccttcgtatgaaaaattggtcctggcgcaccccttgttcatgtatgctccagagagaccaatcttcataataatcaaatcggatgacctcaatttggttgacgttgttcttcagataagcaacttttttgtccgcttcgtcaatttgtcgtttcgtttccttttgttcctccgttttttgtgcatattttgtgttcaattcgttcaattggccagtacattgtgcaagttgtttggaaatttcacggatagtcccttgctaaaaaggaaaattaattaaagagtttacacaaacaaatatcattagcaataaaaagctagagaattctatacatgaaaaaaataaaaaatcatataaaatttcaataaatggtaaaaattgtaggaaaaatgttagtttaaaatgcacaccaaattgtcgatcatttccccgctgaagcagagttggtccaacttctgcagctcatcctccactttgaatcgctgctccgtcaattggttcaattggcgatcaaattcgctgatcgtcgagttcacttcgctcaacgcgtgccctgctccgcgaactttttgctcgtgctgaaaattcaacaattttttaaaaaattcatcgagtttatttttcatgcgattaaaacaataaattcgataagttttactatctccaactgactttgttcttcacaatttcctcgtccacaatttgatgctcaatttgccgcagttgtgccgttatgactgctgggtcttgtgccaaaaagcgctgtgccaatgcgcgcgagcgaaattggccattgttggcgaagaaacggtagggctgcctgccccgggccggatacacctgactgcataacatggtgatggccatcgagacgtttggcgggggctgaaatgtcaaacattaaaaaatgaagatacactttcttgaaggcagcaaaaatccttagtattttctgaaagaatttggcctggaattttgttgaaatttgtttaaaaaataaacaaaaattaaaaaaactactaattgcttataaacatctaaaaaaacatactattttaatcaatttggtcaattgaaataaaatacaattttgtccaggaagtctttgtttttcgtgcccaacgacatgggcataaattccaggaaaattccggagatgaaaactgtcgggaactttccctcctcacttgtgggtacataatgttccgcgcttcctcgtccttctctaccaacaatgtgctttcaatgtatttcaagtccactaaaatgttgtaaacggtcggctcaatgtcatcagttaacacgcgttcaatcgtcaaatattcggaaggtggctcctggtcacggatgtcgaatttggtgtccgaaaacctgccgtaatttgtttagaattcataaaattttaaaaaatttgtataaaaaaaagagagcatacgctgctgtaatgatctctggcgggtcaaggccattccgtttgaaaatgtcgtcgagtgccgcgcggtcttcggacgagtcgcaaatgaaggcggacagcgtcttcttcatgtgaaattccacggcatttgcccatttttggtctctgagtttgatgaaactgcctaaaatggggaaacaattagactttggcacgcatgactttatcaatttttgctcaccaattggtccaattggcagccttcgaaatgattcccggttcatttcgatcagtttgaccaacttcggcatgttcgccccgaacagtgccagtcgattgaccttggagctggccaacgtgttcttctcctctctncactggtctcggcgccgctccaattggtgcaattcggaagtgtgttcctaaaaaataaacgcatttaactgcaaaaatg

SEQ ID NO: 13407 - DNA, 1790 bp, Heterodera glycines
  unsure (1)..(1790): unsure at all n locations
aagtatgtgtgccaaaacgtactcgccaataatggctgccaatttcgcgttcgcctccccaatgtccttgtcaaatgccatcttttggtgtgttctcttatgaaggtcgcgtttcaaatcggtgatttcaaactccaattcacgcactttcctcttcatttccatgattttctcatgttgttgtttgcacttcttcacttcctcctccttttgtggcaaaaggctctgttgcttttggatcagtttgtccttttgggccttaatttcaacgaattttttttttgcagtttttggtgacttttattaaggttgaaaaaaacttgtaaatgttttaccatgtgttgctgaatctgttccaaaaggtcgaccttttccgttgaaagtgttccaacttcggcacgattcccattcactctctgaaaatttgaaaagggcgtttaatgggtttttaattttgtaagtctctgctcacggtgatattgtcccgaattggggcccaaaagttgtaccacaaaaggcgttgtcgctccacttttttgtctttgatctctcgcgacgctttgtgccggtttttcatttgaatataatttctggcaaatttcaatttttaaagtgatcatgaattgttaatttgatcagtccgtcactcactcctcacgcgcttttttttctgcagcgagcgaatcaaaaactctgcaaaattcgtcaaaatgcgcttcaatgctttggaacatcaaatcggtgctgtccatctcggcggttttcctgtacagctaaaatgatcaaaggaaaaagaatggtgtttttgtataaacttgattacaattttaggagaaattcgaatattgcattgcttttagagtccgggatttgactaatccgaaggaccgacttttgacaaaatgctgagcatttttatggtaagatatttgaaaagtacctggtacaacttttccggtttcatttgttgcagaaattgtctggatctgtcctgggaaagccaggccaacggattgtccaactcaatgccgaactgttcgagcaatgcgtccaactcggcccttttcctgctgacaacgcgttcccgaccgccgaatttggcactcgtcttcagcgtaaaattagtcgccttctcggtgatgtggcgttcgaccacgaccacttcgtcaaagttggcacaggcaaaaggcccctcattagacagataaatacgtatatgagcatcgctaaaaacagctcaaattaaataaactaaatgccggtgaaacaaaataataatttaaaaccacaaaattgttggaattcaaataataaccgacctcttcccgtctttgatgtaactgtgcaacgttttaccccgttcattggagcgcccggtgccgccaaggccaatgttaagtccggcaaacaacgcacttttgccacttccatttgggccaataatgtagaaacagttgttgctgtccacgtcaaaattcagctgaatgggggaaaagcgtgctgattttgttttatcttttcttttgctaattcttcttaccctgagtttgttatggcacataaaattctccaattcaatgcacattacttttccagcaactaaattttatatgaaaccaactttaaagccaaaaaagacaaagccacaaaccagctggcatcaattccttgggtcttttcagaatgttaccaattggctggtcatcctcatccaaacacctttttttacccgttgtagatggaaattggagatctttcattttgatagtttgaacaaacgaccnntgcag

SEQ ID NO: 13408 - DNA, 4229 bp, Heterodera glycines
ccattcctttttcttgtccattctctaccagtgccttcctctgtttgtccttcacttgcgcgtccctttccatcgattgcattcccttttctgtttggtttgttgttgttctcaaagacaaataaactatttttctcctcctgtttcttcaagtgaaatcccaaaaaaaagtttgcttctcatttgccataattcaaaaagttggccaaaatgtcaccaacggcaacccaacgacggcattcacttttggcattgggttccttttcgtgtggtggcctaagacgaagcgcacggctttcaatgaaagcgcgaaaatgttcacgaaaaatgtgtggtgaaattaatatgtatttaaaatggaatttaattttaaaatatctttttttgatgaaaatttatcaattttaatttttactctgaaaacattttatctgattgggccaattatcaaaaagtgaggacaaaatcatgtgattacttggcttttagctacgtgtgcaacgacatttggctgcacatttttccatggcttacccccgcaaaagtcgggctgaacatggcaatgctttctgtccgattcgattgtcttgtggcaacgcatttaaaaacgcggaaatgggcatttaagagaatgggtatcttttatagcaaagagaacggcggcggtgctggcgaaaggtaaattaacaattttatgaataattctgcacacacaaataaaaatggtctgtcaccaaatattgctctaattttcataaattttctccgcggcaggcccctcaatgttctaataagtcatataaattattcatttttggactattaacaaggttcattcaacttttacaaactgcgcctatttgcactgccgatttctcaataaattgggttttttcaagacctggttcgaactggaccctgatcttccggatccagcaccacccggacctgactttttcaaaatacccggactatcctattttgtagtttttaaatttcattaattttaaaggaaattcagtcacttagaattggtaactccctccctccctcccacttcggcaaaaatgtttgataatttataaataaagaaaactcatttatgaaatatctttttttgaaaggttattcggcaatttgccagtcgaccagttgccaccaccaagcaatttaattggttttaaagagatttacatcaggtagataaatacttttattttgtatataaaaaattcttatcccccatgctgcccctataaaaaatgtaagaaaaattaaaaacaaaataccttattatgtatatagcacatgtttcggaacctaaatgaattcgactcaatccaatttgaaatttttaaaataatttttgctagattttttaaaaaggaggacacgtagagctctagctgcctgcttcttacaataccaagattgattatttgattaaatttagctaaattatgatttattattttgcaaacaaataaaataataatgaaatttaaaatattactatcattgatacttttgtagtttcttctctccacggacaccacaccggtggtccgggggtttggagatttagtaaataaataaactaaattaaaaacatttaaccggcacgttcagttactttgacaactctgtgctctcattgctccattgcttaacgccgcttttcaaaatgggcatcacattgaaacatatgggagatgggatggataaacagaggagttggggactgttcatccacaaaattcttcctctgatcggcatccccaacatccacaagttgtacgttacttgcgggtatgttttggccaacaatgactctttgggcatctcactgatcatgattaaatagatcagtagggtggggaattagacaaaaaaaatcaagaaaatactaaaaattttttctttttctctcattttggcgtattatttcaatagtacttgaagcacaaaactcaatcgccatattttaaatacctaaaatttgcatccctagcaacaattattcccaatttttagtggcgctaaacgactgcgtggactgctcgcaagcacttcaacaacatttctgatcgattgtcccaatctccgatcaatttactatgatgggaataccactggccttgatcgtcccgttgacgccaacgcaaaagtgcgggaataatggcttctgtggccacgggcagatggccgtccgaaagtgttgtacttttggtacgatataagtgacgaatacaagcaggcaagcggcggaaaagcaaatccataaaaatgataattaatcgaaaagtaagagagggagaaagataacagagagagagagagaatgggagagcaaaagagggaggaacggggagggatataaaaagatgagagagtgggagaaaagagtgagtttgagagggagagaaaagacatgaaatagagaaaaaaaagaaggagaagagggcagataaatgagactgtgagggtgaataagtttcaaaaaatagaatttcaaattattcagttggcagaatcatttaggcattcatttccatttccaggaatttctgagtgccacaagcgcagtcaatttcatcatttgtttcacatcgttttgcattgacgaacaaccggctgaaccggacgacgtcgaactgtttcagttggacaacaaacgcaccaatgaacgactggcactagaacgaatggtgttggatcagcagagcaaagtttgcatgacgagggcgccgatcggaagagacgagcgaaagtgggcggaatggatgcgaaaagcgtgggaggaggaggaaccgagcaatttgctcatattttggataacggaagcgaacatggggccggacatttgattagacccaaattctgttccatttttgcgagtcgtttcaattcgccgcgtcaaattttggaatgtcataacgtttcttattcagttagcttaagcaagagaggcttcatttcaaagttatggagctgcacatttatatgctaattgtaagatcaaaaacgatcattcattctaaaaaagggattttggcgaaatgactcgtccgttttgctaacctctgtattctcaacttagttttacgcttcttggcattctttttcatttttaatattggcctaatttaattttgtacttaatttaacatttgtttggaaaattcattaataaaaatgcaataaactgaaaaaaatgcacgcctaaaaattcatctttcaaattataaacagataaacctgtaaaaaaagaattgtcaaaatttcaacgttttgactaaacttttctactcattgttttcttttcgtgaggtgtcaatgttagatttttaataaaacccaagggggaggggacccttttgatttgcaattttttttttaaatgataagtcaagtcggaaactgtttccggtgtttctggattgttggtcacgaatttaatatcgatttcggctaattccgaatttaaaacccgaacaaaagccaaaagttcgaaaaatttaaaatcggaaaaaagtttgggtcaaggatccgaaatttgttaaaatgaatctcagattcatgatttatgatcaaagaccaagacctccagacatttttctgtttgcaaaccaaaattgttcagcagttcccccctttagtttttataaattccaaaataaccacggcgagttttttaaattttgtacgcgaacacattcatttgcaaaatgatagactcggaattcggaattcataggctcgctcaaaaaggtcgaaaattggaaatcggaatccatacctccaaaaatgtttgtggccccaattaaaatttttttccatattggcttggctgggggattttgctaaacaattatttttatgttttttttaatttgttatattatttaaaaattgaaatgtgcaaaaatataaaatgtttttcgctaaaatccttcggaatttgactttgtcttcgtcattcacctttcttttatttaaaatctgtctgttggtgtagcaaatatttgatggccacaaagagggcatttgttgtatccaaaaaaaatcctaaaatgaatttattaatctgtttgaggcagcaaccgcacatttaaataaatgcaattgatgctaattgaggaaaatactcaaaatgaataaaaaatattttcattaaaagaaatgaatttcaaattatgaaattaattactagggaaaaagcccacaat

SEQ ID NO: 13409 - DNA, 3302 bp, Heterodera glycines
atataaaattctttcgccaaaatctgcccaattttatccatgaaaaagtggtggattttcttttgttttgtgcttttttgttgcagcaaacgccacaaattttgcacaattccaaaaacatcgcttcgggcgacgacccctcgccctttcatttcatttattcatttgctgcccctttgacgagttttgggttccatccgtccgtcgatgggttgccgaaaaacaaaaatttcgtcgtcgtcgtcttcgttttggtgtgtgtttccaaaaatagcccaccaatttgtcatagtcagccgccccctacggctgccataacgcggcactgaaaagtgtgcacagtgcacgacgacgacaacaaatataaactccaacccaaaccaaagcaccaaatcaacgccaatgcgtggacactcatttcattatcatcaattaattaactaattaattaattatcggctgtttattgtttgatcggtccgccaattggcggaagaaagccccgaggggcgccccgcggtgaattcgtcgtccatccgccgtttcccccaattttcggcgtccattcgttcgtttgtccgtctgttgtgttgcagcagcagtgcatttgtgcagatggatgaatggaaggaatgtgctgctgcggttggtgacggaataaacgacggcgttttggggttcgttctgtttttggttcagcaacggcgggcgaaggaaaagcatcgcgcgaactgacaaggatgaactcaaattttaatttataatttttttaaattcttaacagtgagacggagcggcgccgaagggtggggagagtccctattaaatttgggaatggcgacgatgaaaagccgagaaatttctcggctcgaaaaccgagatctcgaacaatcctagacaaaacaattgcgtgtaattactttcgtttaaaataatttcaattatttttatatatttttttaaatttccctccctttttccccatttttcttttggggtgcgctttgagtgcattacagcgaaaaatgtgaaaagcatttttacacggtgtactgcgaatggcgaccacaaaaaagcggcgatttttgcgcgcgcattccgcgaaaagcgccccgggcgacgcaaagcgaaggacggacacacccaaagcgaaaagggactaaagcgaaggacaaataaaaaaaagttgggggaagagtaggggaaaagccgggggcaaattccaacggcacaaagtgcaaaaaaagggtggaaatggaattttccgactgatttttaaagcattttttgaatattttgtcagaattaccaattttgattgatgtatctttacatattttatttaattaggtaaaaatacatattttaattgaattttaatttaaaatgaatggccaatcgaccgattttattcttcaaatttctttttaaaaattaaacaaaaaccttttaccattaatgagttaattttttttgtcaccttaattacaaaaaaatggtttttgtgacgtcattttgtgcgactgttcgcgtgactcactgcgccccttttgtgcaattcgccgccaattcgtccgctaattaataaatgataatgggaaacgtcgcgcgggttggccttggcaatttcaaaaccaaaataaaacagtgaatgatttggtggcattttacaaaagtaaaagtgaaatgccaaggtcaaagtgatcaatcaactgatttgctaagtcaaaaattccaaaattagctcatttgccaaaataaagcgactaattaaagtgccaaaaaaagaaaaagtaccaaaagcaccaaattatcggacagattttgcgatgccaaaatcactgaatgtataaacacagttggcacaagtgaaaagccttcgaattccctcaacaggcgttcatttagtctttgagcacaatttttggaacattcaatacgactgtctgtatacagtaccccacccaaagaaaaagactgaagttggtattacagtatccaattgaaagcgacaaatttccatcagccaagaagaagctgaatgaatgcggcggattatttaaataaatgcctcaattaattgagcctaatttggcacttttatttccttttcctttttttgtccttttatttttccatttccatttaactttttaagttgttgacgcaatacaacaatttttgaatcattcgaaagctcttcacagtctctattagcctactaataattccagagaaagtcgaactaaaaaaagatagagatgaaaaacttacgaaaattctttcaagcgacaactttttttctgagctccttaatcacttcgagatagcagaaatatcttctaaaatttaaaattttcgaatgttaccaatgtttgttaagtttggtcgacaaagaaaaaagttatagccttttgaactttgctgagatggagttgacccctaaccgtttccttcttcccctgtacaaaatgtttttgtttttgtctttaattgttttgccaattttcgcggaaattcaaaatatttttaatttttccaccgtttcgtttcgcgtgggtgtttcttctctctgtcccacgccttttttctctcttcctttttggcctcatccatccgtaaaagggcgtaacaaattcaacaaaatttccccccgggggttgcggcgcgcgaaaggcaaacggacggacaaagcgaacgcacttaacgcaaagggcacccgcaaatcggagaagttgtgtttgtgcctccaaacatttgttggtggcaattgaacaaaagggtcgagaattgacacccgccaagaggcgagcaaatgggtaaatgagtcggccaaaagcgcaggatttagaaacccgacaggccatggacgagggcatcgatggacatgccgaatagtccgaaattatgagaatttgtaattatggatctaagagaggcactaaattcgctaattgaggaggaccaaaccaattaaaatgcaattaattgatgatgcaataatcatacaacaatcatttttaaatatagtgagaaagcgaataaagtatggttggttcgacctggttttgcaattatatttgtcacatgcctaattagtctgtaatattattataattatccctccaaaagtgtcctttttctttggttcggattatcactcaccgttttgtgtgccaatttcgaatttcgtccattgtttcgacttttgttttgcctcccatttcgtcgtcattcttccaaattccaaaatcgtcgtttgtcccccgcccccacaaattaatttcgcgtcttttcttttt

SEQ ID NO: 13410 - DNA, 2692 bp, Heterodera glycines
  unsure (1)..(2692): unsure at all n locations
atgttacaccatacatctgaaaatgtgcagcataaaaagcttcgcttaaatcaaaatttgagaaatttctccaaaactgcatgcaatataggtatatgtattcattcttgcgttggtgttcagcagaagcatttataacacagtatttcttttttatccaattaaaattgtttaacgttaattttaagaaaaaagatgatcttaaaaaatagattttcaaaattttttgatcttttttgccaactaattttgacaatcacaaaagctcttgaagaggaggaaacctttttcaaagcatttgctaatctgtaagcgatttgacgcaccataaaaaattttgggcgttactattttttgcacggtttttttgcattcattttttgtctccggtttcatcttgttcttcttatgccatccaaatcagcctcgagtgttttaaattccttctcctgtccttccttcctcaactggttcctccattcagttcattcgtccaacttttatttgcctcactttgtctgatttcccaactcactcgcacgtccacacaaaaacggggcaactaatttgcttgccatttttaattttcatcctccaccaaatgaataaatgaatgtgtagggtatggccatagaatgggtgggtaaaataaaaggacgacggatccttggccacactttcatccctttccctctttttgctgggatttcacagagaatgcagaagggcggggagagaaaggtggttccaataccgcagcgactgcaccacgccatagagttgcccttcgcgtatctcctccactcactcacactttatctcttttctctctctctctttttactttcccactctctttctctctctctctctctctctctcgcatttatcctctctctcttcgcccgctgtctcttttctcttctgactttagtagctgccttttctcgcttgtttcactttttcctttctgtttcccgagaagaatttcgctccattcccgcgccataacttttcctcttttcaccacctccggtgaattctttctttgcctttctttctctcttccctctcatctgtgttttctttttttctctcgttttctccgcttttccctccaaaaatcgatttccgctcccgtcgtcattgttcagtgagcctcaggcgaggaaacgactgaagggggagcagcacagtcggggatttcgtattcatcgtcgttgtcatcgtcccttgtatttcttcctcgaatgctccttatttttgttttgttcattacaataaaaataaaattgtcgcactctaattgcattaaggtcatttcctcacctttgcatcaattaaaccccattttttggttcattttccatttcccccttatatcatatttcggcataattttaattttgcattttatttttagattatattccaattttgtatattcatttcgtatatagcagcagcaacacatcccagcgtttttatggaattccctgcgtcaacttctgtcaggcgactgttttggacgtagtccgttacctttagtgttccttcaacttttcgccattttcttatgcgccagtagaaacatcatcgccgtcgcactccatttggcccgtaaagccagcacaaatagcggaataccaaatttttcgtctgatcatcgccgactcccttttccccgaaatattggaccctttaattgacaacagtcgagcatcccaaaacaaaggagcaacagttgccaataggtttatactttcaagattgattattcaaatttaattaaaatccaataattaattttccattcttattgaaatatgcatatgaaaaggaaacaaaacgaaaaaattattcgttcaaagccaaaagctgccattcagaaatcgacaacttcattgacttgagagtgcggtgggcctttggcgtgtttgctgctgtttcttctcaggcggctgcacaacaacagtccattcattcattcactgatccgtgcgcggggcagaacccaaaattgttggccaatagtgcgtcgcactaatcggcaaaacgggccgactaacgggcgtttctgtcgggccaatggcctgctgtctaagcgaggaggcacgagaacagaagcgcattaaccaggagattgagaggcaactccaacgcgacaagcggaatgcacgaagagagctcaaactgcttttgcttggttagcattttgtttttccatttctgaaaagccacacaaaatgtcgtcgtagtgaattacaattgttgttttttaggtactggagaatccgggaaatccaccttcatcaagcagatgcgcatcatccacggcagtggttactccctggaggacaagcggcagcacatccgacttgtctaccaaaacgtgttcatggcaatgtgaggcgcttcaattataatgagcgttgactcgaaaggatttaacaaatagtttttttataatggaaattgcatgaatcccttcaaataccaaattgtaaataaaaaagctatccgttgattgaatatatttaaacgtgtttcgactttagtgcgtaaagcgataaaaggaaaaaattgccanatttttattttgcccattcgcaatttctctcctcctttccccatcctttcttatttcctttatttanncatgtattttattttaaacatccggctgtgaatc

SEQ ID NO: 13411 - DNA, 2266 bp, Heterodera glycines
  unsure (1)..(2266): unsure at all n locations
ccaaatagtaatttttgaagtntagcaaatgtactataatggtttcactattttataaaacaaaagattacttaattaatgtattaattaaattcctttacctttaaaacattataatttctgttctttgtcagttatttgaacgatgtccggcgtttggctgaacccaattatttgccaactgaacaggacattttgcgcgtccgtgtgccaacaacaggaatcattgaatacccattcgacttggaacaaattgtgttcaggatggtcgacgtgggtggacaggtcctttttctttatccgttcttttacctcatacttttttgaattatattcctcaaaaacttattttcaatttcgtgtcttaaaatgaaaactcgtctcatttgccagcggtccgaacgtcgaaaatggatacactgttttgaaaatgtgacgtccattatgttcctggtcgccttgtccgagtatgaccaagtgttggtggagtgtgataatgaggttggtggttcttcgtgcctagcattatacatttttattttataaaaagcgtattttcagaaccggatggaagagtccaaagcgttattccgcaccatcatcacctacccatggttccaaaactcttcggtgattcttttcctcaacaaaaaggacctgttggcggaaaagattctctactcgcatttggccgattacttccccgaatatgacggttcgttgtgccgtgtgccttgttttcacattgcattttcccacttcttcttaggcccgcctcgagacgagatcaccgcgcgagagttcatcctcaaaatgttcgtggacttgaacccggacgcggaaaagataatttattcgcatttcacttgtgccacaggtgggcttttacatcagtaattctccaccggcttcccctgatcgactcgtgaatgaattgtgcccttttgttcagacacggagaacattcgcttcgtattcgcagcagtcaaggacacaattctgcagcacaatctgagagagtataatctcgtgtgatcatggcctccccccccccccctcctccgccacgccaccatttttcacattttctcaacaccccgccccttccttccctccacgaatcgtctcatcttcaactcttcaccagtgcacaacgttctacataatgtttttatcaccatgtttttaatatatatgctattggtgtaaacaagaaactgggaatgagtgttccaattgttgtttttttatgtcgtgtgatccgttggctggacaatgcccattcccgtgtctctcatgaaagacttgttttgccataattaacgaatgcccaaggctttcttcctcaatgatgacctatcaaaaatataggctaaatctatttttggaatattaattttctaaaagtttcaatggagttgaagccaaaaaaattcacgtgagcttcccatctaatcaaagcccaaactcagtggaaaggtgatttagtttgttaggaattgaaacccctcccctccccccacttttgctgctctgttttgtttatacgtgcgttttttctaaaaaaaatacctattcaggacggttcataatttacaatactatttcacattttcttttttgcgttcaaatgcttctctaaactcctcaaatgttctcccattgtttgatgttcacctttctaactgattgatacctattcatcctttattcctcaaaatttctaagttcaccacacaaaacaattgtttttattttatttgctgccactcatgctaatataataacgcataaattaaatttaaaactaaaaaaatgtgaaaatatgattgcctgttaataagccttttcttaataattgggaaaatgtcggtattcgaacggaaagtcgaaaatttaaacttcacccgcaaaaaaatgttaaaaatctgattttttgtacgaatgcattgaaattaatgatttgcttatttcctccccaaaatcgttaaattcaaaaataggaggcgaaaaatataatacatttttgatcgaataattttaaaaataactgatttgaaggcagtttcgcaaaatgttctgattttcgaccccaaaatctgttcaaattttgaaaaactttcgatccaagccctgataattcaggggatgacaaaaaggagaagtaccgtatgtccaacgggtttctgtgatgacacgctgataggggacgtgcttaaacaccaaaaaacttcatgccatccaaantgtctacgtcaaacagaga

SEQ ID NO: 13412 - DNA, 1043 bp, Heterodera glycines
  unsure (1)..(1043): unsure at all n locations
agagtcactcttttattacaaatatataaacatttacaaatgaacaatatatttatgaacaaatataaaattcaaaaaaaaaagaatgagatcaaagggatttgttaaagttgaaccgcgccatgccatttggacacctgagtcgtttaagcattttcgacaaaaattatgagaatcaaaatattaatttttctaaattttcaatatccaatttctggcgcttaaataattcagctcataaaagaagtctgaactcggttctttcagcaaaagatcattttagtacgtcctgttttaatgtgcaatttggctttattgcactttagggtgttcaaatatataaaagccgtactaaaacaactccgggatcataaatacattataattgaaaataaaataatatttgagatgattatcaaatgattagttgataatagcaagctgaataaaggattcattatggaattggatatcttttgtagtttatttgcatgtgaacacttgtgtgacattcctgtggtaaaaaatgaaagcctagagtaagttttattttttatggattttagtattcttaaaaaaattattaatatagatatattaaaaaatgaattgattaattcagatcaattggccttttataccaggaatataacgaaatgcccaatttccgagttttgattttggctcggaattccgcttttctattggcgaaattttctagcgcccgtcaaaattccgattgccgaaatttttgagggcatcggcatacaaccctgttttatactacaaaatttcggtccttcctaccgggtgcaccccaaaaatctcgccgccggaatctcgccgccggaatctcgccggccggaatctcgccgagacaaaatatcgccgccgaaatctcgccgggcgaaatctcgccgcagaaatttcagaaaaaaaatttcaaacctcagccnnnccccaaggaaaaaaatccttagaaaaatttgtttaaaaaaaattgtaataaagaacttggtgaaaaatcttttcagtaaattttt

SEQ ID NO: 13413 - DNA, 2647 bp, Heterodera glycines
agctcatcccactcgcactcattttacgctgcagaaattgtttttcaaactgagacattaaacattttaaaatcttctttcaaaattccttgttcttatttaaaattttcaaattaaaaatttattaaattcaaattaaactgatgccccccccccaaaaaaagttttccatctgaccaggaaaaactaagtcagtcagtgctctgtttttcctccgttgttgttgctgctgccttcggcctctgctgtcctccactcgcattggctcatcaaattgcatatttccgcggctgttgatctgaatacgccgtgcctgcttgtactttgtctgaaggatgttgccaatttgacggattggaggctaaatgcattttttaaagataatgaatgtattaaattgaataaaattctgtcttaaatttgggtgctcggtcgaacttgaaaaagtgtcaatgataaataatatttaaatttaattttgatttggaatcattattttattttataatatttaaatttaattatttttcaattataattttaacaatcgattataactttaacaataattgtaatatttaaattattattatctgaatacaccgaaatttgtaatttcggtgtctaaagaaatcaaaattccaagccgaaaatgtttccagatcattaggtattattatgatgagaatgaagatattttagctgggttttgtaactcttttcaacattttcagaattagtttaaattttggcatgaaatttctttggcataaaggctgattttatgttaaattcaatctctattgatcaatgattgatcgcttttaggatcaactcgggatataaattaattaaaactggcatgcccaattatttacacaccaattgcatccaacatgtctttaaattgcatgagccgctgaaaaaagcatgcatttatgatggcattcaaatttttttgtagttgacctcactccatggcatttgcactttggctttgcatgtcgctttactatctgaaagttaaaaaaatatatttcgattttttatttacataaatatttttcgcatttttcgttcatcacaaaaatgctaaaaatcaaaaatcacatcccgactaagaatggaaagatttttaaaaattttctactaaatttatttttttcttgaccaaaatttttgatttatgaatttttaaaatctggaaaatgtgaattatttacaactttaaccaagtgcataaattctttgaaattttttcatcattctcattgcattattaccttcctgccaacttcgttgttccatcggttcatcaacgatcgtccatgccattccgcggatcgcttattgctctcctccttttcacgtacatcaatgaaatcgcttaaattgctcttcattaaatttaatttgtcattgtattgtctcttgagcccggaatcgagatttcggtattgagtaggaatttcgaaaaaaaactcaaaaaattcaggaaaaaataaaaatatcaaaaacagggcgaaattttttccactcccagccgtacaaattattttgaaggaaaacggcggcgggcaacaaacagcacggcaaaaaatcccagttttgacaattgctgattgtgagcgccaacccgggatttttgggattttcaaaagcagaattttcagttatacttttctctaaaatccccggtttttgctaatattcgacaagtcctaatgataataaggaagatattttccagaatttcattgagagctttctgagtttgggcgaaaatcccgactcagtaattgtctcacaatcagctgctcaccgcgagaatcggtagccataatcgatgttatcgccacagccactccaagtccaatcctcattaacaccacggctttgttgctgaatgtggaaaaacatagaatatccatcttcatcatcatcatgagtgccaaatcacattttcccaatgataaaattcattatttgctcattaaaattacactcacagagaaatatattaaattaattaaaataattggataaaattaaaattcaaaaaaaaaaattttttttttttgcaaattctttgaaatttttcgattgcgtttatagtcaaacacttttggacacacccaatttcaagagtacccaaattttctgtcccacaagagtttattagatatttgccagtttttcgattaaatctgccaaaatataaatttaaaaccagaataataattatcaaatgcaatgattttgattaggtgcaatttttgttaaaagcccacgcgatttggcgcattatcactttctgaacagccacaacttcgcagaaagccaagacgacaacggcgtccaatttcatgtgtgacaccggcagaaagaattgcatatgtgaaagccgcttcacgagttcctttaagtgggcataataagttcattaattttataaaattttgaaattaaaattaaatttattgaaattatgaacgcggacattttattttaattattaaattttaacaaattcacctttcttatgtattggaccaatgtgttccttcagctcttgtggtgttgagcagttccatcgatgataacggaattgccattcgcactcctcaaaattccatttattaagaag

SEQ ID NO: 13414 - DNA, 3653 bp, Heterodera glycines
tccgaatcgtccgccgaattagtcccagttgataaaacagctgctgaccctatcactgttcctttggaaagactcataaaagtgccaaaggcagtccccgacatcgcaacattaccacggggaaaaaacccgtataaaaatgtgctaaatgcaatgattttcatgatttcggcccaactgaattttgaaaatatgccaaaacgtgcgaccgaaaattggcaattggggacaattgctaaagaatgtatgggggcggataaatatggaatggaaaaaagtagtgcaaaaattctcagaattaattgcctaaacctgaaattgaaggtaaaaagggaaagaaaggcgaatttttcaggacaaacgcaaacggacgccgggatttgttggacttcggtttgcagtcaaaaagatgccgagcatgaactctgcacggctttgaaattgggcgaattggaccctgttcttggacagtctggcccaggcgccatgatcgtacagtcgccgcttcaagctcttttggccgtttttctgcttcgctccggcacagtcacttcaaacaccgcagcccgaacattcgtcgaaatgatcattaaaagtggaccacaaatggaaatggccacttattcagagaagcgaggggattatgttggcaccgggaaattcccacaggaaaatgaccaagtcaaagcgctcgaaaaatgcttcgaaatgtgcttcgttgcacgtgccgctttaagcgcaactggctacaaaccgcttgcgatggcaccaccaattggtttagagttgctggcgggggctgatcaggaagggtggaaagaagtcttcgatcagagcgcatggtttttggaacgtgcccgtgccaaaatcatccacaaaaccgagtcatttgtgtcccacgaacgtgtttttgttggggactcatctgcacgccacctccagggcttcttcgaccgatcactttacattggacccaacgaaggcccagttgctgatgtgatcaggactttcaaacctgttgtgatctccagtcgcgtgaaggtcatggttgtgtttgtggggagagattctttagctgcaggcgaaaccccggaggccatcattgaacaatgcaaacttttggccgaattgtgcaaacgtttcccggttcaagtgctgtggagctgcccgccctacattcacaaaaaacagcgagaattcgaaacgctggtggcacaaatgcaggggctcataaatgatccccctcagattctgccgatctgcacgacaccgaatggccgctcggcattggaaatttttcgattcggcgatcatttcaatacgcacatggtggaagaagacggaaaattgaaaaaatgcgggctgtcgggcacttaaggcttggataatgactcagaccccattcccaggcgataacgaaatgcacattcgctcgctgccttcggccgtcattattccatcgggagatcgggccgatcaccgatcggaacagctggaattagggcattcttcgagagatcgggccgattctcgtagaattgttcctaatcgttcggctgatcgtccggccatccgttaccgtccttatgagactaatcgccagggacagtacggtaacgaacgccgtcgggaattccgtcccaatcgccgctgagacacctgttggaccccacctttcggtttctgacttctaaaggcagggacgccttttctgattgttgagggatgttgtagaattttaattataatgactcattagtgttaattaaatttggcataatgtcttgtttcgcgttttttctcatttaaaatggtattctttgtttttttttttcttccatctttcattccaattttattatctggtaatttttatttttttgtgccgtccaatctcttttgactttaaaattgatattcgtcaaattgtttctcatcggtatttgtcttttggaattaaagtgtttggatttgacagtggcctactctgtgtttggtataattgcgtccctgtcttaagtcagtagcaaaagtacaatttggcgctcccgaggaaacaggtacaaaagcggcgatttttaaagagtttgagggtgagatcgggaataaaaaattttttggacgggttttaatttggagtgtattaagtatcagtccggaccggacgatatttaagttttgaagtggaaattgactattccggatcggaaagttaaaaaaagcgacaaaaaactccagtgcaccgaaaaatttattgtttatcagaaaatttgagttcgggccgaacctttttttctgtctacatcgccgtataaactattgacaccgggtcggtgcttagtttttctccgtcttctcgccgaatttttacatttgactttgttggatggtcatcacacgcagtccaattttgacacggcaacgagcgttgaatttggagattgccgttgacagaagtggacatcagattaatgtcggtggaaatcttcagaactctccgcaacgccaaaaccacagtgctggagaaagttttccccaaaatcagcaaattgaaaactcgccaatctcacccactgaactcgcgggctttaatggggaaaatgaggacgacaattctcttgttttagaaccaaatatgaccgaagaggaattgcgcaggcgcttgttggtggtcagcattgaacgaagccagccgccatccaacggaaatgccggaaatggagaaaacgccgaaggtttgcgaaacgcaatcagggaaaatgatggacgaccgaattttggagtaaatggtcaaacatttgcccaccaaaggaggccgcatgacactttcttatcaaatttgatgaataatggaataggaaactttcctcaaaatttggtccatgtaccgcgtacttcaaccccaactcgaaatgttgaatttgaacagcaaataggaccattcccgtttgttgttgaccgcaacaacagagcaccaaccccacctttaaacatacggcaacaaattttccaccccatcccactgaatgcacaccgcattaaccaagtgtcggttaacgcgcaacgcaacattgacgttcagtacgtaccaaataattgcgttaatgccccgccaaacgtacagcgtcattgcgacattcagtacaccgctcctaaccctgtcgccgcaccatcaaacgcgcaacaaattcaagcaagaagtagacttattcaaaacattccaatgcaggctcagctttggcagggccctgatggaaaaatgactttggtttacccccaagaccaacagcaacaagtgctgatcgagcaacctaatttggctcaaaatcaacaaaaattcactcgccaggcctttcagattccggaaacgaatcaagagcctagacatttccctacctatccccaaccgaatgttgcgccaagcaacctcgaattcaacttgattttggaaagaattccggttctaaatggaatgagggtacagattctgtgcgccgatttttcaaaaaatttgatgcatacaccgacggatggccaaacgcgaaacgaatttcggcgttagaaagcaaagtttacaacaaagcagaaagagcttttgaggcagcaaagtcaacgcagccctaccgatacgagcatatctgcaaagatatgat

SEQ ID NO: 13415 - DNA, 528 bp, Heterodera glycines
ccaaaatgaggcttttttgcttgccaaatgaggcttttgaaaattttcatctgcgaaccctggtgatgctcgactcgagaaaagtttcgggttttttgggtctcggggtcgagtctcgggaaatttttgggtctcgagcatcactagtgtgtaagtcagtggattaggtcgttttggcgccagcctttttttttgcactgtaactctttttttttctttgtcaaccaaatctaacaattttgggtcggggtcggtttagtacgggccgttttagtacgagcgcaagtttttggctataacttttttctttgccaacaaaatccaacatttttagtatcgttcgatagccctaagtgtcctatattaatctgaaaaattgcgaaaaattttgttaagcttcaaaaaagttatggccagaaaaactcaaaaaaccagattttcaaacttttttagctcatactttttttaaacttaataaaattttttgaaagtttgccggctaatatagcatccgaggggctctcgaat

SEQ ID NO: 13416 - DNA, 1474 bp, Heterodera glycines
ccccttaccatgtgatataatgttgtttttactttcaaattacaaatgtttccccaaccctttggatatgccaatttgtggtgaaaattttcctatatttagatgggtaatattctatactattgtttcatataaaaattggcctaaggaaatacagtagggacacagataaataatccaatctacagtattccatttgatttcattttgttagtggcataattttttaaaattatttacacttgtctgatttttagtggcaaaaaatcccaaaataattttaactaaatagtgacaaaaaaaactgccaaaatagtggcgaaaaagttccaaatttaggggaaaaacaaaataaagaataattttttgtgattcacgtcaaaatatgatcatttgggccgggaatttagtcgagaagcgaagcctaaaaaaaagaaacgcaattaaatttttgaatcttttaattatttattggctgacccgtcgccgatttcacgctcattattaattcgaatgttaatttgattgcactgatcacgaattcgccaatcgtccgcttcatcctcccattttgtccatttgctttcatctcgcacaattgggcaacggatcagcagaaaacgattgcttttcttaatccttttcaatgcaaattgttcacgagtaaattcgttggtcagatcaaatggcacaatggaatcagcaaaagacggcggaaagggaatgacaacaatgaaattggcaggagatgaagccgaggaaaaagcctaaaatattaaaaaattgattaaaaaaaagtactaataagtcaattcgaagcaccgcttttaaggcttcaatattcgaagccaaatttccatcatcaatgtgcaaccaacatctcaacacctttggcacattgttttgaagcggagtaaaaagccattttgccaccgcttgtccattcgatgccatggcactgtcatcgcatggaaaatcggtgaagaattcgtcaaaataggaggagacaacgcgaagcgatggacaatcgttgagaattgacgggaccaattttcgcaaacgatagaaaatattcgtgaacaatcctatcccacaaatgttattcccgatcattggccaaatgttgcgcaaaatgaacaacaaaatacgaacattgttcgtatggatggccaaattaattggacaatttgaggcgaaaagttggcgaaaacggtggagaaaagcgatggcattttggtcgataaaactaaaaatacataaatgggaaaatgctgccaaattttttgcttttacaggatctggatgcatttgaatccggtgactttgcgtggcatttgaatttgcggaattggcaatggttttccatcggaattgacaatttccatttccttggtgccattttctccaattttgctttgaatttgaatatttcctaatgtccatttgcgcgtcttgaagtgttcgtccacgtaaa

SEQ ID NO: 13417 - DNA, 1177 bp, Heterodera glycines
ttccgtcgaccaatgcgttttcaaatttctataaaataaaagacgaggccattataccttttttttctaaatgccctttaaattttgtgagtccattaattaaccaccctcgtaacatctcaccccatattttatgttttttaaaaatggaattagaataacataccgcgaggagctcttcgatgtcgactttggcagccattttcaaaattatgtacaaaatgaaattcaattaaaaaagaggagtaaaaagaaaaatattcggctctaatgttaaaagaaagataaaatttgggaaataagtgggatattagtctccagacataaaacatgaataaaagattaataaactgaaaagttaaacaaaaattgctctcgggacttaggcatcacgggacccacgaaacagcaaaatcttggaacggaagaaaaatcatatggccaaaaccaaaaaaaatataaaatcactttcgtaggttttcataagcgctgatttctaagattttgtattgcttttttaagggtccgaaattttagaaattaaaatttaatactgtaattttaaaaaggcttttttttacatgcagtaaaatccttatgcacaatgctagtgctacctatctgcagctgaagattttttggtaatactgtagatgatcccctcatttttcaaaaaaaaatcgaaagaacagggggttttcggggtagctgatcatgaatccgacatctatttcaccaaattccgaaccccggaccccaactctaacaaaatcgaaaatcaaaaattttcgaattttacttttatgttcgaatctgcataggatgattcatttttgatgttgctatgggttatgactaaatttagcttgttttaatcaattctagaacacaaattagaccggcgggtcgggattcgaaatttgtcgaaatgagtgtcaattcgtgatcagcgacccccccccccccaacgaaaagccaagaaaaggtgtttgtacggctattttttaaatttttaattgctacttgagaaaattttaagatagttaacaaataaaaagatttaatcaaatagtattccccataatgtaatgataaaaatggtaaatgtttatctgagctcccaaactaaaaaacacccaaaactacttttataggttttatgcgctgaaaacggtag

SEQ ID NO: 13418 - DNA, 1131 bp, Heterodera glycines
tcctgaccttttaaaagggtcaaatccagccttttttggtatcattcgacagctcttgatgagttaaaacgactaaaccatcaaaaaaaaattgcgcggcaaagcaaataaacaggtttttgaaccgatttaaatcacgaaaaaatggacaaaatttacgcaaaagtgaacacgcgaagacggagcaagtagtgaggcgagactccagaaggaatccgcgcgtgacgtactcgagtgtgcacttgtttttagcgtaacaatttttaaatacatatttaaagtattttagaattttcttcgggtttcgtactgttcagaaaccaaaacacccctagaaacatgttataagaattttcagaaaaaaatatgatcgcctttttgttggtttagtcgtattcagcacctaagataacctaaaaaagcttttatgcagttttgagtctgagacctatgatcagggctcccagatctgaggctttagcctcattttgtggttttttgataggtcaatgaggctaaattttcaaaatgaggctttaaggttttttgtggttttttgagaaattttgaggatttttgatgttttgggggaaaattcgtcagattttttaaattttgattaattttgataagttggcataatgtttggcaattaaaaaaattttttaaatgaaaatatgctaaaaatatggtcaaaattcttaatttttcccccggcggcgcctatcggcaccgccggactgtaaaaatccttaatttacaaacaaaaatttgctcaacatcgcaaaatttggtcatttttcggacaaaatctgttaacaaatcgcattgaaaattacaaaatttttcccggcggcgcctatcggcaccgccggccctccttgcgcccaaaagttttttgggaaaagcgccgcaaaaaaatcaacttcgtttttcatgttcagaatcccaaaaaatgcttatttctaacaaaaaattgctcaaattgatcatggaaaatcaaaaatataaaatttgaacattttaaacgtgttttgaataaattttgtaaaaatgaggctttttgacccaaaagcaggcttttttgcctgccaaatgaggctcttgaaaattttgatctgggagccctgc

SEQ ID NO: 13419 - DNA, 1413 bp, Heterodera glycines
gccggcatttcggaaaatgatcgacacctgctggatggaagttgctgaagaatacgccgaattggggcactttcgattaaaggacaaaacagtgaagcaattgagaggggatatttggcaaaaaaagaaggaagcggcattaaaaaatatgatttttcacaaaagacaggcacgggagcaacaaaatttgaagaggtcttgaccgaagcaaactaatttaaactaggcatttaagtgggagctcgtaattttgtgttgcaagaaataacagataatgcatggtttgtggtagaaattgattgtaatttgattccaattttaagaataagtaattcaatttggcggggagttagacgaaatcgttgttgaaattcatttgtcgttagatttgaatattcaacggggtcattaaatgagtaatgccggcgatgattgaattcgtcggcggaagaattctcttcgggatcagattcaagatttacgaactcatattccatattttataatttgaggaaggaaattcggaagatttaatgaaatatttggtacttatacagtttgacccacataaaattttttgcttttaatgataaaaagtgtttccaggggttttcggggccgctgatcatgaatatgaactctatttgacgaatttccggacccctaacccggaattcaaacattcttgaaaagaccaagcattaatgccaattttatttgtttttttgatgaattacgtggcatcagtgcttggtctgaatcaatatattatgagcatcacaccggagaatcatggagcacatattttggtacatttaacaccactttggaaaaaaaaatttcaaaaaaatgttcgagtttagggttaggggttcgggaattcgacgagtacagttcatattcattatcagcggccccgaaaacccttggaaacacgtttttattattaaaaacaaataaaaaatttatgtgggtcaaactgtattagtacccccggccgggctctagcattcactatactatatccaaaaatagactcaaaacagagaaattttgcaggagccacaaattctaaattccgctttttcttttttattttcacatgtctttgctacccaaatcagtgtttggatgacgcgattatagaagaggcggaacgggcttttaggtaattaatccattgcaaattgaggaaaaaaaaattatatttttgtttttcccgtttatgcatttggcggaggattttgccacgcggaacattcccgagtttgacatcagccaatcctacgggtaccaacccgatgataatatttttgcaaataaatggggtttggtggctttaacgaaatttatccatttacaaagatgatttaatagagatttcaatgaattatgaactttgttgcactcaaa

SEQ ID NO: 13420 - DNA, 4143 bp, Heterodera glycines
  unsure (1)..(4143): unsure at all n locations
ttttaaaaattaatattttntgggcttttcaaggtcactgatcatcatcaatatggcgtttgttttgacatctgctgatacctggtcatagactggacaaaatatctgtgattttttaaaatattttggggagggaggggtagcaaaacaacgaagtacccccagtgttaagcattttgttaagcgaatgtttaaagatttggtcgctggcagcacattttatccgattactataatgtaacggtcacgggattatgtgaaaaggccttaagaaagtccatttatctgcaacacaacaatttgtaacaactctttgctggattcaaaaacctgcgggacaagacccattgaaaatttattcaaaaaactaattttcgaacgcccatatcttttttctaactcatccaatcggttagcatttgcttagaaaaagcttcttctcatcaattgctttcgaatgataccaaaattttcaaattgctgccaatttccaaaaactcttacaagagctcattttcgggatggtgtgttatgtgaaatatcacaccacttaacacaaatttaatgctttttggttcaaaaattttattaagtatatggcatagtgtttatttttattttttttatttcagtgacgaaacatcagggagccttacgagttggcatagcacgagttatgtatgattttccattttaatcgtttagatagtttgactttttcataactagggatggtaaaaatatggatataaaatcgcgaaatatggacataaaatggtaaaaatctcaaaatatggacataaaatggcaaaaatatggacataaatttttctaaattgaggggtaaattttcaaaaaaacccgaccaaaaaaacgaaattttccattttttgcttatctttcacataaattaaccaatttttaagaaaatttaaatttaatcaatttttttgacaaaattttgctaaaaaatgtctttttcggaaaattttccggtctttggggttaaaacggcaaatttagctgatgggggccgttctaataggggtttttttgggaaaatgccaaaatatggacataaatcgcaaaatatggaaaatatggatatagaaatccatcttaaaagcttcaaaccaagctaaaaacatgtttttcgtgcgtttcaggcctcccacattccaggaaaaaaatatggatttccatataattaccatccctaatcataacgtttgccaattttcaaaatttgaaaagggcggatttaacctttacaaatgaaaaattccatccctagtcatcattttgcaaaatattctcctctttggtggtcctcttatgtgcgttccctttttcttcctcttccaatcggtcattttatgccaaaatgtttccgccccttccgtttttgtcaatgggttttcgcctcccattggcacattgtccaaccccatttaaggcaaaaaaattcaaaaattgttttaataaaatgtgattttcgtgtttctttcatcaagtactatccgtaaaaaataggaaaaatctaaaaaaatcagggctctctctattcatatacaaaaaatattcaccaattcccttttcatgactataaaaatcttttgttttccgctttgactgtttccaacgcaattaattattctgctcttttgtttgacatcattcggaactcgtccaaaattgtgctaattgcaaaaaaatgaaacgacggtaatgaattttaaaagtcacaaattcgtcgtttatttgactaaactgttttcccatttcagttggatttgcaacgacgtttggatggacattttcccatcctttgaccgtcctcaacttggcctcaaattggcacttctttcgccacgtttcgatgcgttggtggacaaacatttcgatggcaaaagcgaattgacaatttggagaactatcgaaattcgtcgcaaggacaaaggaccagaaccgaaactgtctgtacagatggatgacaaatttgtgccatttccattgcccgaccgtccgttgcccagcaaaatccgttttaaatggcttcggattgggtaaatcaaaatcagagagctatgacaataaaagcatttatcccatttttaggtacatcgatcactccgtcatcgcttttcttcgttcaaatcaccaaattttcgacaaaagaggcaccaatttatatttgtggctttcatcaccacacaacacggatggccagcagctgatttgggacatttttgttcgtgaaatttggccaattttttctgaaaacattcgccacttgcgcttttacgatggtgatcatttggaccatttgcttcgtcaaatttcgccgacaattctcatcgatctcaaccaattgaattcaatccattcatatggtctgtcgccctctgcgtttggtgatggttttgatgggccaaattcaacaatttctgctggccaagcattgtccaaatggttgcactctccgagaaaagatggccaacccaagcgattgcgttgcggtaattacaacgaacaaacggacttagattggatcaacaatttcaaggaggtgtggccataatctcgacaaatcactgttttttgttttcaaattgtttagcattttctccgtgccaatgccatttcttccgtcagttaccaaattcatttttatgttcatgtgccgtcaatacaaatggtgccatttgaattggtgaacgaatgcacaaaggaaaagctgacattggccaaagcaaatgaaaatgaattggacaattggataatgaaacgatgcaaaattattggggagaccgcgacggtttattggaaagacggaaattgggacaacagttgtaacaatgtgtacttttggctttttagtgccaataattgcattgggtgagcaataaaaaggggatttgtttttatacatatccaaatttgcgatttgcgcctaattaaggccattgtctccgccaccagcagaagaagtggaagaggaagccggacaatgcatcacaaaagggccaaatgagtgacggacaaaacaacaaaaacagtgatcagccgcagaagaagaagaaatgaattaattaagaatgaccgatcgatcataattcaaatcagtgatcaaatgcaattttatgaagaagaacctctcaaatcctatataaataaatcggatatataaaaatggcaaaaacgtggactctgttgcagttaacgttttttctttgcacccaaatccaacaatcttggtgtcattcgaaagctcgtaacatgctttattagccttacaaaaagcaacaaaattttcaagcctggaaaaaatgtattaagaaaaaacttcaaaatttttgttaagctttcgaatgatatcaacaatgttggatttagatgactcagaaaaaacgtttagtggaaaaacgagctggcgccgaaacgaagtggaccccatttcacggtcctaataagtttcaaaaatgggtttaagtgcaaaaaaaactccaacattgtataaaaatggcttgctatctatcgaatgtatgaatttctccttgaaaattgtggcaattaattttcgggattttgacgcgggatttacgacacacaaaattagcaattagcaccggcaacattaagtgccgatttgctgctgttcttttctcttttcagcttcattctctcctcctttttgcgccgaatttttccttttcctctctttctcttccgtctctcctccttccccaatgctatttccctcctcttcccttgtttctccatttttgctgttgtccatcttcatctcgtttcccatcaaaatttgctgttcttgttgtactgcttgaacttcttggttttgctgctgttgttgggtaatcatcggttttactggtcccataaaaaaagaggtaaaaaagagattttgagcgattttgaggtgctcttgggggtttagggggtgatgaacacgaatatcacatccatatcgaacccgaaccctaattcgaacaaaagtcgaaaattcatttttcaccctaattcaccttgatgcccaaaaacgattcaaatgcatagaatggccatgaatcccctattttctattcatttcagtctaatagaatcgctttttgggcaataaag

SEQ ID NO: 13421 - DNA, 1170 bp, Heterodera glycines
gggggggggggccgaaggcccccctcgaggccgcgaagcggccgagtgagtaccatgggcgcaggaaaattattaaggaggagggttcattatttattgatttttgcaaaattaattcataaattttttttcagaaactgctctgaacgcgatccaaaatttatttacaagttgaataaggcactctgactcttatattatcaaaaaaggagatgaataaatattttaaaaatttttaattcctttttaaacaggccaaaaagtttaggcttaacttttttttcagaaacttatcagaagcgccccaaactttgcagggatactgaaaggaaaagaattaacctgttttatcacattagcttgtcatcagttgttataaaaatttcaaaatgctgagtcttctatttttatttttgcaaaattaattcatattaattttttcagaaagtgttctgaaacgcaccaatttttttttacatgttaacaaggtcctcttaggtttatattatgaataagggtgaagaataaaaatttttctaaatgttttccttatatgttggttatttcgttcaactttcggtggggtgcttggaaaagtggaatcatgcgtacccgtccgatctgacaagttaagcaacgctggctgactattcaaaaggatgggcgccgtgatgaaacgaaaccagcactgcttaccccgcggcacccggcacggacccctgaaggaatggatttaattaaattctctccttcggggaattttttccattaggtcgtctgttagcgtttgattgctctagtcaatttttcaaattttttgtgaaatatttgtcgtgctctgaagggcggggggggggcagggccgaaggccccgcgggggtgggccgaaggacccctcgaggccgcgaagcggccgagtgagtaccatgggcgcaggaaaattattaaggaggagggttcattatttattgatttttgcaaaattaattttttattattttttgtgaaacttatcagaagcgccccaaactatgcagggatactgaaaggaaaagaattaacctgttttatcacattatcttgacatcactttttataaaagattttcaaatttctgagacttctattatattattttttttttcaaaattttgaagggcggcggggggg

SEQ ID NO: 13422 - DNA, 2865 bp, Heterodera glycines
ataccagagtcaaatgaatcagggcctgccccaattcttgaatatggaaacaatgttaatcgggtggaaggcacaaggtcatcaaattttgaaaatgtaaagccgacaatatcaaataattctggcctaggcacccgaaatcagcctcaatcaaaaaactttctaaaacaaaattgtttggtgatccaagaagaggatgtgtaccgagaaaatgcgttttttggaaaaattgactcggatcttgagatagaaaattttgttgagcatttaaagaaaaacgtggacgaaaacctaaaagtggaaattcccaaagtgggaaaagttatggtaatcaaagttgaagtccttggcgaaaggacgaaagcaatgcttgacggaggtgcccaaatttcggtaatcgatgcagcatttttgtataagctgatgaaaaacaaaaatttgaacccaaatgatttgcgagttgccaaatcggagacacgaatttctgatgctaatgggaatccattagcctgtctaggtgttgtatgccttccgattttgagaaatgattgcactaaggaagtgcaagttgctttgcatatcgctcaggcaccaattgggtttgatctgttgtttggaacgaatgctttgagttctttgggttttaaactttttgatgacacaacgaacacaaaaatcaattttgaggaagtccagctacgcaagtcggactctctgactgtcatataccagacaattttggccccaaaatcaactcaaatagttgaattgggcattaaggaagagtttgaaggcaaagacctttttctctggtctgaaggccaccaaaattttcgaattgagccaacagttggaattggaaaggacgggaaagtcattgttctgatgacaaattttacgagtctgtcaatcaaattggaaccagggaattccatcgggaaaaatgaagtcgtgaatcatgtcgaagaatgcgaaaatttcctttcagcttcgaacgaatgcttcagaattaattgtgttgcaactgatgaccagaatgtgtcaatcgacaaaattttgattgaaattctggaaaaagggacatttccagattcggaaaaacaaaatctgttggaattgctttcgcaattcaagaatattttcgctgtttccgattcgcagttaacccaaacaacccttgttcagcatgaaattgagacaggaattgcagcaccagtgagatcgaaaatgagaccagtgccttacgcatatagagaaaaattggccgaaatgttgaaagattatttggaacgggatttaattcgtccttcatattccccatgggccagcccaatcgttatcgtaccaaagcgcgatgggtcactccgtttttgtgttgattaccgtgccgtaaattcggtgacacgaaaagatagtttcccatttccaaacatagacaatactcttttgttactgggaggcaaaaaattttttacaacgcttgattttatgtcaggctattggcaaattcggatgaaacctgaatcaattgaaaaaacggcgttcgtaactgaatttgggctccacgagtttgtggtaatgccattcggtttatcgaacgcagtggccacttttcagcgctttatgaatcgactttttgaaggaatgatcaataaatttctatttgtttatatcgatgatgtgttaattgcttccgaatcacttgagaaccatctcgaacacttgaaatgcgtttttgaacgtatacaaaaagcaggcttaaaactgaaactctcgaagtgccgtttttgtgtcgaagaattgccgtttttaggtcatacattgactagaaatggaattaaaatgaacgaagaaaaaatacaacctgtaaaaaatttaccagttccgaaaactaaaaaggaattgcagtcattattaggcttcttcacttattatcggaagtttatttactcatttgggaccattgcagcaccactttttcgtttgctcaagaaggagacaaatttgaaattggcgaattagaaaagagtgcaattgataaattgaaagaaaaaattttaagtgatgttgtactgtattttccaaattttgaggcagcgaaaaatgacccaatgaggaatttcattataatgacggacgcaagtaaaatcggtatttcggcaattctcagtcagcaggatgaaaaaggaagaatccgtccaatctattttgcctccaggcaatgtaacaaatttgagagccgttatgcaccaactgagctggaagcattggcaattcgatttggcgtcaaaaaatttgctcaatttgtaacaatgattcctacaagagtcataacagaccataaatcactgatcggaatgtttaagagtaaaaaggaaaccggaaatgctcgagttgacaaatggatccttgaattaaactcaaaattcattttgaaagttgaataccaaccagggaaaaagaatgtgattgcggatgttttgtcaagaacatttgagacaaaagagcgtgaaatgttaaaatttgctgctccagaagatgttgcattgattggaatgttgaaaattgcaggacaagaaacggagttaactgttgatgagaaaacggaatggactcgcgaaacaaaagaaagcgaaatgaaatttgtttatgattttttgagtcagagaattattcctgaagaccctcggcaacaaaaaagtctaattggacttgggatgagcgactttcatatgctgtgtttgcatacaatataacaccatcaaacgtcacaggattttcgccattctcgttaatgtttgggaaacatgccaactttccgttggatgaagccattcggttttccgttaacccggtctatacaat

SEQ ID NO: 13423 - DNA, 1787 bp, Heterodera glycines
tgccaacttttaagtgcataattatcattgccaaaaatggccaaattacgcactgaatccactcattaacttcgcctatgtccccccttaagctgctcaccatcgttgtgctcgttctattggacccctcctacgtcactgcgtacatttccatcaactatgaggtgcaagccagggatgggccgaggtttcgcttttcgcatttcgcctttcgcattattcgcattttttggcgtttcgcatttcgcttttcgcatttcgctttttggcgcgaaaagcgacttttacacccctaagaattggattaaattcccataaaatttttcaaaattttacctataaattggctaattttcagtgaaaaactgtttataaatgatcaaaatttccaatttttttccccagcggcgcctatcggcaccgccgcgcccccaaaactcctatttttcttagaaaatggcccaaaatcgcaaaatttggtaatttgatgaaaaactgttctcagcggcgcgccaaaactcttatttctcattagaaaaatgatacaaaaatcacaaaatttgatgattttttggtgaaaatctgtcaacaaattttaatcaaattttcaaaaattttcccggcggcgcctgccggcgccgcctgccggcgccgcctgccccctcttcccaaaaagtttttttggaaaaagcgcgcctcaaaaaagcgttttattgatttttaaatttttataaaattttaaaaaatgatttttgctttatgattttaactattaaaaatttgtagaaaaaatttcgcttttcgcatttcgcttttcgcattttcgcatattttggcttttcgcatttcgctttttttttcatttcgcatttttcagtttcgcaaatttcgcttttcgcatttcgctttttatttttcaatttggcccatccctggtgcaagcattctctgatctaaaccattcattcattctacatacaaagcaaaattccatggcaacaattattggttcagatcgtgctcatctacatcatttgtgcacttaccctcctctattgcattgtttcggtacgtttgctaattttagacggcactcaaaaaaacactcgttttgatgcactttttgagctactttaaaaagatgatcaaaatttggcaaaaaggtgcaaattttcaaaaacccaaactaaggggggaggcaatgggaaaatgccttttgaaatatggcattgtctttttcacagatcatcatgtacgccattatgcagaaaagcgtgcgggaaggcgaagagcttcacctgaccaactgtgccctctccgtgcgcttttttccgcccctttaaaaatgaaaaatttccatgccatttaattccgtattttttttttcaggagattgtcttcgctggcgccggaatgatttgctgggttggtatttggcattagtcggggggggggggtggcaaagctcatgaaatgaagtctggttatctggcacattacacctagtaagtttgaaactttgaattttgctcccattttccgatgctcgtctgtggcatcggtggcactgtcgcgcaacggacaatcattgaggcaagttgacgaacggctcacacagaataaaaccagcgctggtttaacctgctgctgatgttgtttggcactaaattcccccaaagttcgagagggtcggcttcacacataaaaagggggcggggcgtcaaccgaaatttttgcgaaagggtcggccaaacaaatcgacgaccgttttatttattttttgcttt

SEQ ID NO: 13424 - DNA, 1879 bp, Heterodera glycines
cccatcccctcgcttcaaaagggtcccccattttgggcactttgcgagaggggggggggggcggggtcgacccgtctactcttttcatgtattctcggcacttgcatttcatgatatttggttccatttccattgctctttaatttcagaccggtcaatacttcggctggctcggggtcagttcagttctgtgtggtggtcactgatcagtgatgcttcccgttttgttgatctctcattgcctttcaaggcgtgtgccggcatcatcgtctgcctcttcatgggcgtggtgagtagtaaaatggtgcccagatttggtgtttaactgatctgatctggttcattcggaccgcaccaaaataataagtgatcggaatgggaaagcgagcagtcaatgctaatcagaaaatcgatttaaatgtgctttttcaatcaataaattcaatttttaagttggccgtttttgcgctggacattctcacgaacaaaattttgtcgccaacccgaaagtatcgctacagtacgccgcaaatgtgagagggggaatacgatgcaacgcgaacaaccatctccagctacagtacacacacataccaaataccaatacaaatttctcatttaccatttgctttttgtctcctgccaacttttgagtgtaagcaaaataaagagaatcaaaaaaaacatatgctcgtcccacaacaaattcaactgttcattttggcgcgtgtttttttttgttcaaaatgggaatgattggcattttgtttctacgtgtttctctgattgtctcttctgccctctgcgttcccttcactctctctcactctatccatgttctgcttctgtgacgatcattccactctctttcattgatcactttctgccgaacctcagatactcgtgtttccgctttccaaaacggagatactgaaatgtggattggtatgatcgatctgccatgatcagacaagctcctgtggatcttagttgcatggcccaatcaatcaccgatcaggactcgactagttaggtaagcaagtctaatcagtttcggtcactatattccctcctttttaaacatttatcatcatccttgattgcttgaactattctgtttttttgtaatcattggacccactttttctaagcaattattgatcagttgcaatcactttagctaatctggcaatttccgatcactctatccaacatggcattttcttgtcactgaatcccccaattctgatcacttatcagctcatcatcactcacctcgtgtttcctcttctctcggcctgcttccgctacaacaaatttgcccattcctgtaaatttgccaaattagatccccaaaaaacaaatcattgaacgactcgccttggctgacggccaatcggccaatgccttcgttgaccagaatgcccagttgggcgagcagtgccgaactctcgtacagctggcacaacaacatcctttcttcgtcccctgcggccaactgaaatgccaaaaaatatatttagccattaaattttcgattttaatcaattgctttttcatacgattttctcaactaggccgagaagcaaggacaaatatcgaaaaagctcatcatcgttttcttattccaagccgcttttccgtttttatctccgggatatgaaacagttaattccggaactcggggacatttaaagataaaatggcattttctccgataacatatggcaaaaccagctcgaccgaatcgggataaatccgagagtccaaattttctttgcccgttaacccctcccccctcgatcccacctgtgcacaatcggattggccaaattgctgctgctggtcagcgggatggccactttctgcaaaaggacag

SEQ ID NO: 13425 - DNA, 2143 bp, Heterodera glycines
  unsure (1)..(2143): unsure at all n locations
tgcacaaagaccgaccgacgaccgactttttgctgcatttctgacacatttcccccccccccccccaaatttcacgcgatggaagcgaaaggggggggggaggaaaagccattttcataagctaaaataggggagggaggtgaccaaatagaaaagggagggagcagcagagggaaatttgagttacacacatatttttgaaaagcaattttgccaataaccttttaggaaaaggaaaacctcgggagcaatgcacaaagcccctccccccccaaatttaaggggaaacaatttttaataatttaaatttaaaaaattaattagaagttccaattgtttttattttttgtttgtttttgctcgttttaatcgttcttttttcgtttaattatcacttcatatttcacttctctttctctccatatttcattcattttgattagaaaaatgtgtacaaagttttatcaaagttaaagtccatttccatttttgataaaagtttttgattgacggggaaaaacaattaattccccttttgtccgcaattgaaattcattttctaatcgcacacagaattaaatgatgatgatatgataataataataatacggcatccatttaattttcttctccaatatattttattattctttcaatttaaattatgcataattttcaattattattttttgcttttctttctttaattttccataaatttaaattaatattttttattttgttattttttattttgcagcaaatttatgtaaaataatctcagctatttcctattattttccaaaatttttcataattattgccataaatattttgtctaaaaagtgtccaattatttattaatcattatttttttctgttatttgtttaaaattaaagatttcaaaaaacatttggcccatttcccaatatttttctgatcagttttttgtcgacccaaatggaatcagcgggcgaaacaattctgtccgtgccaccgttactccatctgttggctatccaacagcagcaaaaacagaagcagcagcagaacaacgggtgggtgattgatcagtgatcagtgaatgtttaaaaataattatttaaaaatatgatataaattgcagaaataatgccgacacgaacaatgccacgaacgaaatgactttgtcttcatcggatggcaatgtaaattaatcagaaaagtgtcaacaaatctgtaacagccatttttggacactaaattccttttttaattgccctaatttttatttgattttttcgttaaaattatttctatagattgacttcaaaaatgattgtaaaagcacttttgnggtctgaaatntaatcgaaacgtgacccattgaaatataaaatgtagtaataaatcaaatattttcaactttgttagttctgtattgctgaacagcaaatgcaaatcggcaccaatggcagcgaaagtgccgaagagagcggcgcatcggacggggaaaacggaagtggagaaaagcggagggaagaggaggatgaaaagcagcaggggaaggtgagcatgggaagaagcatcaccaaataattccactcttttttgcaactatttttatttaattttgccaaatattttaaaagactcggcatcgcccctattttggcatttgcgaaactaaaaatacgtgctaacatttgatagtctaatgcagccaaactaaactaataactctgcccgcctgaaaggataagatttgaacatggaccgaagtttatcctctagcctaataagtcaaaaatcatcccttcagttttaagtggtttttgccattttaatttgctatttttaacaaacaaattttttgtatttgtcctttttatgttcaaaaatcagttatttttatgtttaaaattgttttatttacatctatttgtataatgtttatgaattttgcacgaaaatagaatttttgcaaaaaaaaattatcaaattatatataattatgcttaaatttgcatccggcttaagcattttgcacatgcaaatgaagcccatccaaataatgcattaaatttataaaaataacaataatagcaatggaaaaaacatacgtaagcagcccaaantgttacaaantataatgtatattgc

SEQ ID NO: 13426 - DNA, 3588 bp, Heterodera glycines
  unsure (1)..(3588): unsure at all n locations
gggaaaacggaagcgggagaaaagcgangggaagaggaggatgaaaagcagcaggggaaggtgagcatgggagaagcatcaccaaataattccactctttctgcaactatttttatttattttgccaaatattttaaaagactcggcatcgcccctattttggcatttgcgaaactaaaaatacgtgctaacatttgatagtctaattcagccaaactaaactaataactctgcccgcctgaaaggataagatttgaacatggaccgatgtttatcctctagcctaataagtcaaaaatcatcccttcggttttaagtgttttttgccattttaaatttgctatttttaacaaacaaattttttgtatttgtcctttttatgttcaaaaatcagtatttttatgtttaaaattgttttatttacatctatttgtataatgtttatgaattttgcacgaaaatagaatttttgcaaaaaaaaaattacttccaaattatatataattatgcttaaatttgcatccgggttaagcattttgcacatgcaaatgaagcccatccaaataatgcattaaatttataaaaataacaataataacaatggaaaaaatatacgtaagcagcccaaatgttacaaatataatgtatattgcagcccatcaattttttaacttattttttagcatttttatcaaaataaaataaaaaaatttacaaattttattttagcttgaaattgtcgaagagtccgctactcctcctccgctgtttcgacaacaaacactgcaattcgctgaagagatgatggacgtgaaaatcgaatcgccgcgaggtaaaatttgaaaaaaaaaaattcaaaattacggtttttaatttaattttagatttgcacattcaaatccctccgttaaatgcattcaatgggtacggcactccgtcgatggctcagagtgccgcatccactcctaccgaacaacagtgtgagggacagggagatggggggggggcggaggtattagtggttaattaatggtccgtcagttttgggaccactggttcgatccttaattttaaatgatcataaatttcagctaacaaaccgttgccggtgatcaagcccccgggggatgagaaggaggaacggccctcactgagctacaaggacctgatcatcgaggccatcgaaagcagtcccgaacgacgcctcaaactcagcgaaatttatcaggtcgagtaaattaataaaattattatatttcaataactttttggatttcctttgcaggtgatcaaatatctccacccgtactaccaacgtcggtccgatcaatggggctggcagaactcaatccggcataatctgagccttcacgactgtttcgtgaagcttccgctgaagcagaccagcgcaaacggagttgtcggtaataattaagcatttcaactaatttcgtgatttttaaagcgggaaaaatatttacaggacacttttggacggtggtcactcgtgggccggacgagaagccattgggtccaactcggcgtcgaacccgcggcagcggaaaggccaaaaagggaacgatggcctcgatgccattcaatgggtcacaaaatggtgaaaaaacaaataaatttaacacaataaataatattttcaaacaattttcaggcggaactgcttcaaatacgctttctggcatcaaacacggcacaatcaaagggctgaagggccgccaaagtgttaggtgaggaggcctcatattcattgtcagccacaaaatgcttaaaatacgaatataaatacagctccgacagtggcatcatgagcgacgagggcggcgcgtgcagtcactccaactcgccaaccgaaatgggcacgcgcagtgtgccattgctgcacgcgaacgccgaggcggtggcaccggcacgcgctgcacagttttcggcaaatgttaatcaccaacaaattatgccaaataatcaatccttttaatctttgcagcttttccaattccctcgacccaccgctcaaatgccgacacttgcgcagcaccaccaccaggtccaagcagttcattcgcccgccccaacccccgcgggccatggccacgcgcagagtcagctgagtccgctcgaattggtcctccaaatgcagcaccaacacaaccagcaacaacaactccagcaacagcaacaacaactccagcaacagcaacaacaaaaccttcatccgttcgcttctctccagcaattttccccaattcccaaatcggattctgttgccgcaggcgttgctgacgaagtgaacagcgcaccggctgctgcttcaacaccgacactgatcatggtgagggagggatgaaaagggaagggaaggtaattttatttaatgtttagccgaacgatgccatcggtggtgccgccgccaataacaacgcttttttaccttgcgaattgcaacaactattggcaattgcggcacttactcagcaacatcaccaaccgcaacagcaacaacccatggttccggtgtctgcggccaacggcaccaacaccaacaacaacagcaacaacaatttgccatcatttcactcactgccaccgccagcggcgccggatcataatacgatgacggtataaattaatatagaaaatgagttaaaaattattaaatcaatttttaatatataaaatgaataaaattattaaaatgattcagttgcttcaactgctcaacacggctggcacaagcagtggcacgccaccatcggatggaggacttggccttctgagcaatttggccacccaattggcaccagcggtcagtccggcgccaccacaggtgatcagcaaagacatgatttttagcaaaaaactacaaaaaccttaaattaaaatcaaattaattgaaagaaaatgtttagcatccgaacaacgtcgccgtcggcaacaatttgttggcatcggccgccgctgccgcaacggcggaattgcaacgtttgcacatgatacaattgtacgcacaacagcaacaacaacaggtggaaagcttagaaaaagcatttaaaggagtgaaactgattatgaaaaataaatcaaaataataataataataataataaaaatttcagcttcagcaacaattggccgctttgttggagcagcaacagcagcagcagcagttgcattttcagcaacgggtgagaaagcaacatttaaagcacgataattaaaacaaatccatacaaatataaattgttttaaaaattaaaaattccgggattaactttttttttctctttttttctaacaaataaatgatatcggaacaaaaaaacattaaattggttgacaatgacaaaaggctttatccggaaatatttcgattttttctgacttcatttttttaaatcagcctaaaatccacaaattaaccatttttgtgaaattgttaagaaaatatgtcaaaactttcatgccactaaaaagaacacataaactttttttttgaatgaaaatgattgcttttttcaggaaacggtaaaccccgcggccacggcactgtccgacgtgttgtccggtgctgcc

SEQ ID NO: 13427 - DNA, 3780 bp, Heterodera glycines
ccctcttcgcttttccctcctccgtttccccctttcctttcctcgccattcgttttgctgtgcttcttcttctctgcccccgctgtttcccccgtcttttgccacttttgtccgtccttcgcttcactaaattatgattatattattggtttggtctaacagtggcttttgtcttgccggcttcgaccacgggtattcgcacattcgacccgcaaatctgtcgcacgcattgccattgtttggctgtcatgtcggcaaatagcaccgtgtccgccatcagaactcctcggctgatcagtttgccgttgctgttgctcttcttcctgatcagcaacagtcggtcccttcccccacattcttccctcgggcatttgtaacttaaagcatcgcttttccgtgccgttctcccctccctctcctctcacatgtcgtactgctgttgctcttcctgttggtgttccccattcttattatggttggtctgcagttgagcatggcattggctgccctttgacgctctgttcgtcctgatttgcatctgaattcgatcactgtccgtgtgcagccttccgttcgtctctgtgcttttccttttccatgcttttcgtaatgttagctttgctctgtcgccactctccgtcgatgccttatgacagcccagcaaagtcgacctcatcgccgtcactttgcttctcgtgaacagtttgtcctcctcgcattcgcctgacaaaatgctttcgcccgcgtacaaattgccgcccattccctaaaattcaaatggtcgccaattcctttctccgtcactttcggcaaactgacgaagaaaagcacgagtttgtccatcttcacatgtgccaccagtgtttcgatgcgtgcctttcctcccatcgcttttccgtctttgccaatccttcgccgcttcactgcgcattccttgaacaccttgaacttgtccttgccctgcgcgagctctttgcgctcgtcttttgccttcctccgccatcggatcgcttcctccaccacggggactgactcttccgcgcactctctcctcacacattccaattgttccgcgctcacttccgccaccgtcacttcgttcactaacattttgcccacataaacaaatgagtaagactttgcttttggttcgtgctttttgttgaccaaaagcagcgcacttttgccatcgcaagcatcttcagggcattcgaaactgacaaattaattaattcattgaaaaggcaaaagaaaaagcaaaatcagaaacgcacagttcgtaattcccggcgaagcactgctcgtaatccatttgctttttgcttgttaaatccacttaaattaactaattattttctcctcccaccaaaaatgcttttcttccaatgctttaaactgatgggaatatttattttattttcgaaacacttccctttttcatttagaaaataataattaaatggtccctcttaaatatataaattttcaaattgtttactcatttttacataattacccccccccccccctcttttcgtacaatctttgccattcactgtcaatttgccgtttttgcattgctccacgggtgccccttctctgatttggggtgtcattctcgacgtcgctgcgaattccttgtcctctttgcacaattcgctcagttcgctgtctcccgtgtacaaattccctcccaatccctcaaaatttggaatttaaaagactcaaagccaacaattaacaaacaaaaagaatcatccgattgttctccattttggcatgcgaaacgactgtctccggcccatggcgaccttttggcgcgcggacggcacattcgatgaacaatttattttctcgacttgggccgggagcaaaaacggtgggcagaaaaagtagcagaaaagagggaaaaagcatagaaaaggtaaaaatgggatgaaaagcaaatggaaatggcacgaggaaaacgaaagggacggtatttgaaggggaaagtgagtggcgagcagctgagcaagcaaaggcacactttgcattggagggtaaaataaaattttaaatagcgacgcatttggggggggggggggtaattaacgggggaattagcaattagcgaaagggcgaccatttattggacgaaatgaagaacaattcgctatcgaaacattcatcttcgtggtgagattgatcaattgggaataaataggcgaatgtttgggccaatcgcgatgcgcttttggctttgtgccattctttgccgctaatagcccggcgccgttctcggattcggacagtgcgcacacccgcccggcattccgtgctccccctgcattccctgcttcccggctgaacaagcgattcttttccttgcggcacaacccttggccaacttacgtgttccaactttgcctggcggcccgacttgtccgggttcgcccggcggtcctttcggcccgggcactccgttctttccggctattcccggcgctcctttctcgcccgataggccctttggccccggctttcccggcggcccaggcggacccggctggtctgacaaagtgccttgtgctcccggcactccctttgggccaggcattcccggccttccctgcaaatgacagtgcatttggatctaaattatatatcagaccgggggtccttgaggtccaggtgggcctggtgctcctcgtatgcccccatccgcgtccaaccccggcgtgcccggctctcctggctttccttttgggcctggcgctcctcggggtccaatggggccttaattgtacaattgggtgatcaattggacaaggtttgttcttgacttgcctggtgggcattcgaagcagaattcccttggcctcgcctcgcctttcgcatcttcccccggtgggccattgtctcccggaatcccatcgatgccgtcctgaaaatgttccgtgttcgctttccctttaacaaagtgccatccatcttcatcttcttgcctttccgtctttgccatcttccccgggtgatccgggtgctccgtatgcgcaaccacctgccaaatgcaaaaacgccacttcgtaggcccgtctttttccttttctcacatttctgtccgacagcacttgtcgactgcgtttcgtaattggcttctctgcccgttctgtgcttaatggtcgccgtgatggaattgctgtgctgagacgtcctggacaattcgcgccacagataagtcgaccgatgctaaaattggggagagaggggggagaggggtattgttccaagtatcacggacggaatgtggaaataggagctggacatgatcaagaatgtgatcatcctccgttttatgatctccccctaatcacccccccccccatggcactggcatttaccttacaatagtcggcctcgttttgaacgacggaatgggcttgttggatgtaattgtacacaaatggcacactgagtacacaaagcattgccgccaacacagaagcacttgaaatgggagatttgtttagagaaggctaatggcaagtgttacgcgatgccgaggatggtaattttgcgaagggattcgcactgcgctaacaatttctgccgcctttcctccacttccttttccctctcgagagggcacaaatcgcgcatttccggcggaaagtttaaaaaatatctaaaaattggaatataaaattaattaatggatatgggaatttatgcaaatgacataattaatgatgatcagaagtgaattgaagcagggggaataaaagtgtaaatttggag

SEQ ID NO: 13428 - DNA, 3082 bp, Heterodera glycines
cccaacattgtttcattggttgtgccaactctgggccgaaatgccgttgtcgctgcagtcgccgtctgcgaccggtcgccacaatcgccgccagtcgtggcgacggcgtcgatcaccgatgtgccattgtcgacgctgtgcgacgacagacgaatcgccgatgccgctgaacagtcaaacagcagcgatcggcgagcggtcgccgatggctgctgttgttgccgctgccgcggagatccgtcgatcagtgccgggaaagcggtgcgcggggagtccaatggcacagccgtgccgacgtacgcttcgtacatggacacaccggcgctgctggggacgtttgctgcaatagcagggaaatgagtggagttgtggaaggagttgtttgtaccgtatgttaccgtatcgcattaaaattgcgctaccgtgtgataccggtttctcgccctaacagcaatttttgtcctatcgtattctaccgtgtttcattagttacttattaaggaaaaagtaaccgtaacccaccaatttatacggtaactatcatgttgcaaatgagaaattgcaaaaatattaccaaatgaacaccgtacctgttaaatcaattcgcaaagctttaggctaccaatgaggttgttcaattcgttacagtaccaccatgaccacccacagtttcggtcccaaattgctaccgtactgctctaccgtaaccatctcaacttaccgttcgtgttgtttggcattgttctaccattttcatgaccatcaatacaattattgttgttgttttggttgttgttattattgggtccaatttgcccatttccaccgtaactgttgctgctgttgtccaaaccaccgtaatcgtaataatactgtttctgctgaccccgaccatcggacgatggcacattggcaattccttgaatagcaaattaaaaaaaataaatttcgtataagaattaattgctgtaaccgaataaaaatttggtacttttccgttttggggccacagattcaaatcggtgcaaattcctttggcctgaggactgaaaaaatcgtcatatggacccattcaatgatcttttggcccaaatggttgcctttatgactctcaaatagctaaagggctgtatttgaatattcatcccgctctttatttatgttatttttttaaaatttaaatgtgtggccccaaaacggaaaagtaccaaaaattttacgaaattgcaaaaaaaaaaaaaaaattaattttactatcataaactaaaaatgaaaagcataaaaactaatttttatattttttaaaaattcaaccaaaataaaatttttggaaattttccattgaaatccggcacttttccggggactgatttgttcgcgcgtaccaacaacaagcagctgtactcacttgtcggtggtgccgagtttgagtacatgccattgttgacaagcggcggcgcatgaactcgccctttcatatggtcatttccagcagcagaaacgggctgctggagcagctcaaaacggccaacagtaggacagctgctgggcgacaactcggtggcgggcgacgacggcacggactcgctacagtcgccagtcgcagcgctggtcgctgccggttgcgtcggtgggtaacggtcgccggtcgcctcctctaacgacgaggaggaggaggacggtcgccgatgctcgcgcacacggatcagcgtgttcgactttgggtcaaagctgatcagcgatgtgatgtggtgatgatgattattgttttggacgattgggccaaaattgatcagcgacgccatctgctggcgactgttgctgttgccgctggggtcgccggcggcgaccgctgggccagccgagcggcgaccgtccgtgccccgcagcagcgcaagtgcgttttggtgatgctgcgagatggacgacggcgagcaattcgagaggacagaggcggcgggtggagaaaaggagacctgttgatgtggaatttttttcgttttttttgcgctaccgtatccctcgaaatttgagacagtaatgcaattttttactattgcgtgaactactgtaaccataaaatagtacgatgcgataccgtaccagcacactactgctgatatgaacagcttctcagttttctaccgtaatgcccaattggctaccgtactacctaacaagcccacaaaaatgcgccgtactcgctgtcgacgctgaacagcatagtcaccggcgactccagcagaagcatcgcctggctcacaacaatcagcgcccggcgcaacagcacaaaatgttcgcattgaaccgcccctcctgtaattgttgttggtgtacggtaggcgatgctgcggtagttgctgcatgacaataccactacggtcgcctccgccgccaccgaacgagcggggcgaccgtggtgcggcggcggcgccgccagcagcagcgagaccggcgagcggtgtgtaaaaggacggagacggtcgccgccgactaccgtatgcgtattgtagcggcgcttgctggttgcgattatggtaattgttgatggcgccgctgccgttgctcgccatagttttattactgttgctggtgttgctaccttgataaaaaaaatacgttccgtctaccgtatccatcgaaataaggcgttttgaaaaattgaagaatttttaggatttataaaaattttaaattttttacattttttttgcgagggcgacaaaagaatggtggcacaattgaccaactgaagaagaacggcacgtcaattggaaaaaaataattgggaaatgaatgaatggaagggaaaggaaaagcatcaaagtgaggaatccaaatgtgaaattttagcttttttaaactcttttttgaatccgattaagctaagctttcaaaattagttttgaaatttttatctcctaattctgatggtcaaaaattgagcaaaagaaatgcaaaaagtcagaaaaaagaaacaataaacgtaccgaattgctgaaggcatttgcaggaacagaatgaccagggaaacatcggaaaaaggaatgatagaattgactaacaataaggagtagggctg

SEQ ID NO: 13429 - DNA, 2900 bp, Heterodera glycines
cagctgatcagcatgggctaatttccaatcagcaaaattttatgtttttttttaaatgtttaagggtgtccgagttttgagtccctctctattccattttagataataaatattttccttttgcaacgtacaatgtattaaacatgtactaaaaccttcaaatatgtactaaaaaatgtaaataagatttttaatggctatttttttggaaaaaaattcctcgtaatggtgaaacaggcacaaaatgccataaaatgacaactaaaaaggcttaaaaatcacattttagtatttgaaaaattaatttttgatatctcactttaaaaaaaaaccgatttttggggttattttcgtaaataaatttttttttttcacagaaaatttccataaattctcaaaactaccctctaatatgtaaaaaaaatgaaaatatgtacaaaaaaatccaaaatatatataaaaataaaaaaacacctcttaatatgtaaaaatatgtaaagaaaagtcccaacttttgttcgcaaaaacacaaaaaagaaagtgttttctactaattaggctatggagaagccaggaaaaaatatgtaattacataaaaaagaagccctgcaaatcaactaaaactggaaaatacggatatagaaatccatcctagaagcctaaaaccaagctaaaaatatgtttttcgtgcgtttcaggcccaccctaataaatatctgcaatagttccctgatttatttgataattaatgatttaatgcatttgttatggaaagctaggacaaagtccgaatagggattaaatgtcctaatcacataacaatgcttttgcttagaatttaaaaatttattgaaaaatttagataataaatatcgtgctgagtcgaagcacgaaaagtgcaaagtgatcaaattaaagcaaaataatgcatcaaaaaaattaataaaatcaattaaaattttggtcattaatgcttgtggagatgttcttgttttattgttcatcttttcatttatttttttgaataatatccaattgtatttgtacatattttttaataataaaacaacatattttattcatttaattatttatttaatattttattctttaaaatccggaccagaaaattaaattttaaccaataagcattaaaatttgatgatcttttctgatcactactcgaaacagttttttgattgtttaggcgttttcagcacctaagaaaacctataaaagtatttttatgcaattttgagtctgggacctatgatggatattttaccttttaaattttttagtaaattaaatctcggttttttgttcaagtcagggttcgagtttcgaatttggccaaaatgcatgtcataatcgttttcagcgacctctaaaacccctagaaatatgttttccttgtaatttatgaatttagaatttttgttcgaattcgggttcgggattcggaattttgaaaaataaatgtcatattcgtgatcagcgccccaaattaccctagaaatgactttttatttgaaaatttcaggggggtcacaaaaccgaaaagaaccgtctcttctcacccgtctcgaggccattcatcagcatgaccaactgaaatgattggcatttgtgctttggttgttatgccaatgatgggactgaccatatcagtgacaccgatgtaaaacaacattttgtagcatggattggacaaattgtgataaatggacaccatgcaggggacgtacaacaactgaagggagggggagaaagggaaaaatcagaagggggagggacacctcgaaaatgaaaaacagaacgatcaaaagagtgccatggagagaatggacgcggcgatcaatcggcaccaagccgatatcgaagcccgagcagttgtacagacggtcgaactcatcgcgacggaagagcagcaaatccatgcaaaattagcagaagagagagaatttggacggagattttaggaatttgaaaatgggaaaaaatttggaaaatgggaaaattgggggagagaaaatgggagggaatttaattaattttttgccaatgacattaataaattatgggacaaatggcttaatcgaaaacgaaactttaagattaaaaatgaaagaaaaatgatcaactaaaaagtggaaaaattggcaaaatgaaagcccataggaatgaacgaaacagaaaatggctgattaatggcaacaaataccaacaaaaaaaagtgccgtccgattgtccttctcttttgtccgtcatttcctattattttttgtgacaattaaacggaactgcgaaatgagcagctttgagagaggagagaagagagagagagagggagagaagagagagagatagaggagagagagagagggaggagagagagagagggagagaagagagagagagagagagaaagagggagaaaaagagagagagaggagagagagaaagagagagagggagaggagagagagagagagaaagagagagagagaggagagagagaggagagagagaaagagaagagagagagaaagaatttgagagaggagagagagaaagagaagagagagagaaagaatttgagagaggagagaagagagagagagagagggagaaagagggagaaaaagagagagagaaagagggagaaaaagagagagagaggagagagagaaagagagagagggagaggagagagagagagggagagaagagagagagagagagagagagggagaaaaagagagagagaggagagagagagagagagagagaggagagagagagggagagaagagagagagagagagaaagagagagagaaagagagagagggagaggagagagagagagagaaagagagagagagaggagagagagag

SEQ ID NO: 13430 - DNA, 1106 bp, Heterodera glycines
aaaattgggggaggggaaaatgggagggaatttaaattatttttttcccaatgacatttataaaattatgggacaaatggcttaatcggaaaacgaaactttaagattaaaaatgaaagaaaaatgatcaactaaaaagtggaaaaattggcaaaatgaaagcccataggaatgaacgaaacagaaaatggctgattaatggcaacaaataccaacaaaaaaagtgccgtccgattgtccttctcgtttgtccgtcatgtcctattattttttgtgacaattaaacggaactgcgaaatgagcagctttgagagaggagagagagagagaggagagagagaaagagagagagaaagagggagaaaaagagagagagaggagagagagaggggggagggacaaaagtaggaggaaatgatggagagaaaagaggaaaaggaaatgggaaaagagagaaaaatggaaaagaggaaaaaagaaaaaaaaggaaaaatgggaagacttttcggttttggggcctagatttgatttgaatttaaaaatacaacaacaaaagacgcgcagaattttttctgtgcttccccccaattgaggtcgtccgtcactttgccattctcgccccccccccccccaatggcgcgcacttccgtccgttcaatcgcttttcttttttctcactttttttcgtcattttttccattttccattgccaaggtcaacaaagtccatcttcggcttcatttccttcgccgtccgctttaatgaagtgtgagaaatccaattcagcggacagagtttatttgcgacgttttggggatggaacttcggcagcagtggcaatgccatcatccgattacttatgatgccaatggcattatgccctaattgttgatgccaaagatggccagggattgccattggcaagcgaaaacaatgccaaagacagacaaaacaaagccaatggaaagcgaaactcaaacgaaaataaaaataaaaattcacttttttaaattttgcttgtcctttcttatcataaaaggaaatggcaataaataaataaataaaactttcaaatccccaaaatgaaattcacaccaatccccccc

SEQ ID NO: 13431 - DNA, 2017 bp, Heterodera glycines
gtgagctgtctttagtgtccacataatgtgtaactaaatcagtctgagtcaaatctttgtcatcaatagcaaaaatttgagagtggtcgatgatgagttttcctaactgatcagttacggtcgtacagtttgcgtttgcttgcttacgccaacagattcaatttgttggacatgatttgcttcaagctcatttaaaaactgaatggagataacagcaactgaatgattcaaacaatcccaatttaaggaatgtttctcctgtgatttgcttctccaatataactcccgttccaatttgatcattctcggcaagaacaattggaagcggtgaaaaatttgtgaccggtatggttgcttttccaaatttaggcgttattaatgtcggttcaattttatgttccgacacttctgatgccactttaatcaatatcgcttgttcgtcaatctcgtcgtttactgcaacttcaattaacgccgatgaacgcggttgaattttcacattatacaccactctaaccagtttccttttagttttcagtatctgctgcttcaaatgtcaccaatttttgattcacttcatcaaaaaactttatccccaactgattcaaagcattggtctcgatgatcaaatcaaatcaaaatcagacgaagcaacttgaagtgttatcagaacaggacgcattccatctcgcattattggaagtacaatctctccaaccatatcgattgtttttccattgaagtcccttactttcaaatttgaatgaccaaaactaaactccctaatatgtattaaaatatataaataaaatttttgaaatgattattttttgaaaaaatccaaaatatgttaaaatatgtaaattcaaagtttcaacttttgttcgtaaacataaaaaagaattgttttccccactaattctaagatttcatacttcgtttgttttattgacattttaataaagattaaatattttgttaaatttaaaaaattatttttgtaaattaataatattgctcaagattaatcgatgttctaccttcattataagagtccaattttaaagttcttttttccattttgaattttatcttatttatgaaacggtaaattataaattgcattctttttaatatagtattacatctctttcatatttaacttttaattattctatattcatgacaagattggcgcttgaatctgaatggtttgcgcatattttggtgatgctttagagattttattttactatttttttaatatttttagattatagtaatttttaataattgtctgagtaaagtttttaaaatcaatagcactattagtatgtcggatagataattctatttataagataaggacgcacctctgttttaagaataaatccaatacctatcatggttgccacccgaatcccgaaacacgacatttttctcgttccgaaacccgaatcccgaccctaaataatttatttcttttaaagcattttttcgtttatgtagtctagtggctataccttctccctttcaatatttgtcgcttgcaatgagttgtttatttttttgacaaaatctattaacaaatcgtattataattacaaaatttttcccggcggcgcctatcggcaccgccggccccaggttccccaaaattttttagaaaaaagcgacgtaaaaaggcattttttaaagtaaaaattcgtcgcttggcttaaaatcgcaaagacgcccggggccacacggcatcgcattaccacccgtcatgttgggtggtgtgccgaggcggtggcggatgaactgagcaaggcggctttgctcagccgtcaaatatgccactgacgcacggagagcggtgagctccccgtgaatggccacgaggtccacgtcggctttgggcggctgcgcgttggcggaagttcccgcatcctgctgggcgggaatttttttgattggggcaatcggccccatgcatttcagaatggtgtccatcgggaactggcggagggttcga

SEQ ID NO: 13432 - DNA, 2935 bp, Heterodera glycines
  unsure (1)..(2935): unsure at all n locations
tccccaaaagcccgtgctgtcgatgcagaaactgttcccggggaacatttctgtctccctcagctctcgggatggctgtggagggtcggacttttgtacaaaagtctccgacacatgagccagcagacggacatcgtttgctggctagggaagcgatctcgtatgatcgtttccatgccttggtgaaggcttggcattcgagggagagtcctttcaagatcacttgaagggttcccaaaatgagaccatcatcggtctttattgacaggacattcggttgtcctgccgggagaagcgcaagagtcacgcttcccttgacttggcacattttagttgtgccgttgttgagacagctctctgatttggccattatggccactgtctcaattcccccgtgtacaaacgggagagatgccatgacaagcattgccatttggctaactcggccactggtccagtttcttgttgctggcctgggccggcgtattcgtcggtgaggatagaggaggttttcctcctcctcactcaatacccatgtctcttttcgcggcttgaataagcgcgcgaacaagactgagaaaatccaaaaaaggattctcagtcctgccatggcgtatcccaccatggaacacatggtgaagatgaagcacaggaggcttagggacaggcctcctgccagcattgccgcaatgacgggctggcatgttggattcacaagttgtgtgaaacaaaagtagcagtcgatgagatcacattcatcgactgccgggcgggtcgtgtttgatgtgaaggtgtgctgtgagtcagtccaaaatctggcctcacagtgatgattgttgagtaggacttcgattggtagttcgaagttcaaggctttgatgccttgccgaactatgcagctttctgcacagcatatttcgaacttttggatttcgggtggcactgttacgacgattcctttcgtgtaacaagtgaggccacactcatcacatttcccgattgggaaaccacttgcaaatggaagggcgaagtgtcgaggagggtcgatagccaccactggaagcgatttccgagtgagtttggcttttcttctggtgaccgtttggtgtcccggcactcgagcgagcttgggatggttttcatttggctgttcggttgcggcaacggcttcagttcctgggtccgtcatttcaggacccgcttccaaagggaagatgcggttcactggacgagtaaggactgtctttcgtggcatgtcctttggtttcttgttgttggtccctcggacagggatttcaactttaacacttcggatggctccaggccgtccgtgtgtttcaacgattcgtcccattggccattgattgcgaggaacgaggtcctgagagattaggaccaccatcccctttcttcggttcaccgaagttttggtgtcgtgggcctttgtggtcctactgggctctttctctgagtaatgttaaatactcagagtgccatttggcccagaaaatgtcgttggcttcccggagtgcttgtattcgggaagttaaacgttcgtgtgtggaggaaaacatttcctctgaatcaattgggtccgttgttgtttcttaattgatatgaatctctggttgtaagagattgatgggacgcagtggaactggtccatccactgcgtctgagaccgcggtaatcggtctgtaattgagggtggcctccacttcggccgcgaatgtgttgagttggtcgaaggaaagaatccttcgacccaaagttcgcttgaagcagtccttgactagcttcacgaggcgctcgtaaaagcctcctgcccaaggacttatttgggaaatgaatcgccactggattcggttatgggtcaggaagttttgtacttcctgatccggccccggagcactgagaagctccagggttttctgagcgagtttgaaggtcgtagcgttgtcgctccaaatgatgtcgggttttccccgtcgacttatgaatcgacggagaacattgatgaatgattccgatgtgaggtccaatgttgcctcaaggtagacagcgcgcgttgcgaggcatgttatgatgaggatccatgcctttnattttttctccgncccaacgaaatttgtcgttggcccgagaaagtcaattccaatcgactgaaatggagcgtgtcggcgcactcgctcacccggcaagggtggcatggttggtaatgcaaactgttgtgcattcattcggcgacaatggagacagtcccgaagagtccgtttaacatttaaacgggcacttggcatccagaattcactcaagaattctgtcagagtggtgtccactccaaggtgatgccttttttggtcccgatccaaaatgatcagctttgccaaagcggaatgtatggcgagaagaatgggatgagagaagctgtatggcttctcactcatctccagtctggttttcagacggagaattccgtcgtctccaatcactgttttaaggtgctggaattcttcagcgtcatccatctggtctaggcggataagaactcgctctgcgagtgagaagtcttccgccttgaattccccagacttggaaatttggcgaatttcctttctgtgcttctcgagtgaagcaattgtttcttcgccccttttgaacattaaagcgaggaatcgtaatacgaacattgttgttcgcataaggcgtttccatgagctgaagcgtgaggggtcaattaagacctgctcatttggctgctttaagtgagtgtatgcgagaaacgcaccactcgggccaacattctccgagatttgttggtcagactctgttacttggaaacagagtacgttgggccaaagatggctctactgtgtgagccaagctgaccctttccaccagagatgatgtttcggagctcccaaggaggtgctcc

SEQ ID NO: 13433 - DNA, 1282 bp, Heterodera glycines
  unsure (1)..(1282): unsure at all n locations
tgttggatttcctccccccgattttccacccttttaacgatatctgaaatacttcccacgttcgaccaacacctttttgaccgcacttgactgatggccttcgcgaatattgtgcaacactctgaaaaaaacaataaaattaaattaaaccccatttattggcgcttaattaacagttatggattttgaattcttttttctaacaaatcatggcttttttttagttggaattttgaaaaaaacccagggtgcctcaaccatttttttagaaaaaattgcaagccaattgagtacctacgccctttgttgttcaatagttttcaaaatccacaattttaactattgcccctgctctatgtgtacttgtgcgtcatcaatttgctgtccatgggcggaaaagtgacttcaaattcccccagggggcaactttggaacattttggccaacgctccactggaaagaatgttcgttcattaattggtttatttgtgtgtgattttcagcttactctccgcttgcaatggccttggccgcgtcttccgtggaaaagccgcggtccatcacaaatttaaggaaatttttgcgggggtccgacgcattagaagaagtcgattgttcaactgcagaacaatcggcagcagccgaggctgagggaatgtcgtcaaaatattgcctcagtcgatccatttgagcagaagcatcggccagaaattggcgaatgttaatcaccggagaaatgtaaggcttttcatcgcttttcaaaattttatccaaagacatcaaaaggctaaaatgggtttagaaatgggcaatcctgcagaatggatgtctaatttaactttgttattttagctaaaaatgtttgccattgtctaaactatgattttattactctgacaagtagggtggggatttatatggacataaaatcgcaaaatatggccataaaatatggaccaaaaatcgcaaaatatggatataaaatatggaccaaaaatatggacataaattttaaatatggagaggtaaatcttatccatatataaatttgacaatttctgtctgtgtgtccgcggtgtttacgcattttgaatttgctcttatagatngtatgcncatgttagaatagaaaatgatagaatgaaatatattagagtccggtaaaaaaatttccgggagcgggatcgggagttcaaaattttccgggacgggagtcccgaacgggatcccgtaaaaatcccgctccctaaaatcccggtcattttttaacgggagccccggg

SEQ ID NO: 13434 - DNA, 1716 bp, Heterodera glycines
  unsure (1)..(1716): unsure at all n locations
aattttaactattgcccctgctctatgtgtactcctgttaagcaannngctgnccatgggcggaaaagagacncccctttcccccagggggcaacnnaggaacannnnggccaacgcnccacgggaaagaaggnncgnncannaannggnctatcngagngngannnncagcnnacncnccgcnngcaagggccnnggccgcgncnnccggggaaaagccgcggnccancacaaannnaaggaaannnnngcgggggnccgacgcannagaagaagncganggnncaacggcagaacaancggcagcagccgaggcngagggaaggncgncaaaananngccncagncganccannngagcagaagcancggccagaaannggcgaaggnnaancaccggagaaaggnaaggcnnnncancgcnnnncaaaannnnanccaaagacancaaaaggcnaaaaggggnnnagaaangggcaatcctgcagaatggatgtctaatttaactttgttattttagctaaaaatgtttgccattgtctaaactatgattttattactctgacaagtagggtggggatttatatggacataaaatcgcaaaatatggccataaaatatggaccaaaaatcgcaaaatatggatataaaatatggaccaaaaatatggacataaattttaaatatggagaggtaaatcttatccatatataaatttgacaatttctgtctgtgtgtccgcggtgtttacgcattttgaatttgctcttatagatgttatgccaatgttagaatagaaaatgatagaatgaaatatattagagtccggtaaaaaaaatttccgggagcgggatcgggagttcaaaattttccgggacgggagtcccgaacgggattccccgtaaaaatcccgctccctaaatcccgtccatttttaacgggagtcccgggcgggagcgggagtaatttcgaaaatttaattaaaaactcccaaaaatatttttaatgcacaaatttaaagggcaataaatttattaaattaaaaatatatagaaaaatttataaaggagaaatttgaaataaaaaaatcttatttttgagtcaaaaatcagaaaattttttcaaattgcttaaataaattattttttataattaattcgaacaaaacatttattaactttatatttttgactccctttattaattttacaaaattttttgcggtgtatttcttgaaaaaacttttaaaaaattttgataatttttaattgttatataaaataatgaatattttttggttttataaatataataaacaacgaatttctaataaatccttgaaagaaaaacatattttcatttttaaatcaattattttatttaatcggtttaataccagtttttattttttaaatcatatatcctgttgtccttcgaatttttttatcagaaggagttaagaattttttttattaaggattttagggagtaaatcacgtaaaacttaaacaaaacttaattttgatcatttaaatgataaatatatatttacaattttttaaagtaaaaatttttatcaaaaaattacattttttgttattttaaaaaaaattttcattttaattaattttatctgatgtcaacgtgcttatttgtgttgttactagacctggacctggatccaggcctggatttttcctggatacaggtccaggt

SEQ ID NO: 13435 - DNA, 2284 bp, Heterodera glycines
aaatatataagagagcatcaaaaggaattatgtgcggaaagttattttgaattagctgaatggttggaagatgaggaccaaagagaaaataaaaaattgacaaagataattttaccgtcaagcgtaaccggttcacccagatatattgaacaaaattatcaagacgcaatggcaatggttaggagatttgggaaacctgattttttcctgtaatccaaaatggccagaaatagttatgaatttgtttccaggacagcgtctagaagatcgcccagatttaatcgttaaagtttttagactatacatgaaaaaattaatagatgaaattgtaaaagataaaatatttggtaatgtgcgcgcgtggttatatgtagttgagttccaaaaaagagggttgcctcatattcatttattgctatcgatgtcaaataatgataaaatcagaaatcctaatgatgttgatagttttatcagcgccgtatttcctgatcccactaaggatcataaaggttttgatttagttaaaaaacatatggtccatggaccctgtggaggtttgaatccgagttgtgtttgcatggaagaatatgaagataaaataactaaagttaaaacaaaaagatgttcaaaaaattatccaaaagaattttgtatggaaactgcgatggataccgatggttatcctacatatgctcggcctaataatggcatgacagcaattataaatggaaaagaaattgataatcgatgggttgtacctcataacttatatttacttaagcgatatgactgccatattaattttgaatgcgtgcataatattaaatcagtgaaatatctttataaatatgtgcataaaggacatgatagagcagagattgaaataattaaacaacaagataacgatgaaataaaagaataccaagatgtaagatatgttactcctcctgaggccttatggaggatttttggttatgaaatgcaaaaaagaagctattcaataaagcgtctgccaattcatttgccccaaaaacagatagtgtattttgataaaaattggagcgaggataaaatagaagaaaagcttaagaaaccaactgagctgatggcttattttgaattaaataaaaaaagaccctgaggctagacaattgttatattatgagataccggaaaaatatatatttaaagataatcaatgggttaaacggcttaaacattttaatattattggaagaatgcattttgtaaaaccacacaatacggaattagtttgtcttagacttttgctttgccatgttaaaggagctacaagttttgaagatttaagaactgtaaacggaatcctaaacaaaacatatcaagaagcgtgttttagaattggtttgctaaaagacgatcaagaatggattgattgtattaaagaagcaattaattttgcaatgcccaatcaattaagaagcttatttgcacggattttggttcattgtaacccttcaaaacccaaagaattatgggaattattcaaggttgaactttccgaagatttcagtcgtcataataacaaagaaattgcattaaaaaagcctatcaggatattgcaaaaaaaaatgaaaaacgaaggaaaaccacttgaaaatttccctgaaatggatcaaattgaaattaatgaagaagaagaaaaatttgatatgttaaatgaaaagacacttggtaaagaaaaatatgcaaaattgacaaatgagcaaaaattaatagtcgatacagtttttgaaaaattgcacaataaaaaaagaccagcattattttttattaatggtgctggaggttacggcaaaactttcacttacgaagttatttgtcatttggcaagaagcgaaaatattcgtgtgtcggtaatggcacctactggtatagcagctattttattacctggtggtcaaacaattcatagtaggtttggtcttgatttaaaacttacacgatcagcaattaactcaaatcaaaaagaatggaaagaacttaatgattctgaaatctttataattgatgaagcaccaatgatgcataaaaaaatacttgaattaatcaatgaaaaattaaaagaaataacaggtataaatgaactttttggtaataaaataataatacttggtggtgattttcgtcaaaccttgccgattcaaaaatttgcaacaaaatctcaattaattgatctttcaatcaaaaaatcacatttttggagacagtttcaaaagtttaatttatcaaaaaatttacgtgt

SEQ ID NO: 13436 - DNA, 2568 bp, Heterodera glycines
  unsure (1)..(2568): unsure at all n locations
tttgttatcattcgatagctcttcagattctctccttttactgcgcaatttcaaaaaatttcgtcagtttacaaaacctttatgaccagaaacctcaaaaattaactttttcttggcttttgcggcgccgcgtagcataacttttttatttttgaatcattcatttctatttttacatgtaaatatagagcacacatagagctttcaaatgatgccagattggctaaagctaactgacaaataaaaaagttatagcatttcaaaatttgcggcgccgaaatggtccgcgccgaagtgaccccgacccgtttgaatcccatatttcgctgaccaacgaaatgtccaagcctcgaaatgtccaagccacgaaatgtccaagccacgaaatgtccaagccacgaaatgtccaagccacgaaatgtccaagcctcgaaatgtccataagggtaaaaaacacgaaatgtccaaaactcgaaaaagctcataaaaacccggaaaaggagtctaatttagggttttcggggtcgccgaatacgaatacgaccttcatatcgccccttacctaaccctggacccaaatataaatataaaataccaaaataaactaagaattctatacacgatggcgaccaaaattcgaacaaattttttgagttcgcaagtgatccgaattctatcactagacaaacttcacaagttaaatgaataaatttattaaaaatacaataaaatttataacggaacatggacaatcgaatcctcaaaattctcgaaatccttcaattttcctgaatgtccttcaatttgaagaccgatcggcgtcacctggccatggatttcaccattgttgttgcattactcgtccggcaaaattcgcataatgacggcgtcctgtatgtgtatcgcttttgtcacatgcgaatgaaatggcgagcagctcagatcgggcagcgtccatccatcagtcggtgttttcattaattttacagatgaagtccgggagggcagggtggtggcagagacctttcaaacatatttttttaaatttgcctgtagtaaattaaaaaacaaccataaaatgcagatgggttgcctccagtccgttgaaatttttaatataaacgacattcgtgaaaaaatgtatggctgaaggcgctgttgaagtcgatagcgagctcaacgaatattgaacaggctgttcttgtggagtcacagtggttagccatatagagttcaaggcgccggtgagccgatgccgaactgtattggagtagccgcgtagctgtgttctgaatgatggtcgaaattgttgtcactagttcagcttaaaaataattaaacttttggaaatcgacgaaaaaatacgaaaacaaatcgctggaaggcaaaagtggcaaagaaagaacacttctgaaaaggaataattttagtctatttttntgcgtcgcttcaaacataccattcagccataggcaatgtcccccaaaatatgtttttccgcgctcaaaggttcattattgaacttcagcctcgttcaaagtctgttgttcaacgttgtcgaaaattatcacggcattcggttcgcaaagctccactcccaaattcacggcatcctcatttgtgtttgaaatgtctgaaatataacgcttcttccgactttttgtagactttcaagcttattacttatcatttggtctaaatgaatagaaaaatctaagtcgtcagtacagcacatattttaaaaatttttgaacttatttcttcttcgggtggatcaagggttagacaaggggcgatatgaaggtcgtattcgtattcagcgaccccgaaaaccctaaattagactccttttccgggtttttatgagctttttcgagttttggacatttcgtgttttttacccttatggacatttcgtggcttggacatttcgtggcttggacatttcgtggcttggacatttcgaggcttggacactttgtaggggcgccccttttgatagcaaaaaattttttctatgatatttgccaagtcataaaacttgttccaaggagttttcgggatcgctgatcaacgaatatggaaacggccatatggaatgaccgatatttaaatggtcacaccatcccaaaaaacgagatgtgtaccaataaatagagagtgcagagaaaaaaaggcgaaacatctctttttaggggggggggtaaacccaactcatccatagcacgatacgagtcgtcgccgtggcatttaatgccacgactaagaccgtacaaccaaaaaatgccacgaccgagaccgcataatcaaaaatgtccacggtcaagaccggcataatcaaaaatgtccacggtcaagactagggttcggaccccgtgggcgggggtggcttttcacgggggcgggggatggcgggggtcagagtcgcgggggcggggacgggggcacgataattccgcccccgcgggggcgggggcgggggtttgatttgagttaactccagaatatgtaactgaaaatgacttttttatgaatgacgcgctggctccacgttccttgagtcaatgt

SEQ ID NO: 13437 - DNA, 1098 bp, Heterodera glycines
gcaattttccaggaatgttcgagtttttgccaatgtacaccaatttcgaaccgaaccgaacatacgaactgattggaacttatgcgcccgtcagcaaaattgacccaccacaatttgagacaaactttgtgattatgcacaaatctgagcaaacgcggcaaacgatgaaatggtaataaaattccaatttaaataaataaataatgaaatttcaatttaaatgaataaaatattaaatttaataaataatttaaaattccaatttaaaatgataaatatttaaacttcgaatttaaatgaataaatattaaattttataaataatttaaaaatattaatgaagtatttaaactttgaatttaaatgaatgaataatttaaaattcctttttaaatgaataaatcatttataatccaatttatataaataattaatatttcaatttaaactagagtgccacgggaccgggaccgggccgggaattcccggtcatccgaggtcccggtcccggttcccggtcccgggttttgaaaagctcaggtcccggtcccggtcccggtagggcaaccgggaaccgggaaaaacaagcactggtaagaatgggggtctgagtgaaaaattagtgaagaaaattggagtcaaagggaaaaataaaaaataataattaatatattctttaaaagtaacactgcccaagtgtgcaaatggcctaatggctagtctccttgactttcccttcttctttcccctggttcaatccctctacagaaattagattattttcaattttttgttttgtatactcgtgggtttcctataaagaaaatatgattcctcatagtttttttaaattgatacatattttatcattttttaaatgaaaatcctaccaattgagcttaataatcgcaaaaaccaacctttttttgttgaaaatctgttaacaaattgcacccaaatttttaaaatttcccccggcggcgcctatcggcaccgccggaccccctttctttcccaaaagttttttgaaaaagcgctccgaaaaaaagtgatgtgaaaatcaaatctgaatttctattaatattcgatgatttagtc

SEQ ID NO: 13438 - DNA, 3586 bp, Heterodera glycines
  unsure (1)..(3586): unsure at all n locations
tattggaatgggcatggcaaagacctaaaaatatttaaataagtgccttttataacaaccctaattaatgaacatcgcggtttttttagtaaatttgtcttcaaaattccttcaaaaaatgttttcactaatttcgaaatctttagcccgctcttccatttaaatataaaaaacaatataataaatgaaatttcaggatattctttctataaattataatttaaacgttgtgttcgttcaccttgaaaattgcctcgtccgtatttcgttcatgtcgaagaagtcggcactcaaatggtttctgctgattttgcgctgcttctgctcctcctccattattggcaaactgatttccgatacatcttaacataattttaatttatttttcatttatttttcgcttttttcacctttttccccattttccgaatatttttcctccattctccgcccatttttgtaactccgcgaactcagcgaacaacgcacggcactcttcgccacattatttttattaatgatatttctgtgccgaaaactttctctcagattttgtctcccattttccaacactccgcacactttttttcgccaatgtctgctgataagcaaaaaatttatttatttaatattttaaatacagttttagtgatgactctaggacaaataaatattttttgattttattttacattaaaacattttcataaatgcaaaaattgaattggaattacggcacgaatgaaaaagccttggcggttgattccccccccccccacccgccactttaactatgaaaatcgtatcgcttcgctacctgtgcaattgttccgaggtgaggaactgctcgagttcgtgccgtaccgccaccgcttcgtccgtcgggtcgtttgagttcggcgtggaagcggcggcgacggaactgaacagcgaattcaaagtgtccgggtcgaccacaagcgaaggcggcacattctgacgagccatttggaacagatgctcttgattcttggcaaagtgcgcaattgtgtactcgaccatgacagctgagaaaaggcacaaatgaaaaaagaaataaggaaacgaataaataataaatggcccacaattttattatgaatctaccactttttgatcgtgtgcttttgactaataatattttatgtttagttctttttcccacttatggattttgtgaagggagtccattaaattacattttgggtgttttaaaatacataatttaattttaattgtatatattattaaaggcaaacccatgtctgtatggattacttttggagctttcgaaaaaaacattattttgctacttttatgttttcataaatattttggcgattttttgaaaattttcattgaaaatgtaataaaactaaaacataagaaacgacagtttggaaatttcaaaattaaaaattatataataccaagattgtaaactaaaagaaattattcgaatttgataaatgaatctttttgctctggtgcatccgatagcttttaaaggatttgttttttaccgaacacaaatgccatgcacatgttcatccacgagtcaatggccttcatataggacacttcgggcagcgaaagtttcacagcgtttgcctggagaataaaaattgaaaatattttttttatttttaatactatttaattttattgaaatgtacaaaaataaaatgcacttgggtggcaattgtgagaagtgttgtgatggacagagaaacgcgtgccggtgccgaatcgatgtccaaccaaaaattgaacctaaaaaataatgaatggcacaaatgaaaaggtggcaagcatttggtgaccatgaaattatgacgatcagtgcggtcggcacatacgtttggattatatggtggagcatggcacgctcaacttaaaccaccaaatgccattttaacaatcacttttattggggtgcagctccaattctcttttgattctgtcctcaataatccatctcatttaaattcccgacttttttcggcctacccaacaattagcaattaattaaaaaataatcgtttaattaccgtaaaacactgcagtcatacaactccaaattcctttaaaatgatttgttttccatattttcttattgttccttccttaccctccacatatgttccgttacactcccccgtttcaattctgaccaaattcatgtcttaagaaaattttgtatataattcatttaaattttaattgtcactaattaccgggcattttaatgtccatattcctgtcaatcgctgggttaatccgtgtggaccatcgaaggcgcaagtgcgattcgggataagcatctgaaggagaaaaaagaaaagcgaatattttcaaattaaaatataaaaatatttaaaaaattattaaaatcgcacagcttaatattctcagctcacaaatttgtgaatcaagcggatatttccacaagtccatcatgcaaattgccaccagcgaaattcggcaatcgtaccaaaccctggcccaaggcattgtaaaacaaaatttgaaaattcgcccaccttccgctagggtaaatccaaaccataaaattgtcgtccgttatctcctggaatgatgcttgtttggcgtttgcaaaataaatgtccggatgccaaagtttctgttgtccaatatttcggcgataaaaagtcaaaaagattattggcctgctgtgctcaccttgaacacctgcttgtcccggataagcattgggcccgtcccgttgtgcttcaaccgttcgtctttccattcctgcaattattctaataatctttttctggaattatgaaagaattaaaaaaatttgcaattttaaagttttgaatttaatttaaaaatattaattctcttttttggttaagttaaatcctcaatggcaattaatgcctattccctcgacttctaatttttaccctcaaattactcattcctaccacagaataatccgaccccgtcggaattgcaaatcatttttcaataaatcttcaaatttggtaaagccaggcttctcatcttttccaatacatttgcactacctgatacatgtacatgtccaaatggtagtccatggtctgagcactgaaacttgaaatgccctcaataaacatcgacatggaaacattcgttgcaaatcctaagtttcatttaaataactggatatttaaattccaactttaaaaaagtctttacctttcccttgcgttggcgtggcatatttattataccttttctcatcgtctaacaatgcaacgaattctaaatttttaattggtcaattatttgtatttttaatttaattcaaatgaatttaccgcctgtcagcggcaccattttttcatttgccaaaacaatttgatgaaacaaaaggctgaagaacggaaacaaccgaaagaaggtgacgaaataggacattttaagaggatattattgtcgaaattataaaacaattaacaactanacttttanaacaatttatttaataataanatttttgataaaaagcaaaattaaaaaataatttgaaaatagcaaaaataaattcagt

SEQ ID NO: 13439 - DNA, 1053 bp, Heterodera glycines
agttgtatgaatctcaaaatttagaaaacatataaggcaaaaccgtaaccattttaagatttatttcactaagataccaaaagtgatgtttagaagattatttttcagcatttccataaattattttttgaaatttgacgatgacaaaaaagacttttttgtttaatttttaattctcataagtaatttcacaacgaaaccgtttgatagagatggttaatttgtgtttgtgtgtgctcaatgtgtgccaatggtggcatgacaaaatgccatggaattctcgccataattggggtgggggaagagagagtgcctttcccggaggcattggatgagcaaacaaagtccgacgatattattacgaccaaaataattttctcgacattattattttgtttatgattattatttgtgtgatgcctcgggcagcgcactgagctgcttctcatttttcattagtttggcccgccaatccgtcaccgatggatgacgacgattttcatttttcactgctttggccaatgctttagggaggggggggggaggcattttgtgccattttgtcccacgaatattgccttaacagtattaaattttgagaaaattttgtgacctaatgaaattaaattattttgtataattcaatccgcggaaaagcggtgaaagtacaaagaaaagctgagacaattattaattattggaattggaaaatgaaatgaacagcggcgggtgagaaaaacaataattggaaaaagacaatttacgagaaaattaaaaaatgaaacaaaatctgaaatcacattccatttaaaagaaaaacttaaaaaaagatgaattattatcatatccattggaaaatgttaagcttcgcaacaaacagagctataattatgcacaattctaagaaagatgacaattaattcttttgacaatgagtgtaattttggaatttcaattaaattatagacgttttttgacagattttagaatgaagacattttataaatgaataaaaaaagatgaaaaccaaaaaaaaacgaatgaaactcattt

SEQ ID NO: 13440 - DNA, 1637 bp, Heterodera glycines
  unsure (1)..(1637): unsure at all n locations
ccccccccccccccctttctcattttacattttgcggttccgggggctttcttcatttttggctttttgtgttggtcacattcttttgttccggccggttttcagtgatttttactcttttttattaaaaaatcgaaattatccaaaaaaacaatttatattaaatttgcttatttatcatttttctcncactgaattttcaggctgcagggtggcaggacacgtcttataaaaatgcattttacaattacaaataatgaataattaaaaatggaattgacagccattttctcgcttttggtcctttttcaaaggcccaaaaacggaaaattattcaaaatttaaattattaaatgggaaattaggaaaattgatagagaagaaattcaaatgcaaattctcccaacccattaatgaagaagcagtttaaaacctcaaaataatatgtgtcatttgcataaattacctttttgtggaaacagttggccatgggaatgaaaaaggcaacgaatattttggacatggaaatttctgattaattaaatgaggaaatgaagagaattcttcttgtaaaaatgtttaaatcaaaataacaaaaaaatataaaaaaaattaaacaatctaaaaatagttgaacattggaaaattctttcatttttaaatgccctaattaagtaatttgtccttttttgatgagagtattttttaaaatcttttttggggtaataacaaaagatttcgagcggcgaaaaaagaattatgaaacaaaaaaatcgtaatttgtactatggcacacatgaacgatggactgaattgggttgggtcacgtcgagagtctcgacacttgaaaaacaattgaggaaggaaaagacagacttggaaaatgaatttttgcaaattaaaaaatgaaaatactcaaagaatttaaacgatcgaaagaatgtaaaataatgaaccgtcaaaaagggagcatcgctttagaaaaacaaagcgaagaaacgcagaaaaaacaaaaccattcgaacgaattattgagagattgctattttgaagttcgttagcttaaaaaagggctgaccttttacttccaggagcctataaaatagcgataagcactttagaaaatgagcaataaaatagagcataaattttttatttcagaatgcccctataaggtttgaaattcactccttataaatcagaaattcgcattctctgttaaaatttaagttctttttaaggggtgttactataattctagaaaaaggagcagtcacatgtctgatactgctgaaaagttaggccctggccgaaaaacaaagaaaatgtgtgccaagcttttaatgggtatttggctaaggtttgaacttatattccggttttaaaattcgggatttaggattaaaggtgagcaagcttgtcctgtacattagcgtgtatccttttcccatgcggtaaaatgaacgaatttgtaaagcaatatgacaatttaaataaaaacaattgaagggggtcggtcctggtcagtttcccaggcacagacttaaaatctcgtttcccgagatcattcggcctggtttcacgactcattgtaatagcatttttaacacatccatcccacaatcacttgatgcttt

SEQ ID NO: 13441 - DNA, 3882 bp, Heterodera glycines
ccgtcacaaataattaaaaataaattgtcaattactttttggtctaagtaggtcagttaatcgatggcatagcaatggggaggggatgtaaaggacaccatcactgggtgcaatgggaacgcgacgccatcgcacaaaacattgcctcccaagcttatagcttacaataataaacatctttttgtattgttcatttttcatttttatccgtaaagatttcccaactcgtgtatatatttattattcatggcggaccaaaatttaccggtcaatgaatgtaattttatttattattttcaacgatctaattttttttctcaaaagggcctcatcacacaaccccaacggaccaacaatatgttttgttctgtgaattaaacaattaaaaaatcatcattttgtctctcattttaatctattccctactctggctgaccttcctttgtgttggtcgtccagagtagggatccttattttctcacaatctttttaagttatggctgaccttttttcatattggttgtcctctcttattaagattgtttcattaatctcataataataataataattttataaaattcactggtatatgatgaaaacgttaggcagacaacaacaacaacgacggaggaaggcgggacgaaaatgggaatgcaagaggaggggaaaaagacggagggaggacaggacgaaccaaatgatggaggtgaaaatgatggaagaagagagaacggaagaggaggagcaaaacaacaacaatggaaagaggggagaaaaagagaaaatgaagggagataagatgaggaggacgagggaagaggcgaagaagaaacacaagagaaggaagagacaaataggtagaaggaagagaactgagagaaccattgaaaagaggcgaaaaaaagaaggaagaaggggagagaaaggaggaggaaaagaaacaaatagagggaggcgaagcgaaaatggaagaaaagccaaagaaggacgaggaggaggagcaggcgagaagaaacaaccgctgcccgggtcaaaaatggttcaacatttaacaattatttttatttactcaatgtgtattggccatcggaagtcaatcctttatgagtattggctaccgaagggccgggtccgtgggagtgttggtcgccggagggccgagtccttgggagtattggctactggagggccgagctcttcggagtattggatgccagtgggccgagctcttggggtttttggctaccggaggaccgaactcttagggatgctggctattggtgagccgagctcatagaggttttgatttccgaagggccgaactttgggttttgtgcgaattgtcaagggaatatgaccaaaaaaatttcttttaggataatggatcaaaataatataacaaaaagaaaagaaggaaatgttggagatttttgggaggggggaggtgtgcaaaacacatccacgctcatacattattattccaattatttaaaaatggaccctcccctttccacatctgctctacacttcaaaattaaaatgtttattggtagtcaaaattatccaaatgcgaaaaatttggtgtattattcggtggttttcggcttcttcttttgatcagcaatcatatcactgacacagcaattgattctggcacattcttcacacatctcgagtccaatcgccactcgcccgtcttccagccggcgtgccttgtctttgttgtgaaataaattgttccagtcctctgaaagctgtcaattaatttggtcgtcaaaaatttgattaacctgagcacagccgaatcgcaagcacaaattggccccgcgtgattttccaaagaaatcgctcatcaacgtgtggcttcttagctttcacttgttgctcctccgcagtttcgggttgtacaaattgttctgccatttgaggatgattttgcaagaatgatttgattgtgcgagaaaatctctgcttaaatagctttcaaaagtgggcgtggcctaattttctgggagtataaaagccccggcaatttgtcagctatgtctcatttgttctgctacaatggtccttgtcatcgaattttgtgcccaaattctcggctgttcccctaaatcactccgcgacaagctcaatcatcccgaggaccgagtgaaggcattgaaggagctggtcggaaaaaaggttcagacgacatacaaggaccggaatgggatgcagaaaacattttttgtcgacggaatatcggaccatggagcggctttgaccccagcatacggcagacttcgacaaccgtacaacattaacattgctgcccatttctacgctcgccaccgaatcaagctgcatctcccatacgtgccatgtgttgtggaaaaatacaccggttgtggcgaagacagatactatccaatggaactactcgaaattgtggatgacgactacaccaacaaagagcgatggcttggcaaattgtttaccgaaattgaggacgatttcattcctgtcaaacgccttggtcgagttgacgaagtcgaagaaattgacgacaatgatggtggtggtcgctacgaatgcagtcaaccgtcttacgtttattggtaaacacatgtatgttaccttaataatgcacttttctacctaaaaacgacaaattcgtttttaagtttatacaaattgtatcttccactccttaataatttacaaattgtgtcttctttctcttaattctgcacttttctacctaaaaatgacattcccaaatgcttaataatttacaaattgtaacttccattgcttaattctgcatgcatgttcactccttaattatgcacttttctacctaaaaacgacaagttcgtgcacataataaaattgtatcttccactccttaataatttacaaattgtgttttctttctcttaattctgcacttttctacctaaaaatgacgttcccaattgcttaataattttcaaattgtaaattccattgcttaattctgcatgcatgttcactccttaattatgcacttttctacctaaaaacgacaagttcgtgcacataataaaattgtatcttccactccttaataatttacaaattgtgttttctttctcttaattctgcacttttctacctaaaaatgacgttcccaattgcttaataattttcaaattgtaaattccattgcttaattctgcatgcatgttcactccttaattatgcacttttctacctaaaaacgacaagttcgtgcacataataaaattgtatcttccactccttaataatttacaaattgtgtcttctttctcttaattctgcacttttctacctaaaaatgacattcccaaatgcttaataatttacaaattgtaacttccattgcttaattatgcatgtatttttattaaaaacgcaaataaaatgacaaaattacacaatttttggtataaaacatgaaaaacaaaggtggtacatgcgtgtgtacgtgtgtatggggtgtgtatggggtatgtgtgtgtgtgtgatacaatgaatgataaacgataaatttacaaaatgtgtccaaaattgagaacatcataattagggcccactatccctttgcctacgtatgggcgataacatttttggagggggcctgaagtgacgtgtccgccacccttaatgtccggtctcaaaaagttggggtacatcacatttattggctcatactctccggtttgggcatatcgcaacacttcttctttgaatgtgtcgtagcatagggattggttctgcatcacgtcgtagttcagtgtgatgcccctcagcttcagtacaaattcgtcctatccattacgccggagtttgagtccatactgaaatgataaa

SEQ ID NO: 13442 - DNA, 1323 bp, Heterodera glycines
tttattaaattcaaaaaaaaagagcggcaagagataatttaatttaattggaaacaaaatttaagcaaaaaaacgaattttatagcaatttatgaaaaggaccaattgagaaaattataaattccaagtgaatggaaggagtcaaaaataataaattttggaaattaattttaacactttgataagaatttgagaacggagaaaattgcatacatagataaatatttggctaaatggaatttggttgatttttgaaaagctactctggcggccaccttcacataacccataacaccaattttattcaccatctgtcgtcagcctgaagagtttctcagtgtcctgactgagtaaagctaagtgtttagtgtgttcgataattgccaaatattgcaaagtggcacaaatagatttagtttaagcataaatatgatttttttttttaaattcaaccttaatgcttcaacaagtatattgatataaaatcattggaaaattagatttttgattttttcactttttgtgaagcgcccaaatttgcacttttgtgaagtgacctagcaccttatcaaacattttcagtacggtttgtggaggtaacggtaatttgaaaaattagaatacaataattacctattcggcatgcgcaatgcgcatgtctatcgtgactcccaaacgtttaattttgtattgcttatttcattgcaaaaatgaaatttagctgggcatcgtaaaaatttcgaaaagtcacgcaatatttcagtaccaaatttccaattaaataataaaacaaaaaaatgtaacaatggaaaaaattgtgtataaatgtcaccgtgtcacacacacacacacacatcattggtaagtagccaatttcaaatgtaacgaaaatttcacaaattttcgcaaaatttagacaaaaaatggcctcaattaacaccagctctgacgcccaggtaaaagaaaattaattttttttttctattaattttaaaatatttataatttacaattaggaaatttatgcctattcacaatgtgaaattttaaagataaatcttccaacaaaacccagattgaattgaattgatatttttattataaaatggttttctcaaaccatacgcttatttttcgatttttgtgcttactttgcttttctgtgtttgatttctatggttaattaacgaattttatgtcattcataatacaacaacaattattaactaatttaattaaaaaggtatttaaattaattaagatttatttgggcttccgttttcgcggtccgtccgccgatttgattgtgccgccgttgcgctg

SEQ ID NO: 13443 - DNA, 1503 bp, Heterodera glycines
tcggcgccgcaagtgtcactttgggtgggcgccgcaaatgtcggcgccgcaattgtcattttggctgggcgccgcaagtgtcggcgccgcaattgtcattttggctgggcgccgcaagtgtcggcgccgcaaaagtcgagccgcaagtgtcggcgccgcaagtgtcactttgggtgggagccacaaaattcggcgccgcaagtgtcactttgggtgggagccacaaaattcggcgccgcaagtgtcactttgggtgggagccacaaaattcggcgccgcaagtgtcactttgggtgggcgccgcaaatgtcggcgccgcaattgtcattttggctgggcgccgcaagtgtcggcgccgcaaaagtcgagccgcaagtgtcggcgccgcaagtgtcactttgggtgggcgccgcaaatgtcgggccgcaagtgtcggcgccgcaaatgtctgcgccgcaaatgtcggccaatcacgacaccaatcccattctttttttacaactgattcccgggttttcccgcgggaatcccgttcccgccgggctctacttaaattcaacacatttaaattgcaccttttctggccttaagttgaagattgaatgtttcgtggcaccgacaggagcactaaacctcttatgtgcccaaggattcgcgtctttgaattggcatttcaacatcacatcctgttgccacatgacacgtcacattttccaaccgtaactagcattcatggctacggtatcatccacagagctggccaacaaactgagacgaaaatttcctgaaatatgcagcactgaactaagtcactgtacaaagatgatggcacttctgtacgcgaagccggaagccaagctcgtgtttaacccaacaaattggtcggtttgaatacgcatcgcgtattgttccaattttcgaaccaaatttggctccccattacactccccgtaaaaatgccataaaaatgaaaattctgtaaatatagacatttgaacaacatataatattttaaaccaattaatataaaaatgcactaaaatatgtaattaaatcaatgctataatattaaagaattcaaaatgaatttgcatgtcgacaaaaatttatttgatggggtgtaatggaattatgttcggtttgactttgattgtaccaatgggttgaacagctaaaaatagtgaaaattaattaattctaaagcattaaaattattgaaaaaataaaaatattcaaaatatttttaccattctttttaaagaaacgatctttcactgcacgcaattccttcctaaacaattggcgatattctgtgcttaaaaaatattttaatgaaaagttttaaaaagaaaaaaataaattttttaaattaaattaaatcagcaaattaaatattttaataaattaaatttggacctgtttaaaaaaagaataatagcatttgatccggcaacaacatttaaaaaagtgtaagcacaaaaagtaaattgccaaactccaatt

SEQ ID NO: 13444 - DNA, 1036 bp, Heterodera glycines
cttgcatgtttttacaataaaattttaatgaataataattaccagcatttaatccaattatgaaccgtccgatcacaaataaccaataaatgttgacatatttggcggctgtcagcaaactgaccccaataaatgccaacaaattgttgtacagaagggcttgtttccgaccaaagcgatcagctaaccgaccaacaaagatggcaccaaacataccgccaacggcaaaaatgcccacagcaattgccctaattaaccaaaattatgcgtattaagaaataatagagcataaaaattctttaggtttgtaataattattttttattaactatttaaatattattataaatttattttaatgtccattcaacccaaaaaatacgcctttttaaacaaaattagttttgctataaaaaaaatcatgcgaaccatatcagttccgtttcctcagcagcaattggaactccatacaacttttcatgtgattcaatgaaccaattccgtattaaatcagctaataaattttaaaaaataaatataccatttagtgttattcgaaaccaacgatttcccaagacagaccaaaaacccgagaatttttttgaaaattgagactagagaccgagtccttaaaaccagagaattttttttgaaactgttactagagatcgagaccaaaaaagctaagagttttctcaagaccgaaacttttaagcagcaataatagggaaatagttataaaaaacaaatcatatataaattaaataaaaaatgacctggtaaattaatgcatccgcaatggtacccaaactgaaaagaacttccaacggtacaagacaaaatttcaaaaattggcgttctttctgtcgatttctgataaaaaaaatagtttttatttttaatttaatttattttttctaaccacttgtttctcgtcagaagttttttcaagcaaattctccagctgttgttcatcaaccgaaattgaaacgttttcccttattttctttggcaaacattttttgtaaatattttt

SEQ ID NO: 13445 - DNA, 1605 bp, Heterodera glycines
caaataatggaaaaggtgagcaaatttttgttaacaaaaaaagttgttttagcttatcaaaaaaatgcatttgataaaatttgtgtataaatcttaacaagtaaatttttttattattttcatattcgtaaaatattaatagttaatcctttaattatttaaattttttattactttttcatattcgtaaagtagattttttattaaatttgttttataaaaaaattaaacgagtcgataaaacaccatttttacattttttttttgaaataaaatcaaaaaaccgattgaaaacatgtgaatgcgcctattttcattgtttgaagtatccaaattaatatttttccattaatattacttttttaatattcacaaagtaggttttttaaataaatttgctaagaaaaaaaaatcaatgagtcacaaaaaatattaaaaatttttttttttgcttttaaggcctgtaaagccaacaaattctcattttacgataatcttattgggagtgttaaaaatgattattgctaatttgacatttcttatcacagtcatttggacccactccttcccaaccgtttttagcggcaaaagtgacgccaaaaaatggtaaaattaaaaaaataataatttataaatctaatttttttttatattttatgtcgattgacacggtacatgccctcaattttgtgcatcgtcaggaagaaaatagccgaaaatcaaatagaattgatgaagaaaatcaaatttcatcaattataaatcagagtaaccctgatcccaagcattacaatcttggtagtgatcagggtactcttggcattcattttttgattttttatcttttaatttttaattttaggaaatttgcgcaaattcatccttcaatttaatgataaaatttcaacgcaaaatgaaaaactgatggaggccaaaaagatagccaaagatgaacaaaataaaatgcacgaaagatttttggtatgtaaatttaaaataataaaaattcttaaatttagtaaatttagaaaaaagaaatcagaagcattcagttagaccatccatttcaaaagtacaacataatcacaatggtattacgtgcacaaaacataacaattggacgttattttcttgcaaattttctcaatggaggaaatcaacagcaattgggaattgtaaaaattttatttaaaaatttacttatatttttaaatgaagtatgaaatacaaaaatccaaatcagtcccaaattagaggtaaatagcatgcgaagtaattatttgtcatttatcaaatacgcagtaattaggcgaccttagtccctattcttcaatttgaatgacgctcagaaaaggaattttcgcacatttgctaaatttgcgtttaatttattccaagcatcaattgccgttttgtttgttcattttgacactcgccttttatgaaataaattattttcaccaaagttttaggtggatttgttgatgaattttctgatatttacaaattaatttaattgattttgggttttaaaaattatttttgtagattgtccgtgaattgcaattgaaaaataaagtgttggaccatgttcgttatacagaa

SEQ ID NO: 13446 - DNA, 975 bp, Heterodera glycines
atagcacactcttttgaaaacccgaaaaatgataaattttgcagatttatttttggttttaaaaattcaaagaatttctcatcgtcaaaaaatgttgaaaatttaaaaaaatttataggtctttttttctaaaaatccttagggtttgttaaaaaaattataatttttgggtaatgaattgtaccagcccttctccctttttctcattcctcccatcgttccgggttcggcacccacccggtgctggtccattttcccccttctttttccttactttttttggctgacgtcgcgtcggctgctttttgcatcgccactttcgttttgaacctggcgaacagtttgtccacctcgtcgctaatgtggcgttgaatgcgcgggaaggaccataaaaatagaaattttcgaaaaatcaggattttttttcaagatttctaaagaataccgaacccccaaaaatgcatttttcctcaaaaatagaaaattttcacgaattttataaaatcctcgcccctatttttgtacctgtctccgggtgtatcggcgaaagcttccgccggcggtgaattcgacgcgtccgtccgccaaaagacggaaggaattgtctccgacgaggtggaacaggtcgacgaagaagtcggcccacaatggacagtcttcgatcaagcaatagcgatcacgacggttgacaagaattggtcggacaaattggcactgaaaaaacaatggggaaagattttggaaaaattcgatgggaaatcaaaaaaagagagaggaattttgaaaattttcaaaaaaacaaagccgtaaggcgtttataaatattggcttttaattttcaaatttttcttgccatacgtggggccattcaaaagccgaatgggtcggacaattttttggccaccatttttccgaaaaattttttttaatttttttttcaaatttaaaaccaaaaaaaaaccccccaaattataa

SEQ ID NO: 13447 - DNA, 2695 bp, Heterodera glycines
cattttcccccttctttttccttactttttttggctcatatagcgtcggctgctttttgcatcgccactttcgttttcatcttggcgaacagtttgtccacctcgtcgttaatgtggcgttgaatgcgcgggaaggaccataaaaaatagatcattttcgaaaaatcagaattttttttcaagatttctaaagaataccgaacccccaaaaatgcattcttcctcaaaaatatagaaatttttcccgaattttataaaatcctcgcccctatttttgtacctgtctccgggtgtatcggcgaaagcgttccgccggcggtgaattcgacgcgtccgtccgccaaaagacggaaggaattgtctccgacgaggtggaacaggtcgacgaagaagtcggccaacaatggacagtcttcgatcagcaaatagcgatcacgacggttgacaaagtattggtcggacaaattggcactgaaaaaacaatggggagattttggaaaaattcgatggaaaatcaaaaaaaagagagaggaattttggcaaattttcaaaaaaccaaagcgttaggtcgtttcataaatattgtctttgaaattttcagacttttcttgccatacgtggtgtcattcgaaagcctaatgggtcgggactattttttggtcacccatttttcggaaaattcttttctaattttttttcgaatttaagaccaacaaaaaaaccacccgaattataagttggagaatacatatgtattactggatagcgcaggtcgatttcgactttgaattttttatagcgaggtgtaaagtaaaactaaaaagttatggggcctcaaaaattttaaattttcccttgtgttttcccgttggactcgaaaaaacctcgtaaaccacagaaaaacttgaaaacaaaaaatttatgaaattaattttttaaaccaaaactaaactttaggaaactcggaggtgccatttccgaatttgccgtcagaaatttggaataaaatctttgatttttaacttttctttttagggggtgtaaaaaatataacacaacccaaaaatagggcaaaaacgaacccggtgatgagcacagagttgtcgaagacgaagaatttcatgtgctgtaaccccacaatttcgttggtccgttcgggcaacgcacttttgaggaggccgcgcaatttgggcgtatgaaagagacggacctgagaaatgtcgaaaaaataatttccaacgataaaaatgtgagcgttttgaaattttatgaaatttttcaactttttttgatgcaatttcgtagcccaaaaacgcaactatcatccccaaagaatgcactgaatgtcaatacaaaaaagaagcaattttgttagagcaaaacttgaaaattcgcggagttaaggcataaaaactaatgaatgctaaaagcattgaggaatttttgattaaaaccaaaaaaaactcacattttttcaaccccttctgctgatagtatttaaagcagtttattccattagggattgaaaaaaacttaagtttgaacccgtttttgggtcataggcgcaaatgtcgggtaacagggtgaaatgtagtgaaccccctggtccttggtggtcgtttatattttttgcttttcactctacttttatgcggagcgttcaaaaaaaattcagcaaatttttcaaaaaaaggaaaagggggggggggagggtagcaaatgaaaatttacacacctccacattgtcgtagatgcacagcggtgccagcattgtcgtggacgatttgccgtcggcggttgcgccgcgtgtggcacggaaaaagtcgagcaaaatgcgaactttgacggggcgtttggtcgccacagtttttgccgcgaccgccaaccgatggaccaatcgctgctccaacgcgtcggtgcccaaatagagggcggacagcacaacgcgacgctttgcggactcaacgcgttgctgaaaaagcgggggaattttaaaagcaaatagaaaaatcatgggccaaatctccgaattatggctggttgggaattaaaaacaataaaaaatgaccagaaaaattttcttagatatatgaattaatatttttttagtgtttctgcacatagacgcaaatgtcggggctccgtaaatactattaaattttttttggaaaatcctaattttgaatttctataaattttgttatttaaaattttagaggattggaggggcatccattgcaaaatttgcaaatgtttccaaggctttaacggggtcgctgattaacatcccgacatccatttgaccaattctgaatccaggacccgaattcgaacaaaaagtcgaaaattaaaatctttcgagattcacatgggggggggggaagaaaacgaaatgagaaaatcacgaaattggatttgatgaaaccaaaattaaaaaacatttgcaaatacatcggaaaaacggaccagtaatgtgttgtaaaaatggccgggcgaacgcaaaaaatggacggacgacgaatggacggggaaacaaaggttggaatcatcacaattgaacaatgaagaaaacaatggagaggaggaggaggaggaagacattttgaacttctactgatgggacactaccggcaaaggtgtagaattgacagaaaataaacttaaaaattttatttttgtttttcctgggatgaaa

SEQ ID NO: 13448 - DNA, 3459 bp, Heterodera glycines
agagaaagaaagagaaagaaagaaagaaagagaaagaacgaaagaaagaaagttattcgtttattccgcctaagggcattcgaaagatttcttaacgggagagaaactcattcattccggcatatttattggtcgaaggacaaaatcagctttaaggaaatagaaaattgtaatttaaaagtaattaaagcatcccaatttatacaattagcagtttttctttgagagacaaatgtcgcattttgaatcaattgaattaaagcacacaccttctttttcattaccattttaaattataaattcgcttctttttctctcaatttcttttctcggctatgtcgacgtcaggcgcccaaatttctattcgatgcgatgctcaggaattgctcatgggaatgttgccggaagggatcgaaaataatttggcttattcgtctgacgagaacggaatgccaaattcggtttcagaataaaaattataaaagagcacggcctcgaagtgatattgctctgtcactttaggttcgtacagcgcaaagaccggtggtcgtaatggtggcgccggaaaagcaaaaaaacggagaagagacaaaagttgggagagaaaaggacgagcaaaagcagcagaagcaaaagcaaatctgtggggagataaggcaaaagctgaagttggaagaacagtgaaaagagagcgaaacgatgggaggagagaagggaccgaagcggagggaaatgccgacgaggaaaagcaacttcttggacccggaaacagacagacttttggcaaacactctctgaacttagaattctgatgagaacgcggaaaacatctcatcgattaaaattcgatttcaaatgatagcccattagcggaaattattaattttaaatcaaatgtatagtttaatccaataaaagaaagtacttgtgacggagtcatttgtcagtttttgcgttgtttgttcagtgttaagattcattgtccatctgtattttatatatttagggcacagcggcccaattttgggctctcagtgcaaataggtttattatttatttagtaatcagaacgccaaaactttgcaaaacttaaaatttttttggaattttcccttgtaaaaatagaagagccgatctcgagttaaaaactagacagctaaaaaataaactgtgattcgatagagggggacaaaatatgggcctatacaaaatttcaaaaaaagttacccacaggaaaaaattttttcccatggcaaacagttcaatactttaattcttttttagccaagtgcgcaatttaaggccaaatcaaataaaactaacaatattctctagaattttcccttcaaaatgagcataaaatggttttatttgatctagtattgacaaagttataggctaaaaaatttcataaaaattatcgatgctgtacgtaactaactcattgaaaataatttttttttgacacgaaaacttttattaataaaaaatatttctgccttctttaaaagaagaaattgaaattaacacacaacatagggaggacttgaacctgggaccccccttttggtgactaactcacagaccactaagacgacaaatccagcataattgtacttggagcccaaaattgggccgctgtgtaggggcaaacgaatataatggcccattgtcctccgcttgatgagtctcaattagtaaattaggggggggggaagcctttgaggatgtgccgaaataaaataaaaggaaacaaagacgcggtagggaaaaggggcaccataaagggacaaagacacgacggacggtggaagaacaacgaacaatgggggtgattctcatttaatatgattgtttaaaagcatatgttcttgataaagtgccgatggtcccccaaaaaattgtcttcgacgtccccagtctctctgctcgtgaatatgattctttctgactaaattcgaacccttaaccataaaaagaatcttggttttttgttcgagtacaatatgttttataaatttgtcggactgaatggctaattcgtgactactatttcaaaaaaggggggctaccatcgactgtattaccatcatttttacccaatcgccaaaggcaatccctttcttccacagcaatgatgcattcatagaaatatcttgatatttattcagacaaattggataaaaagattaacgataaaaaggctattccgatggtggaaaaggaaaaaaatgtgtaaaataaaagaacaattcgaaatgttgtaaccaacatttttaaaataaaaaatttagttgaatttgatacgaaaggataagaaaaggtggttcatttcagttgtggagaaaggaaagaattcggtcacatttatagcaatgcgagttgtaaaaaaagcacgaacatacacaaaagaatgggatgctaagaaaattaggaaggactagcatcaacagacgaaattccccaaagctcagaaaataaacgaacgctcccatccaaaagaaaacccccgaggggaatttcgtcaccaaagaaagtcaatagactcattcacaaagtcgttctattcacagaacagagagagaggaaatgacaaaatcgtatggaagatggattaaagtcattcatcccttaaaaaagcgtttatgccatttatttgaaaagtgtcgacaccacggacgacggccctacagctccgcaacgtctttgacggacgatggatttcttaggagttggcatttcctcaggaaacagaaacagggaacggcgtcttcgactgtgcggcgagtaatccgcgatagaaccgacgtcgtttgagtcatcgcaaagatcggcttttttggcgtgaaccgacgaatgttttcgcgttgataaaaaatctgaaaatgaaataacgggttacctaataaaatggtttacttttaacataattaccaatttctattttaatatctctgtttcctcaccagtaactcgtgtctgtcccaattcgcttcgtcgtcttttcggcgtttgaatgctcttctgttgaagttttctcaagactgcgccacctttctctgtcctctttttgttacgggggcagtgaccagcttccgacccaaattctttcccttcgattagcatcggctcttcctccacaaaagcagagtgatgattctcggtgtcgctgttgcttgacgacaaattcaatggtgagagtgcgttcgaagcgcggtagaagccggggactgagttggcaggcacagcttcgaattcaaatcggctgtcagcactttccagcggacgttcagtttcaaagtcgaagccccacttgcatttgtaacgttcggaaagctcattgagaagtcgctggacaaattgctaaataggcaaaggtaaacatatccattttgcatttccatgccaattcttacttcattggtttcctcatctggcaaatcttcttgaaacagtcgt

SEQ ID NO: 13449 - DNA, 2219 bp, Heterodera glycines
tttgtccctcattttcttcctccacttttttcaccattctttcctcccccactccattcgtctgtcccataattccatccaaaatgccctttcatccaccaattcctcccttaaagactttattccaccaacgccccggtgaaaactgtgccaatgtcgcttcttctgccgtggttcggtctttctcgccagtgtggtcagttgcgtcttttgctcagctgtcgaagtttctttttagcaaattggtggccgaattcgtcggcactttgctcttcgttttcattggtcggtcttttgtcttcgtttcgccattctttcctttgtcccgttttaggcattctttccgccgtctcttcccaacattcggacagtgtccccgtgctcagtgtcgcttttggccatggtcttgccattttcgtcgtcatttcctcgttgggtcatgtcaggtgccctcttcgcccctttgttttttgctgttagccttccctcaatttccagcggcgcccattttaaccccgcggtttcgcttggcattgccctctccggcaaaatgcgccctttcctcgtccctttttattggttcgctcaactcagcggcggattttgcgccgcttttctcgtctctgttggtggacatcttcggctacatcctttgataaattattccttcagattgttaccaccaaaaaccaattccaatcggtcgccggtggcgccaccattgtgccctcgggcaccaatttgtggcaggtgagccgaagggaaaaagagagagggccatcgggtcttttgacactgtctcttccttcccccaggcactttgtgccgaggcattgctcaccgcactgctcgtcctctgtgtgctttgttgtgcaattgatgcaccagcacaaaatgctctgtttgccccgctggccattggaatgtccatttcagcggcaattctcggcgggtaggcatcatgaataaaaaaacgccaccaaaaccctcccgggcctagcgcctcaattagcggcgcctcactgaacccggcccgttcctttgggccatgtttggccgcttcgctgttcattgacgaggtaaggcaatgccaactctcctcttcaccgtccggttgtttaatgttctctgtttcccttagggcgccggttccattggcacaaaactcaccgacccaatttggtcccttcactttgtctattgggtcggcccctttattggcgctgcactctccgcctttctctacaggttttattctctcatgtcagccggccattcactaacaatggcttggcattttccttaggattttcttcgccagaggggataatcgtcttctcaaccgatgacaacgaaaaacttaacaaaaacagaaaaacccaaagaacgcttatttttgatcatacatataatagccaggtcacaaatccaaaatccggacaattgataaatcttttaaaaactcgtaaaaacagataaaatcctccatccaccttatgtattattgtattccgattgcactttttgtttatgtgttttgatcattcaaatttaaacttaaaaacgaacgacgaataaataatgaggtgagaataaagacgaaaataagcccaaagtgttgggattggtacagaaatacgactgatcaaaagaggaggaaaagcggggagagggggggggggtgctaattaaagtaattaaactgaaatgtgagataatatttcaatcattccgcccccttcccccgcccgattccagccgatcggtctcaaattttgcgatttcccccattttgggccacccccgagccgatcaagtccgcgcttctcgggcaatttcgataaatgaatttgtgcccatttggagacaatccctcgctttatttgttgggcggtaaggagaacatcggcaaggggtcgactgaagtctgaagggcaaaggaatataccaaaggaattgtaaaacccaaaatgaaaagagaaattacttttaaaatagaagtgctcttattgaaaacggaaccccgacatttgagcctatgtctaaattctgactcaaagctgaattttttgaagccttaccctacgtttagcagatgaggagggtaccgcaaaagataaaagatggaactgcctcgccatattgtgcgtcaaaattactcgtcctcaacttttcccttactcgacataatcctgcagaattttaacatataatttctc

SEQ ID NO: 13450 - DNA, 1502 bp, Heterodera glycines
aaaaagaaaattataaaatgtatatcggaaaacgacttaagtcatccggggaggtactcgagaaggagcagggggaggggaaattggacagggaaaatggacaccaaatttatattatttttaaaataatattgcaaaaactctatttttgtagtatctgattttagatgtgtgggggagggaaggggagttgggctgcatcacgacatagacaaacccttggcttcggaggatccccgagcaacgacttttttttttggcggcgtctaccgcaagttttttttactcctcggcagggctgatttttgtgctttgatgacgttctttccaaaaataaattctcaagaggaagtctcgagaaaattgctggggaaattattgaaaacccaatgcttttttggatggttaaaatgagaggggaatacaacccatgcacctcctcctgataacccgtcctcctcccccactccattacctcctggcaactcgcgcttccaaagccgcgttcaggtaaaatgccacccgtcccttttggccaagcaaagatgacactccactgcctttcagcgccgactgcgacagtccgttcctaccgatactcaaacgattctgaaaattactaaatgttgattgcgagaagggcatgttttcaatttttgtgacaattcccccattaactgtacgatttttcccaatcgcccatttacaggagcagaagaagcgattgaggaacgaacatcggttgaaccgtcgagatcgaaaatgtcttaacgggcgttgggtaaaaacaaaagcaacactaattatgaatgtcaccaaattcgtgggtcgtcttcagtccgcccattttcttccaattctgccaacaatctccgcacagacttaaacaaccattggaaatgagtaaagttaaaaccaaacgaaccgaaagtgcaaatgcgtcggtccccattggtaccaatggtcagattcttcattctgaaaacgtaatgcaaatcgaaccaataaaaagcaaggaaacaccaaaagtgccgaccttgcaactctcacaagggtttttcgtcggttgggcgttggccgcgcccagcaaatggacgctgggcttgttgtaggtggggatgtacacctgcttcagcttgttttctgtcgtgggagtgtgcatttgtccgatggttctctcactgtccatttctttgcccacctttttccgtgtgttttgtctttttcaattcggcgtatcgtgacgaagtcttccacatgtaataatactcaacaatgtcccgcattgacttccatggaagctgaacagaggcattttatctgaggggagaacgcccaactgacacagtccagtctgatgtcgtggaaatccttcccatacttctcgatggcgtcctcgaacagcgtcgattccgccgccgaccattcctccagctgatccctgcacagaatcggacccccaaggctcaccttagccaaacgaatttgcaagtgaccaaaaa

SEQ ID NO: 13451 - DNA, 2535 bp, Heterodera glycines
ttaaaaactgattaaaaaacttcataaataaacacccataaattctttaaaatgatacattatgagaatgattattgatctaatttatttgatgaataatttataattatttaaatatatttactatttaattaatgaagtaagtttttttaattttatgctgatgaaaataattttttataattatttaaattataacttatttttcaattaatctatttttgttcctattcaaataataacgcaaatattttgttttatttatttccacttcttgcgctcagctgtttaatatctttcaacagttgcactcaattgctttattttttgtgttattttgatttataatttttctattcattttcattatttgagcattagtgctttttaggattgagaataataatataagaattatttattaaattgaaagttttcatttgaatttaattttgttgacaaagaacccacaattaattcaatcagtttggcgttttttgtatttaatttttgtttgtgctattttactttagttaattatagactttttaaaataattttccattttaaatattaaaaaactaatgaataaataattacttttttctgtgatttctattcctttaaaattttctcttcataatataaattttattcgcatttgaaaaaacgaaaaggagaatgattaagattcatttatagaaatttgataaataatttaatatgattgagttgaaaatctgaataagtttcaaatccttcgatttataataatatttcatcgaaaatatcaatcgaactaattagttcagttatgcttatttaatgatcctcattgcagcttaatattattcatgtatgaaagataattttacactcaatataaattttttaataaatttcatattaattttagttaggcattatttttgcttaatctattttcgatttttaaatttatattaaatttattatttgtaatttttattgcggtttaattaatacaataatatttttatttggaacaatatttatggtaataaaatattttttctatggtaataaaataatattatttttaacaaatattattattaaaacacgcatgatttatcaaattttgtacaacttttattagttttcgattacaaaaattttgtcaattgtttttatttttattttggacttaatgaataagctaagttttttatctgtctattgaaatcgtttttcccactcaccagaattcgtatctacgttacatagttacgacattaaatacctatttttgcttttttccaggtaaaaatttgtttcaattaataatttaacaattagtatctgcgcttataattgaaaataaatttttgagggctaattatttatttaacaacctcattttcggtaaaaagcctcatttttacaaatttgttcaaaacacttaaaatgggtgatgcgacatttgcggcgatgagacttgcggcgttacatttgcggcgcccagtcaaaatgacgacatttgaggcgccgacacttgcggcgcccccataattaatgctaaaaaattaaatctcaaacaccctattgttttccttatgaccataataaattctttccaaaagtaataaataaccaacaattaaatatttcagcggggctttatgcttttgaattttgccgattttataaatttttaaggctgggcaccaacgggattcgtaaggtagaagttagctgaacgcggaaagcggcggtaagaggcggatttgcctcagaaaaacaatggccaattttccaaagaactggatttccaccactggttaacattttgcctatttctttattgaaacggaggaaagcatggaataaaataaacttttttggtccggggtcattaattctgcgccgcaaatgtctgccaatgttaaatgttcatgttatatttttttgattataaatgatcaatttaagcaaacttttgttagaaaaaaacattttgtcaaattctgagcatgaaaagtcgaagttgatttttttgcggcgcgttttttccaaaacttttggagaacaagagtggcccggcggtgccgataggcgctgccgggggaaaattatttagcagattttcattaaaaaatactaattttgtggattttgggaaaaaaacttttatgcaatttaacaaaataatcataaaatttataagattctgacgattttccccaaaagcctcaaaattactcaaaaagccatataatcctcataataggttattaattttgtgttaaatattataattatttaaaaaaagaagaatttgattatttatattattattaataatcaaaaatattgttttgaatttaacattttaattaattaattctctcgatgaatgtgtcttttggcttggcatccatgtccacttttttggttaaataaaaatattgtaaattttctgaatattataatatttttttctacatataatttaatgtttaacaaaattaaatatacttttttatatttttctga

SEQ ID NO: 13452 - DNA, 811 bp, Heterodera glycines
  unsure (1)..(811): unsure at all n locations
gccacataatccatcagaagtaccgagaaagggaggcgatataaggaaatattgtatnaatctgacttgccatttccaatttaaaaattatttaggaaaacaattttttaaaatttaaataaagaacaatttctatataatagacagacaaaacctagaaacaatgttcgacggtacctatagacaccaccgctcatcccccttctgttccttaaaagtttttttgaaaaagatagccgcaaaaaatggtagtcaaattcgatgttgagatcgcaaaaaattcggttaaacctcctccccctttccatgtatttttaaaccagggcttccatcgaaaatttttaaaaatataaacagaacaccaaggccgaaaaacaagagtttagggttaaaaataagaacattttgcaaaattttttcaaatcagttatttttacaattatttgatcaaaatgctatcaaattttatatttttaatgatttttatagaaaattttttatatttttaaatattttttggtaaatgaatttcttcttttattgttttttgtaagtttctctcggctttttccaattagcaacgactttattgataatttttttaaattcacttattttatctctggcttaaataaatcttttttttcaattattaattaaaatctaaatttttaatattttggtttctttttattcgctaaaaattttaaacagaaattgaaattgctgttcataataatgatatggtgtaataatgatttgatttagcattattgaattttcaanttatattttcaanttatattattct

SEQ ID NO: 13453 - DNA, 3988 bp, Heterodera glycines
  unsure (1)..(3988): unsure at all n locations
tccaatccaaaaatgttcttncatcggtcgaaaacgaagaaaatgggcaaaagcggcgtcgcatggggaagcggacgctttgcggcgcggttccgtgcgtcggcatttccccgtgccgctggtgcgcttcgctttgctcttcgtcggctttgtctgcaccgtttccgctccgttcgctgaccacggcagtgtccccagggcacgcggcgccgtcgcccgccccggcaaaaaattgcaattcccttttcagggcacgagcccaactctgtacgactcggaggatttggtggtccaattggacgaccattccttcaacgacaccgtcttttgctcccacgccgacgcggccttcccaaaggagcagaaatgcacggcaatggtcgtcaaattttactcggattggtgcggacattgccgaacgtaagtgaattgaagtgaccaattcgaatatttatttattttatttttcaattgttttagctatgctcgcgtgtacaaagcgttggcggatgaccttcgcagttggaacggcatgctgaagttggccgctgtaaagccaaaaagtggccgcacttcccaattggccaaatgcacgtcccttgcagataaactgcgcggatccgatcaattcgatgacgtgtcgcttcagcggaatcacccattacccttacattaaagtgaatggacggagtgccgatcggactgatcagccaaaagccccaatttttaagtatttcccccggaacagcacgtcgatggacgcggccgaaacggggcgactgctccgatcgcaccaaagcatggccgaaatgagagacggtgagggggcgaaaggaatggcgatagacagagggcggatgagagacttcgactgactgtttagagatcactcgcgcccttttggacgaatgggagaagggccgttacgcggattggcccgacttcgaaccgttgggcgagtgagtccccccccccccgcgcagtgattaattaaaaatgccgaaaaaaagggtggagacgcacagcgaattgtgggaaggagtcgacgcacacattcagacgatggtggtcatattcgagaaaagtgtcgactcactggtcggacctcaacttttgttggacatgcaaaaacacagtgacaaaatcgttgctcgaaggcacgtttgactgagttggcttggcttggcttggtttggcttggcttgggttggttttcctgggttggcttggcttggcttggcttggcttggtttggcttggcttggcctggcttggcttggcttggcttggcttggtttggcttggcttggcttgggttttggcttggcttggtttggcttggcttggcctggcttggcttggcttgggtctggctttcctgggctggtttggccatgggaccacattccgtcgatttatcagtcccttccctgtcatcgatcataatatcaataattatctggacattaaagatgtgtcgaaaactctctcagcacggcccttcaaatcgtcgacttcccaacttttgccgtttttcggcgtggcgagcgtttccccgttttcgttgccgagtgattccctctttttctgtcactttccttttctttattttcttttttttatctttcggctccgtcgtgtgctgtttaacgagttcgagcagtttcttcgcgatgaaagcacaaatgcgccggtcgtagcacttccgcgcactttttcgcgtagaaagggaaacggcggaggagcggcgcaacggacggaaagtttttgcgagacgaaccccgaagagtgagcaattggtgtcccagtaggagcggggccaagcggggtacgtactgcaaaggtgtgaccgcaaatattgccatttggtccctccctgtggtacgtacccctccctaatgccaatgggagggaaaaggaggaattaaccaattcatgtttaggtgcaagaagttatattttacatccgagttggacatgctgaaaagcgtgcgaatgggtgagctcagaaacgaatgaatgaatgggtggtgggaaatgtttatatatgtttataccgttcaattgaaccatttatcgcttttcaaaatttacagccctcttcaacgacctccaaatcgtcgaaggctctcatctcagcggttccaatcttagcgcccttttcaattttgtggatttattggccaaagtcaaacaaatgaccaattagcaaatgctaattaatgttttcttttctttagcattttccgtacagcacagaagaaggagaagaagcggacggaaatcgcactgaggtgaaagaaacgaatttggaggcgaatgccaacaatcgcttcagcgctttctgaacgcaagtggacgcgcccgcgttgtgttcagtcatttgagggattttgttgagagtgtcggattagacggatcggtcgctttggacgattggaaaagggaatttctgcgagcagaagttagcaaagggaagagggattaatcgcaatcagcttaattaccaccgatcattccaatgagtgaaggccgatcaaggaagcccttttcccgtgacggaggaatgggaacactgcaaagggtgagaacgaaatggcaaggcaatggggggaggggcactatttgaacagtgatcagtttggtcggaaggtgatccttctgatcatcgcgatcggggagtggtccctctgatcactctgctccgagcgtttttctttcccatcaattttgagtttctgtccaattttctgggccctcccccccctcgccctttgaaatgtgcgaccgttttgcagaagttcgcccattctccgcggcttcacctgcggcctttggatggttttccattcgctgacagtcaatgcttttcggcagaacagtaaatgatgaatgtgtgaagtgattgtgcattctctgtgctttcgcaggtgatcagcagaagcagttccatccggtcgccgttcttctcaccatcaaagattgggtgactcatttcttcgcttgtgaacactgccgcgcccatttccatcggatgaccacaaaaacggccaaaattgaggcggcggtcagtcgttttcccaaaattcctctcacttttctttgctaaggttcgccaaaaggaggacgtctttctgtatttgtggaaggcgcacaatttggtcaatggtcggctgaggggccgcgagacggaggaccccaaattccccaaataccaattcccgccaaagttcctttgccccgagtgccgcaggggcgacaaattcgacgagggaaaagtgcgcgaatttctgctgaaatattacggccgagtgagaccaattgatggagagcagcgaacgacggagaacggtcgcggaaacggggaacacggcggaggaggggaggaaaaggaagaagaagcggataagcagcgaaacgaacggatgccaaaagtgatcgggggaacggcggaggaagaaaagtgatcaaaggtaaaagcagaggagaaaagtgatcagagaggaaaaacggaggagaaaagtgattggaggaacggaggaggaagaaaagtgatcaaaagaaaaacggaggataaaagtgatcagataggaaaaacggaggagaaaagtgatcagagggaaaaaatgtgatctgaggaaaagcggaaaagaaaaagaaaaatgattagaggaacgatggaggaagaaaagtgatcaaaggaaaagcggaggataaaagtgatcagataggaaaaacggaggagaaaagtgatcagagggaaaaaatgtgatctgaggaaaagcggaaaagaaaaagaaaaatgattagaggaacgatggaggaagaaaagtgatcaaaggaaaagcggaggagaagaaagatatagcaccacatttgatttcatttgcactttcaccaaagcatcgtttgtattctcttttagagaanacttttanaataaattcccanatccgtaaacttattctttatagtgtctctgagtctg

SEQ ID NO: 13454 - DNA, 2300 bp, Heterodera glycines
  unsure (1)..(2300): unsure at all n locations
ctatgatagtaatcctgcttagtacgagaggaaccgcaggttccagacatttggttcatgtgcttggtcgatagaccaatggtgcgaagctaccatctgagggattatgactgaacgcctctaagtcagaatcccgcctaggcaagatagcaatattcttgctccccggtgtcgggaggcactacttatgcgccgcttgcggtgcagcacaaatgccccagcatctggcccgatgtgcgtgcttaattgctcgcacattgccaaagccgtagcactcgtgtgccatggtggaacgtcggggcgcaaaatcacttgtatacgacttgactactggtcagggggttgttagcagtagagcagcttttacactgcgatctgttgagacttagcccttgatcggatgatttgtcttctttttccccctttactttttgtgccaacaacattttaggtacaagtacatgagaagggaaggctctcttaagggagtcaaatgcctcgtcagtcaccatgaaattaggtagaataagttcttgactttgcttttttttccatttatttcaatcggctagtgctttagggttttgtgttttgactttgcttttttttccatttatttcaatcggctagtgctttaaggttttgtgttttgactttgcttttttttccatttatttcaatcggctagtgctttaaggttttgtctttgactttgcttttttttccatttattccaatcgaccacgttaattcattctctatacatttagtgtcttatttcatgaaattatattaatttaattttaaataaagaggcaaatttttacagaaaataaatagacgctgactaattagctaacatttataaagaaagtagaaatttgattaaatgcatatacaatatacaaaatattacttttttaaatttgtataaagttcctattttgtctttgactttgcttttttttccatttatttcaatcggctagtgctttaaggttttgtctttgactttgcttttttttccatttatttcaatcggctagtgctttaaggttttgtctttgactttgcttttttttccatttatttcaatcggctagtgctttaaggttttgtctttgactttgcttttttttccatttatttcaatcggctagtgctttaaggttttgtgttttgactttgcttttttttccatttattccaatcgaccacgttaattcattctctatacatttagtgtcttatttcatgaaattatattaatttaattttaaataaagaggcaaatttttacagaaaataaatagacgctgactaattagctaacatttataaagaaagtagaaatttgattaaatgcatatacaatatacaaaatattacttttttaaatttgtataaagttcctattttgtctttgactttgcttttttttccatttatttcaatcggctagtgctttaaggttttgtctttgactttgcttttttttccatttatttcaatcggctagtgctttaaggttttgtctttgactttgcttttttttccatttatttcaatcggctagtgctttaaggttttgtctttgactttgcttttttttccatttatttcaatcggctagtgctttaaggttttgtgttttgactttgcttttttttccatttattccaatcgaccacgttaattcattctctatacatttagtgtcttatttcatgaaattatattaatttaattttaaataaagaggcaaatttttacagaaaataaatagacgctgactaattagctaacatttataaagaaagtagaaatttgattaaatgcatatacaatatacaaaatattacttttttaaatttgtataaagttcctagtcgtatgtgctttgcgttggttaattggcgtgggtgagtgtggtggttgggccgtttttgcgatattgtggctggaaaaaagaagcgatttcgctgtggggagcgcggccgtctgggtttaagtgcttgcttgcgcttgtgctcggcattgaacggtgatggctgctgctggggtgccacctttgtcgtggcctcagtttctccagcgattggcagctgtcgaaatgaataaaacatgcagctcngtctgtgtgttaaagaaatttggcgagttaattgacttgtgtaaatgttgcctaaggcacaaatgctgtggggaactcagcactggggatgctgaacctaaagtctggtggttggtgttggtatacgagtgagtgtcgtattgccatggttgacaagccctatgag

SEQ ID NO: 13455 - DNA, 4117 bp, Heterodera glycines
  unsure (1)..(4117): unsure at all n locations
gcagctctcggtggaaatccacttgcacaaatggctntggtagaaaaaatcggaagaccgcatcattaaaagaaatatctgaaatatcattcatctaaaggattttttagggctatcgcttcgcgaacggagtggggacaaagcaaaactgcgaaacggcgtgagaattacgccgcaaatggaaaaaacaattaaattttgaaattttagtttaatgtggtacaaaaaagtagccgatcgagttgcttcacaagttaaattgactggaactccttccattcagcgcattcgaatacctgacgaattagtatttgttatatcattttgatccaaaattggttgttttttcataaaatttcataaaggagtcttcctcgattacgggcactttgctggacaataacgttttttcctattacaaatatctcgcggaaacgggcgacatgcaagcgattgtgagtcgttgtcagtttttaactgtggtgggattggtgttttagctcggcttggctcagctttatctaaccggcgggaagggagtggcgatggatttggtaaaaacaaagaaaaaaccttaaattttttaaaaatttaagaattcagcagctaaatattttacaattgcgtctgaggccggcagcagtcaagcgaatggatatttgggcaaaatgtacttggaagggacgcacgccactccgcagaacaacatcaccgcctttcagttcttcaagaaggcggcggacaaagttcgttggggttgtcaagaattaactacaataacaaatttggtttgtcaattttggcacctttttatgcaaaaatagcgggcaagaatttttaacttaacggtaacatgtgattcactgaaaagggaaatcgactactgacaatttcaccgtgaaaaaccttcgcaaatttttaaattaaacaacgattgtactagtaaatagccttttacatgtccgtaaaattttttagggcaattccatcggtcaagcgggccttgggatgatgtttctttacgggtacggggtgaaacaagagccacagaaggcgttgaaactgtttgcacttgcggccgaacaaggctcacccgatgcgcagttgcacttgggacaaatgtattacaagggattgggcgtgaaaaggtcgttttatggacgaacattaatgaaccgacattgtttttttcagggatttcaagcaggctctgaaatactttcagttggcgtcccagtccgggcacattttagctatttacaatttggcacaaatgcatgccaagggcaccggagttctgcggaactgtcgcgtggcggtcgctctgtacaaaaatgtggcggaaagaggccgctggggcggacgctttatggacgcgtatttgcgcttccaaaacggtggcgctgtggatgaggcggcgtttcgttatttgtttttggccgagtttggatatgaagcggcccagacaaactttgcatttttgttggaccgtgaggacacgcatttgttcgcaaaggaggaggcgtaccgcagggcgttcatgaactggttgagagcggccaaccaggactacccggtagcccgtgtgaaattgggcgactacaaatactacggactcggcagcgagcccagcatggaggaggccgcggagcactacaaattggccgccacttcccatcagagtgcgcaagcgatgttcaacttgggatacatgcatgagcatggacttggcgtgcaaaaggaccttcacttggccaaacgctattacgacttggcggccgagacgagcacagaagcggtgtggccggtggcgatggcactgatgaagttgagggtggagtttatgctcgaataccttttgatggtaaacccggaaagcgagatttgagcaaacaaatccccggaaattcagaatttctaccaccgcagtccgtcgcttgatctgctggacgccgttttgggccccgactgggacttgtacctgatgagtctgctcctcggacttatcgtctggctggcctattgttacttcaggaacagacaaaacggcggaggaaggaattagcgaagaattttatatcggaaggtgtacactgacaaatgagtgactttttctgtgatttgctatttattttatttatcagtaaaagaaatatttgcattttgaaaagaactgttgccgattacttatcatatctttgtttacctaaatctttgttgatttttaaacttttgattgttacaaaatccatcaaagcttaaatttgtctccgtccctttagttgtattttattggccattattttttctgttacagttcgatctgaagtttgaaaatgttagaacggcttccgtctcagttagtgtcacgaagcgcgagctttgtccaaactcggatgacggcaaacaccgtcaattttttcatgcgtcgaaccggcgacactttgtggaagacggtgacgaacgtgtccatgggagggatgaagcgggggagggcgcggacgcggcagcccatccgaccgttgccccaattttaccgagtcggcatgctcaagtcgagtcagtcagtcaggcattgacacttcccaattggaaaatgccgtcattcattaggtccgatgcgcatccgttaccctgggttaaatgcgcccattgtcccgcaaagtgttgccgaattggcctcgagaccgttttttgttgaggaacagtcggagcaggaaagggaggaggtgctgcactttgtgaggacccaagtggccaagaagagcagtcagaagcgccatttgtgcaaggagcgcctcactccgctggagcggggcttcagcggcggcactttcatgggccaacgcatgggaccgcccccggacatggacggggcgaacatggccgacttcgagtgcatttgtctttttgtaagtaacaaaacagcgcgtacatatgccgaatcacttaagaccgaccgaataacggaaatgcattcgatcagaggacgtgttttcagcacgagggcactcgtttttgtcggcaatgggaacaaagttggcggtgagttgggaggagggcatttattgtgcaaatttgtttttcgaaaggttttgcattggcaagggcttccggcttcaaagtgaatttggcaattgcccgtgccgtgaaaaaggcggcgcgtgaccttttccacatcgaattgcacgaggacagaacagtcttccaagtctgtgctgctgcgtttgcgttttgtttttcctcacattgattattttaggactttttcgccgagtgccgatattcgcgcattttcgtccaacgggaagcgccagcaattccaacgatgaccaaaaaaagaacgtccattgaattgtgcgaagcaacacaaattggacacagggaagaacttggccaattggtttctccaaaaccagcgaccgatcgtacagcaccgaccgccgatttcatgtaaaataccaaatttcgatgaaatggaggggggggggggccctttcccattgccatataaattatgcctttaaatcgttaagcagaatgggcctccatcaaagtccatcgatgccgccaatggtgatgaaggcactagcggcaaacgacaatgatttcacaatttcttcaactgcttctgatgaggcagcaacaacaacggaaggcaaactgacaaagtccgcaaccggtgcacacatttccgccgacccaacactctctcatatcgtcgacattggcgcacaaacgtcaacagccgtacaaaatgcaaattttcctcgaggatcacgaaatcgccaaacttttcatggacatatacaggtcagtagcaaaaatgaattacaggcagcagtaagccgaagtgatgtatagaaaaagataattcgaaagttaaaagtatttttaatcagattgccaccctggtgtttgctgttcttctctttaactcttttttcgacgttggttctgcgcaaagtccgaatgtcacccaaaatatctcagcgagtacaaaggatttacaccatgaagcacaacccggcggcagcagaaacggtggaatgcctctctggtcttggttcctcctcagcggcatcattttcatcgttgtttggttatctaacagttt

SEQ ID NO: 13456 - DNA, 4008 bp, Heterodera glycines
  unsure (1)..(4008): unsure at all n locations
ttaattatgcacttttctacctaaanacgacaagnttcgtgtattnntanaaattgtatcttctattccttaataatntacaaattgtgtcttctttctcttctaaaaacgacgttcnncaaatgtttaataattttcaaattgtgtcttccgttgcttaattctgcatacatgttaatgtgtttaattatgcacttttctacctaaaaatgacaagttcgtgcacataataaaaattgtatcttccactccttaataatttacaaattgtgtcttcttgctcttaattatgcatttttctacctaaaaatgacgttcccaattgtttaataattttcaaattgtatcttccattgcttaattctgcatacatgttaatgtgtttaattatgcacttttctacctaaaaacgacaagttcgtgtattttttaaaattgtatcttctattccttaataatttacaaattgtaacttctttcgcttaattctgcacttttctacctaaaaatgacgttcccaaatgcttaataatttacaaattgtgtcttccgttgcttaattctgcatacatgttaatgtgtttaattatgcacttttctacctaaaaacgacaagttcgtgcacataatcaaaattgtatcttctattcgttaataatttacaaattgtaacttctttctcttaattctgcatatttctacctaaaaacgacgttcccaaatgcttaataatttacaaattgtaacttccattgcctaattctgcatgcatttttattaaaaacgtgaataaaacgacaaaatgatacaatttttggtataaaatagagaaataaaaggggtccatgtatgagtacgtgtgtgtatggggttatgtttatgcgtgtggaagagagatacaataaatggtgaacaaaatacaaaagggtacatatgtgtatgtgtgagagagatacaatgattggtgaagaaggtattacaatgtgtgctgacaaaatagttacaatgaatggttaagactataaacattataatcggctcctacaatacccttcccaacataaggctgataacatttttgcatagagcttgatattacagatccaccatcacgaatattgggtctaataaagtttgggtatattacattaattggttcaatctctcctgtttgagcataacgtttgacttgctgtttttatatctaaagccttggttgttgatcacatcataattgagtgtcaatccacggagtttaagcacgtattccatttccgcatcatgtagaacatttatacgtcttaaagccaacgcatactattttgcaccagcagtgtagaattctacgatttccatcaatgaactgcttatagtgtcgatcttattcagctaaaaagcatcgcgtagatgtgagaaaacaagactatccgtgtcggtggagagtacttaacgccgcggctatatcatcatttctgaatagttttattacccactttttttattttcgtaggtaatcaaaacatgatacacctttcaatcctcgatggccgaactattatcccaaatattctccaaaatcaagtacatcattattgaagtaaagtctgttaaaggctgtaatttcgtaaagaaatatgtcgcacaaattgttcaagcatagtttaacaatcctactcttcttggttcacagctatctttgttgggttaagatttctaatttctctttgcactctcttacaaattcagcttccttctcacacatttccttttatgtcagtgtcaattggtaaactagcgggtgcgtgaaccgtcggatctggcacagggataaagcgcttcgcgctttgggagcttcgctacctaggctgtaaagcgattcaaattgattgaattggttggagattttttttgaatttttaaaaaattaaaagaagttcaacagtgattaaggccgcttcgcggcctcagacgggcgcttgcgcccgtttctaaatgtgggctattaatgccgcttcgcggcctcagtcgggcgcttcgcgtcggtttttcaatttttgttggccttggacgggcgattcgcgcccgttttttaaattcgtttaactcatacgggcgcttcgcgcccgttttttagcttgttaggccgcttcgccgccttggacgggcgctttgcgcccgtttctaaatttgttgggcgattaaggcagcttcgaggcctcagacgggcgcttcgcgcccgtttctaaatttgttgggcgattaaggcagcttcgaggcctcagacgggcgcttcgcgcccgtttctaaatttgttggactattaaggccgcttcgcggcctcagacgggcgcttcgcgcccgtttctaaatttgttgggctattaaggccgcttcgcggcctcagacgggcgcttcgcgcccgttttttagcttgttaggccgcttcgcggcctcagtcgggcgcttagcgcccgttatttaaattttgaggtacaaaagtgattaaaagaggtacaacagtgattagaagaggtgcaactatgattaggagaggtactacaacggtgattagaagaggtacaaactgtgattagaagagcaacaattttcaatagacgtaaaagttgagtaaatcaataacgcacaccatctcaaacatgagaatgtaataaacagatggcatataaaaaaaatacaaattatggacaataaaattaattaatttgaaacaaaaaatttattcatcaaaaataatttaatttaaatttaaaattatttattaatttttaataaaacaaaaaggttcaaattaattaaaaacggtgaaaataacttaaaatgcatagaaaaataatatacgccgcccggattcgaacttccccccccccctcaaaatgatgccccagaatccccaatcacacagggattctgaggtcttaacgatgtcaaaagtaaaatctgatcacgtattcgtgatcagcgtcataaaatagccctaatgacatgttttttgaagattttttgtgaaaaaatttttcaactcaaaaatcctatgctcacccctttggtctggaatcccaaaatcacttttatttttataacatttttcaaaaaagtgataaaaatgtgaaataaaatttataaaatagagctaaaaattgcggatttttgtagcaatctacttttcctgaatatcttttctgaagcgagttataaatttttttctgaaaatccgaatttttccagaatttctggaataacttttttatttttgaagacagaaaatccaaataaataacataaaattctcctgatttttctctatttttagagcttaagttcacttaaattgaccaatccttcactgtgttatgaattttccaatattcgcccaaatttcagagggtcgaaaaattgccaaatatttttgaatttttaaaaaattctaaaattttctaaactgaaaatgaacatcagatttgtgctaagcaccttaaaaatacccagaaaaaaatttttcaccctatttttcaaccaaaaaaaaaattccgaaaatttctagggggcctagctcgaaaatttttgaaaatttccggccatataatacactattcgaagaagaggtacaaaagtgaaaaagtgatagaaaagtgattagaagaggtgcaacagtgaatagaagaggtgcaacagtgattagaagaggtacgacagtgaaaaagtgatagaaaagtgattagaagaggtacaacagtgatcagaagaggtacaactgtgattaaaagaggtacaaatttgatgaagaggtacaaaagtgattaaaaaaggtacaacggtgattaaaagaggtacaacagtgatcagaataggtacaaaggtgattaaaagaggtacaacagtgatagaagaggtacaaaagtgattaaaagaggtacaaaagtgactanaagaggtacaaaagtgattaagagaggtaaaaaagtgataaaagaggtacaaaagtgatta

SEQ ID NO: 13457 - DNA, 990 bp, Heterodera glycines
tagaagaggtacaaaaagtgattaaaagaggtacaaaagtgactaaaagaggtacaaaagtgattaagagaggtaaaaaagtgataaaagaggtacaaaagtgattagaagaggtgcaacagtgattagaaaatcaaaaaaataaataattaaattctttaatgtaaaaatttttttttaaataatctacaacaaatcttcagattagttaaaaacattgaaaataacgtaaaaagtcatagaaaaataatttacaccggccggattcgaacctaccgcccccccccccccacagaagatgactcagaatccccaatcacacagggattctgaggtcttaacgatgtataaacaaaatctgatgtcagattagtgatcagcaccctcaaataaataatgaatttatattatagagaaaaaaattgtggatttttgtagtattttacttttctcaaatttcttttcagaagggagttctgaatttttttctgaaaaatgtaaaatttccagaatttctggaataacttttttcatattgatgatagaaatttcaaataaatcccataaaattctccttatttttctctatttttaaagctttattatagttaaatcgatgaaaccaccaccgagttatgaattttcaaatattaggccaaaatcccgagggccaaaaaattgccaaaaaataaagaatttttaaaaaattccaaaaattttgaaacgaaaaataaacatcatattcgtgctcagcacctcaaaataccccagaaaaatatttttgacccccattttcaacccaaaaaaaatttccgaaaatttctagggggcctagctcgaaaatttttgaaaatttcccttcatatagtataccattagatagagcttaaaaagctctacaattttgctctaaggcaatttttggataagatcaacccccgatgagttatgggaccgggactcaaatgtcccgctcaggccaaaaaattt

SEQ ID NO: 13458 - DNA, 1334 bp, Heterodera glycines
tcttttgtagtcggaagctgacttttgattttttttaaatctaaaaattaatcacattaaaaaatatgaaatataaaattactgtactcccctataccgtactgtatataataaattgatgtcgtagcaaagggaaaaaaatttggataatttcttaacaaattcgttaaaatttcttaaagttttccttgcgggccccaaaaattcctgatttcgcttaaaaaaaattggctcaaatcgcaaaaaatcagacttttttaaagtgaggcggcgatgggcaaaaataagccgaagggttcaatgattaaaaggcggtaaaagaaaaagcggaaaaaaccaaaaccaaaacaaatgctactcaaaccaagatttttaagtgcttaattaaataatttttttttattggacaaattttggagcaaattaaattaaaatcaagacaaaaaatagtatttcttatgtaattggaaaccgacttttgatgtcttgaaaatttaaaaataataaaatcctgattttgactaatttcttatttgttagggaaattcctgaaaagtttggctatttcttaacaaattttcgtcaaaattattaatgtttttaccccggtaccttgaataatcccgctaatggaataaggggaaagggaatgaagcggcgcaaacaaatttacattgaccaggatatgaatttaaatgaaataccgtaattcctcgattataagccccggggcttctattgttcaacccccttccaaagggggcttccattcgagggggggggggcgtataatcgagtaaatacggtcggtatatgctagtcggaacaaccgccatccgctacaatatttgtgtgctatttctcatcgtatggctgaacctatttagaaaaaaaaaaattcaaaattcattgtttttaaaaatctaagtttggtgtccgattttcttgaaatgaaaactttctcttgatgtcggattttccgccgctgtcgcattttcagtgagccaaaataattgttccgaagccgagaaaaaaagttcagtaatttttaaattgggagccgaattgaatcgatcttcttagagctccgaccaaattatattctgcttcttttttagaacaatccaaccaaattatgcacaaaaaacacaaaatgtagaattgtggaatagtccgattagtgtttcataaatgtcaaaaggattggaaaataatgaggcaaaaaaaggaagcacagcctcggggatcatcagtgggacttctccaattctcaatggtcgactgatcagtagccgggggcggtgcggggcggtgggcagtggtctgaaagccgg

SEQ ID NO: 13459 - DNA, 1361 bp, Heterodera glycines
cactcacagcattggccactggctccctgtgctccgagctgtccgggctcgccaacgcctcccgggttgccgggtgcgccggggtttccgccgtcgccagggtatccttgagggcccgggccgccaggctggccgggctgtccattctcgccgggctgtccaggctggccagggggtccttgtgggccaggcggtccgacgacgggcggaccctggctgagtttgccgggctgaccgagttgcccggactcgccgggatttccgggctgtccgtcgggtccaggaggtccctaaaaacagcgggggatttacaaaagcatgcataaattattcaggaaatgctgacaggttgtccggggcggccaggcgatgcgggcggtgccgactgtccaggttggccaggctgtccctcgggaccagggggtccaggcggaccggggagtccgggctgggcagcatcacattgcggcacgcatccgccactgggcgggtacgggcgaggcgctgcctggcctagagaagaatttacggtttcatgaaattccaagtaaaccctttgtggacctggtgcaccgggttgtcctgagcctccgggttggccatccccgccgggctgtccctgtgggccagggggaccgggcaggcccggcggcgacactccgcaaccacagcagccgcccacttgacgcttgtgacggctgtcgtgcgtcaccttggagtaggcctgggtgcgggtgacctaagtttttagaattttttgtttgaaattttccgggtctttccgcccttcgccttcgttgattttacctcgcgccacatgttgccggagcgcattttgcagaagtccacatcgttttgcatttgggcgccaatctgctggaagtgctggtaggcgaacggcacggacagcacagcgatcaccgtggccacggttgacaggcaaacgccgaagaatgccaatgtgcgcagcgactccgcctcgcgctgggcagcatttttgtcaaaatcgaccatctacatagacagaaatttagactggaattgaaatttgaatataaataattatatttaataattgcatttcgaatgttttttttgtctagctcaaaaaatcaaaaaaattgggattgaaattaaaatttaaaaaatattttaaattattccatttgaatttcaaagatttgtctcactcacttttgttttttcttctgctgctgcgttgattgaattgcaactaaattgttgtccttctcccacttctcctcccctttataaaggtacgcggcgatgacacaaaaaaagttcggccgttggaaattcgccggaggggcaaacaaatgggcgaaaaatgaaaataaaaa

SEQ ID NO: 13460 - DNA, 2625 bp, Heterodera glycines
aaaaaatgattttttggaaaattttccgggttttgaggccaaaaaggacaatttatgtgttgggggccgttctattagaggtttttttggaaaaatgccaaaatatggaaatatggatataaatcgtgaaaaatatggaaaatatgtgtagaaatccatcctagaaacttcaaatcagactaaaaacatgtttttcgtacgtttcaggcctcccacagtccagaaaaaaaatatggatttccatataattttataccctaattataaaaatgcctaaaatgaagaataaaaattaagaataacctgactaagaatttttgatataattgaaaagcattaggaaattttcaaatgacttttattgagtcgtaactttaatttaatttattcgtatttgaataattttcatctgcaaattcggaaaaaacataatagttaatatagatagacttacaaatctacaaaaacttgtatagtgaaggaaaaatacaaaacattttaatgcttttttaagccccggagggcgtccaaaaattgcacatggcaccgctttcgcaggccaaggcgggtaattggtaaaagttttcaatcagcaataacagcagctcggctaggcctcattgctcgctgtattgcccgagcgcaaggctaaagaaacgaaggaaaaggagagggaacaggcaaatgaaataaaattttaagatggggttaaaaaagggagagaacgacagagaaaaggcacaatctctcttcccactactctctctttccctgtgatatttctctcccacctattttcttttccatttctcatcattattatatcctttcctttctgtgactttttctttttcagcgaacaaaaaaattaaaggaaagaaaggcgcctttcgcttcgtttgttactgcacataaagagagatgggggcaagaaaacatacaaaaagagaaatacaatggagcatttctctttatccctcctctgttataaccccatcataaaattgcttttctatttccaaatatcttccccattttccaattttattatccctggtccctttgtattcggacgatgaaatctttcgccttttactaaaggtttccgtgcagggggacgcttatgggttaaacccaatttttggacagcgccttctccagggagggcgcgaaaaagaatttagtccattttatgcgttctttcgtcttatttgtgcaattttgaattctttaaccctttgacaaatttttacggaataaagtaaattttgcttttacttttaaaataattatggattagtggatagtgcttcgacagtaacagtattttttgttgtgcgttcgataaccggttgcgttttcttttgaatttatattttaaagtgtttttacaagatacagaagaaaaacaaaaatttatcggtaaatcttattttttgttgttgaatatctgttagaaaatcgagcttaaatttcaaaattcgcccggccggccccaccaaaaacctatttgtttgttaaaaaattggctcaaaatccctaaatttggccattttatagacaaaatttgtgcaatttatgccaaaaggaattgaatggaggcgatagcgactaaaggaatgtggagccaaacacatcatttttaaaattattataatatttctgtcgaaatgtcctttgctgtcgaaaagtccggcgcccgcccccgcgaaaagccagcccccgcccacggggctgtaccctagtttaatgtaaaatttgttttgttgataattttgtataaataatgcacatcaataataaaaaatatacatttttaacccgatttaggaataatttacctgtatgaacctggaccgtctcaccacacattgattctccattcatttttattttaatccctcattttgttcattacaaatggaacatgcagcaaatgatgtttgtggcggagaaaattgctgacacggcattcattcacaaaattttgaaattttatggcagaatgtcactattttatcaagaaaatgtaaggtttgcgcaaaatttggttatttttaagaaaaacccaaaatatgtaccaaatatgtaaataaaatttttaaaatggttatttttttagaaaaaaaaattcttcggaaagggtgaaataggcacaaaatgccataaaaatgacctaattaggcctagaatcacattttagtattttaaaaattagtttggttaatttttatttttcacaagaaattttaataaattttcaaaaattctcaaaatatgtaataaaaatatgaaaatatgtacgaaaaatttgccgaaattttggattttttaatcctaaaaatatgtaaaaaatgtatgaaaaaatccgaaaaagtccaaaatatgtaccaaatatgtataaaatatgtaaaatatgtataaaagcccgaaatatgtaaaaatatgtaaatagaagtcccaatttttgctcgcaaacacaaaaaagaaagtgtttttcctgctatttatagcatggagaagccaggaaaaaatgtatttacataaaattgacagccctagtgatcatcgtcaatttgcggctgcgttttttcctcattgtagcgctccagaatcctcaaaatt

SEQ ID NO: 13461 - DNA, 2630 bp, Heterodera glycines
  unsure (1)..(2630): unsure at all n locations
aaaaagaatgttataaaaaatattttcacccattaaagcttctgtgagatttgcttaaaaaaatacagnctctaatcaaccttttaccatacctaagacttgtcttcagggcaaagagaaaaaaacataaaaaattaattgctaattattaaatgatatttagtcgttgaatctcaatagagaaaaaccaaaaagtagaataattttatattataaacaccagataaaaaaccagaaaataataattgtcttttgtttaactttcactaataattttccaaaagtttattatgaaaaataaatctttcaaagacgaaaataacgaaactttgcatataaattatgggattataaatataaacatgagctttagaaaaataaataattaaaaaactagaaaacgaaatcatagacataaattaacagtaataaatatgggacaaaacaaataaaaataaactaataaaagtttatatatggaatacacatttttcccagattttattgagtaataaagtatgaatattgaaaaaacaacaaatttaaaataatattgtaaaactaaaataaacaaagagaaaaaccattattacacgcataatctaaaggttgcaagtttttttctaataaaaccttaataaacatgggcagaactccagtgagggtacaacattacatgaggtaagtcatattgcagctaatgatataaaaattgaaaaaatgtatcatgaaatattaattttataaatataagttaaatagattcttttaattaattatatcgccatattatatgaatagaaaaaatgaaaatttaattataggacaaagcaatacaaggaatgatatgggagcaacaccttcgtcggggaggaaattttcataaaaagtctaaaaaaagaaaaaaaaatccagaacaaaaaagtcttaaaactcatttaaagatacatccatcttatttcaagtgcaattcgactttcgtaatttcatttcccgaaacatgtcggggctgaaccctagtttataatatcaaataaattttattaaaatttttatctttttggtctttctgccgataggtgcaacgtaaatttttttggaaattaatgcaataaaaatattttacgactttaagctttagcaaaattagtaaaaatactattataaaattcattgtcaccccttttgaaaaaaatgttgaaaaaatattaattttccctaaaaaaaattaaagttataaataatgatttaattttatattttattacaaaaaatctcataaaaaattcattagaaatttatagcataaaatatatttttgagaatttttcatttcttaggggtgggtatcttttcgtttttattaattgaagtacattaatgccaaaatatttataagtttaatttaattttgtttaatgttatgttgattgcaagttctattttgccataaaagtaagtcaatgataatttattcgttatttttaaataggtttaattacattaaatttctctatattttaattttaattttgttatttctattcagtagtagttttaagttttcacacatattaatatataatccattaaggaacattttaatgttactgctcatgatttgtaatttttattattttatcttttagattctaaagactcgaaagattaaaatttaattttaaaaattttttattttattctattattaccatgttgaaataagcttggttttgttcgagctgcgctagatcattatttaagcttcttttctaattgtttgcggacagacatttgcggacaatttcaggaaaaaataaaaaaatttcttgaaaaattaaacaaaaatttttgtaaaaatggattggaagatttggcttcgctattatatcatttctaaatttcagatatacagaaatatattttaattttttgagacatgcttaatcgcgaacaaaatttacttgcaatttcaaaatgtgcagcatattatataagtgctgaacaccagctgtactaaattccgattcccgtcattttttgggcctcggaattccgatttctttacgaaaatttttgggttatcggaatgttatcctcgctgaaccctagagcaagatttatctagggttcttccccgattctattggaaagaaaagtaggggagcagatagcaaatccccgacaagacttgtcggcatagctggagaaatttaaaaaatgtaggcaaatactcttcgggaagtaaatctttttaaattccaaaaaattaagttaagagacacaacagcatctcattttgacgattgaaattaattattaaaagttaaaaaaagatttgaggccttataaataaaaaatttttttatttgttttgcagtcgtctccattccatgttttcataaatttttttaagaaatttttttatttttttccgaatttgtcgccattgtcccgttcgcagtgtccgtcccgcaatgtcccatttagagaaatataatatttgaaaacattttttccccaatcacatatcatagacgatgcgtaaatttcaatttatttttgttaaaaatactaatatttaattataataaacttttttttaaaaaaaaattgattttgttgcttaa

SEQ ID NO: 13462 - DNA, 3827 bp, Heterodera glycines
  unsure (1)..(3827): unsure at all n locations
ttgatcgcttcattttgcgatcgactgtgcagctctgtcccttccggacgatttaaagatgaaattgctaatgaggaaattgtctagcatgagtgcctccgcgcagtgaagaatgacgacgaagaatttggaatgttcatcaaccggcagtaaaaggcttttacgagacttcaattttaagaaattgaacgaagagcaatttaattgcttggtcctttggatttaattaaaagcgccgaacgaaagcattctacggtcaagaattttggcaaagttggcggcagatggcgatcaaatcaaatgtgacaatgtcgtcgaagatttgaaagtttattgttattttttatcgctattttttacaaaaaaataataataatagttttttgttatttttttatctttatatttacaaaaaaaaaaaaataataaatgttttcatatgaatttccaaattaaacacacatagaaattgaagacagccaatttttaagagtttgactacgatttctaataattcctaagacagaaaaagagcaatcacggaaaaaaaagtgcagcagaaaaatttaaagaaaaatgattccaaaaatcactttattggaattgatgcaaatttctttttccatctgatcagtgtttgagacccaattcccaatttcttggcaattttttcatcacttatttttggattcatttctttgattttgaagtattgtttcatttttctcaatttttcttcattggaatattgtgctaaaataaaaattaattaaaatattaagttaaaaaaatctcttacttttatgataatttggcagcaattcttttttccattttataaatgttctttcaccaatgcccaattccttcgcaaattctttctgtttacgttggccatataaacttttaaattcatcaaatcgttcaatgaattcattctttttcccctcataaaaactctttttcattaataaatttaattcttttttccatttgtatattttctcgcgacttgcgcctaataattttccaatttttgtctcagttttggcaaggtttttccgattatattttgccttttttctcaatttttctttaattttatcaaatttatgaattgtttctcttttttgttgatcattaatttccatgttttcattatctcctccgtattgattaacataattattaatttctatactttcattttcctctttttgttcagttttaatcatttctgcttctctttcatttgtgtcccattcgtcaccaaatatttcatcaaaatttggtaggattttgccggtttcaatattataagtaagaaaaattattataaatattaaatgccataaattcatttttacagcgaaatattctagcaataaaataatttttaaaaaatgtttatacattatatgaagaaattatttaatatattattaaatcaattttttacgataataaatcataatgcatgaatatcaaaattcacaaacattttaaacgaaaaaagtaaaatgaaatagattcacttccaaatggacacagcttaatcattttctccaccaaagatttttaaattcttaatgtttaataacttttgtttagagaactagaaatttttcaaatttcgaaaaattttcataaattttacgactttctttaattagttaaaaatctattcaaaacatattaagatttattatttttgaagaacaataagttaattgaatatcaaaaagcccgagtatcaactttcttaataatttatcttttttgttgaatgccaaaaaaaccattttttctttggaaattgggtataataaatatcattaaatggaaaaattcagcaaatataatttttatattttaaatcaattttttactattttattgattcttatctaagctcagtagcgctgaaaagattttcgcctcattttttgaagagttggccgtcccattacccgactgggccctccccgaaaacaaaatctcatctctttcattttctcatcgcaactcaaaacttaacaaaacttcgagctacgtcatcgggatgccggcatttaatatggttattgttctcattaattttaattcttttgccacttgtcatcggtaccaaacagaaagcatcatcaaataaattgtcggataaattaattttaaaatttcataaatccagcaaatggtcaaagctcccaataatataaagctgtccaatttgttcaaaattacaaaaacattttcgattctcttttaagtgacacattccaaaaatcacggggtcaaaattcctcttacgaaatgtaacgcgaccacaaattcattgaaaatttataaaaaaatataattttacgaatattgctttaaatgaatttgtttaagttctttcgctttttaattatcattttattgttttttcgcttttacaaattgatacaaatattaaattgccacaaaattccgagcattttttattanatcaatttttactcaactcaattaaaaaaatatatttttgcaaaaaaatgaaaatagtaatattttttattttttaaatttaatttgttattgttttagtcaatatttattgcaatatttcttgatttatcattgctccgctaatcaactactacacaaaatttctttattacataatacaatttaactttatggcggaaaaggcaaaaaataattctcacttatggtaccgttgaaatgtattatgccaaaatttagaaatcctggacagaaacttttaacaatatgttattgttctccaccctattttggactctaatttaaagttattcgaatttttcaaaattttgtcacctttaagccgagcacctctaattttatgtcttcactcgattaacccactaacatcgaacataaattgaaacaaactgattaaaaagtatgtatgtaaatttgaaggaaataattgctaatgggcgtttgggctttcgacctattttgttcacatggaccatggagaacgttgaaggaaaagatggttttatgattttttcaagattttacattaaaataaacattttttcttatattaggtgaaaattttcaaaaatttagaattttacagaattctttaaatgaattttttcataatttcaagaatatttgtgagtttacattgtattgaacaaatattttttatcaaattaatgaaaatatccgtccatttttgaaaatgacaactcattcataactctaaatccacatatctttcataagtctcgtctcttctatcatctatcattcatattcgaccgttggcgccagctattctacgttggccttaaaatacaaaattttgaaatcatttttggcttttagaaattgactagtttttgctaaattttcttttttatgaaactttttttcgaaattttggcaaatttaaagttttttatacaatggataacaataaaaattttgatgttttgataaacctttttttatagttttattgtgtttaaagatttacatttatttattctggcggcgccaactgaatgttgcaggcatttccgtttccgggcaccatggtaaccatcgggaccatttggaagtttttgttgccgttgcctcgtcttctgcgccaaaagaagacaatgagggacacaaccggtggagccgatggtaaggtccaaacaattatattatttgagatcggcgtggtggtcgtcgtggtggtgggcgtgggggtcagggtnntnctnnncntnntnntcntcgtagtggtcctatgaaggtggtcgtcgtagtggtctcttctcactagaatgttttgt

SEQ ID NO: 13463 - DNA, 1150 bp, Heterodera glycines
atacaatggataacaataaaaattttgatgttttgataaacctttttttatagttttattgtgtttaaagatttacattaattatttggcggcgccaactgaatgttgcaggcatttccgtttccgggcaccatggttaaccatcgggaccatttggaagttttttttgccgttgcctcgtcttctgcgccaaaagaagacaatgagggacacaaccggtggagccgatggtaaggtccaaacaattatatatttgagatcggcgtggtggtcgtcgtggtggtgggcgtgggggtcgtcgtggtgctgggcgtggtggtcgtcgtagtggtggaaggcgtggtggtcgtcgtagtggtctcttctccctaaatgttttgtttcttaaataatttaaaaaatttctatttcttaaatataatttgaatattatttatcatttaaattaaaaatatgcattttaccttaatcttatctactcctatcgcggccaattccaaaagagatccgacaagagcggcctcgcctgtctttttaccggcggttttggcaaacttacgaagttttagcccgcgcttggccataacgtcccactcggccactgaggcaaaaatcataaaacaaataatcaatttattcattattcttctactaaataattatttattaattaattttaagcatgtttcttaataacgatgaacagggaaaggcaaaaatatttttaaatgaatacggaattttctctctaacaataactgttataaaataatttgatcaaaatgaataatttatttttactgatcagtcaaaggcctactaaaatgggcgatgtccgatgcggcgggtattggaaaaacaaaaaacagaagcaaatggataatgcaaatgaattttttatcttcttttatttttataagaaatcaaatagttaatatatactcattaaattaaattcttggcggcatcattcggcatcgtaacatttatattttgaagatttttggatattttttaaacattagaataatttcttaaatgatcccaaatttcaaaaatttccgtccacatttggcccatctgtttgctgcgtttgtcataaatgagtcattagcgctctgcggaagctcattgaactgaatggaacatt

SEQ ID NO: 13464 - DNA, 1599 bp, Heterodera glycines
tgaatttcaaaaattatttttttttaaaaaaaggggggggggacaaaccctactattaccgaataatgaagagcaattttaaatttaacaaaaaaaaacattgttggtttgtaggtttattcgtcgtgtacacatgaattacacattaatagttacggtacatgaaaacagtacacttatacaaattatcatcatcaaatcatcatattacataattgccatcatacataggtgtttatttaatcgtcattagctgtttgtgtgtcaaagtgtggtgtcgtgtaaaaacgtgaaaattgtgtgatgatcggtcaaaaaatttctccctcgaggccttccaatgtttcattttcattccctcccatttttctcatccatttttcctagcgttgctgctgctgctgctgctgctgttgttgatgttgctgctgttgcttgttggccccggtgttcggatgttccgtctccaaatgccgttccaacttttggtaggaggtgcaacggtatgagcacacatcacagcttcaaaaaaaaccacaggaatgattagagtgtcgttttatttttatttttatcaacgaatgatgcatttaatttgcttgcccattcgtcgagcgccacccctcggtttttccaaaaaaaataaataatattttttttttggaaattccgtttctaacattcaaaaaaaaaaaattttttgttatttatgtgaattaattttcaaccattttgtttgaacaacacacgccaaccaacctgtacattatttctgctgagcaaagcttaaaaaaggaagaaaatgtatttggaaagccaatttactaaaagcaattaaataaattaaattatttgcaattataaacatgtaattagcatactttaatctggtgatcggagaccaaatgttgcaaaatgttgaaggcgtactgcttgctgcacagcttacaccgtcccgagtccgccttgcgctgcgcttttgccaacaaatcggcagtgacgagcccatggaccatgaccaaatgccgttccaaacctaataatgtgtagatgatgtacaattgtaatcaagggagtaggacatgatggacaattatagatttaaatcgcggagcaagtcgtttaccgccctattttttttaaatttttaaaacagaaaattgaaagaaaaggatttttttaaaatttccagcatttttccaaaaaaaatttttctaaagcgctaaattttttattattttttaatttttggggagaagcgacagggagaaaaagaagttcatccttcagcagcagcaccttcgtatgtccagaaacggtctctgcagcgtgagcacgccaacggtgcaccgctggccatttccgcgttgttcttccccaacagttgacgatgtgcggactgcaaatgcacccggtactgctcgcggtcggtcaactgtgccaagtcgcaaatttcgcacacataatggtgttggtgttggtgcgggtggctggtcggagcagcagcaccaccaccaacggcggtggcggccgagtgcgcagcggcggcggcggcggatgttgcctttagctaaaatgaattacaattttttaatggca

SEQ ID NO: 13465 - DNA, 1372 bp, Heterodera glycines
tgttgctggtgctgctgcctggccccgttgttgatcagtgccctctgttggttggccattgtcgccgccggtggcaattttgcggccgcagcagccaaaatttgatgcgatttcagcttttgttgctgttgcaacagttgcgtttgcatggctaaaattttttgttttgtttgtttttggctctgttcaattcaaagaattggcacacacacacacacacacccgcttggatcatctgtggcgttatgttttggcccttgtcacgtgccatcctcaaaatttggccaaccgatgggcccacctgaaaattattttgatattttaatagtgccatttgaaaacttccaaacttttaaaattaatggggcaatgtgctgcatttccaatgaaaatcaaccaaaaaaaaaaaaaattttttttaaacagaaattcaaggactgtactggaaaatgaaaggaaggcatttttgaaagcgttttttcaaaaaaaaaaagtcgtcgacttgcaaaaaaatcgcaaaatttggcagtttttgggtcaaaatctgttaacaaaccgcactcaaattttcaaaattttttcccgacggcgcctaccggcaccgtcggccccccccggttcaccaaaaatttttggaaaaagtgcgccgcaaaaaaatgggggtttgaaaagcaaaaaaaaaaggtcgtcgatttacatggccgggaccatttcgcaaaattggccgctgaccccccccccccccctccagaccatttcgcaaaaattttggttgacctccccccctttttaatgtatgaattggcataagatagccatacggggagctataagtcaatttctcgccaaaaactttcttgatttatcaaaaataaaaacaattcacttgtgccgattgtgcggacgggaaccggttggcattgtgcacagtgccggcaccaattagtcgagtgtgtgccaccgttgccaacgctgccgcaggcgttgtgccgccgctgaggagccgttggttgcgcaacagttgttgctgttgctgtttgagctgtggcgttttggtaatgggggaacattgtaagacagggttcccaaatgccacaagaaatctacatatattatcgaaggttggacaattttttgggttccctggtgcggtcagaccatcaaaaatgtatcaaatttatgaagggtcccaaaatccattaaaaatataattatttcgtgtattttcagttatttcgaagaaataactgacaataagtcgtgacttttgaatgtgccccaaaatggtcaaatttaagtgttttcaactccaaattttttttccataggtgatatcaggatgtgatttcaccccggtaacttcaatgctatt

SEQ ID NO: 13466 - DNA, 3553 bp, Heterodera glycines
  unsure (1)..(3553): unsure at all n locations
tttttttataaataaataatatatcttcaatttcttccactagctnttttaaaaaaattacttaaaaaggtttggttctttctttaatttttgttaagagaattttctacatttttttttaatttggatagaaaatccaaaggatttgtaggattttctagttaatatcccctaattcttgactgatcaatagagatcataatcataaatattcccggaggcttagaaatgccgtaggggggggggtattatttcctccaagagtcttgacatttttggcattttttaatttgaaaattttcaaaaaatgaaacggacggaccaaatatggaaacattgtgcaccaaagtgccggcaacccttcccattcgtacgtccgaaagccaccaaaagtgtaaaagtacaaaagccatggcaaaccaagcagaccagtcaacaattcctgaaaacgattattaaaaaaatggaaaaattttaaaatttaccgcaattttaaaaattatttaaaaaaattctaaattttaccgttatggccattgcgccaagaacaaaatttgttggagtgcgcagagatcgatgggagagaacaatgacaatgaacgaattggtcttaaacagtgcgccaaatttagagggttttaaatttttgaaatttttttgacattccgtctctaagcatttttgtatgtaccgtatgccactttcaaggcaactacaccacttaccagaatggtgatggcaacaatcagcggcatcaaaaagccgtacaatggcagtgcccattcgattggcacctaaaaatgggggggggggatttttgaaattttaattttttccaaaaatttccaaccctggcattgatatggacttcacggcattgttgcggcgattgttgcagacattccggcacggacagatgaacaacatcaacaacaggcttttccatggaaaaatggcggcaaaaaataaatcacaaaagcagaggagtttttgtctgggattggcggggggcggatgaaaaaattaggcagcaaaaaatgccaaaaatgacgaaagcggcggcggtgtcgatggatggcatttttgcagcattttgtgcccgcgtggcattttattctgtttctttcctgcgtacatattattatttttttgttggcaccgattaaatggatgctattgtttttcatatttgcaaaaacaaaattgtcggggggggggggggggggggaacagtcttagacaaatgattggtaaaaattgggcaaggcaatgccgtgccggggggggagagaaaatgccaaagcccaattaattgaatggcacaaattcgatggaaaagtgggcgctgttctagagaatgaatttgcacaatttcagcattttatttcgggtatttttcgggattatgattgtcgagatcaatgccgaaaaagccgaggttgaattccattattttcgcggcattttagggtcagaattctgatttaaaacattttttgatgtcatcagttttaaataaattcatatttttggggcgtcagctcttatcacatggttcaaaattagtgggcgggggggggggcgccgaggcgagaaaatgccaaagggattgaatggcataaatggggggggggggagggacggcaaatgattttaattatgcaaaaaaaagaaatttgaaaaatgcaaaaaaaaacatggacaaagtataggtaaataggtagatagatttatagacattaaaattatggaaaatgaacgggcaaataattaattgcttttttgaagtcaaattggctatttaaaatttattttttatggcaattttaatatatttttaagaaattcgaggaaattttctcttttgccaatccccttttgagcattttttgaaaattcgaaaatgcaaaaaaatttaaaaaagtacaaaaattttaactgattaatctgttatatttgtaagtaaatccaaaattaggcactaaaaatctatgaaaaaatttaaagattggccgtaattggcactttttctgctgatgttggcattggcatgcacattccgaaaaatatattaaaaattcatttgttggtgaaattttacaaaaaaaaggaagcgcgtgggattaaaaatgccaatgattgaggggagaggggaagcttttgcccattttggccccgcggcacggcgggtgccatttcattgaagaaccatgtaattttgaacaatgggcggtcggccacttcataaaatgcctttttggatgccatggcacttttcagggcactcattagccaaaagcgaagtgccgttgaaagcattttgtaactcaaactggtggaaaaaatttggctttttacatccgccggtggacccccaaaaaacgtcgtcggacgatttttggaccaaaattttttaattggttaccaaataagcattctaagcattcttggatatgtttggctaggcgctgttgtgtgtttgctattattctacaaaatttcaaaaaaaattcaataagctacaaaaaatctgattttctgaatatttttggcactaatttgttaaatcaaaattttttaaattttacgagttaattgcgttgtgaagcgctttcaaaacaaataagaacagtttttatttggttttgagaaaaaaaaatgggtggtcaaaagtgccatcatatggtgccattttatcattttattgggaaaattttttatagaaatgggtgggataggcccaaaattcacaaaaatagccaaaaatttgatggatctcaagaaaagccgtctgggctccggttttaaaccatagcctttcaaaaaaattgattccaatgacgtaaaaaaaattcaaaaatgaggaaaaacggatttcagtgcctaaaatccattcacaaaccagaaaatccgaatctccggcaaccaaaagcatcggaaatcattggatattctcggcctaaacctcttagcttagccgaaaacggcaatttttgttgaatgtggcgccaaattgccgccattaaaaaaagtcggagcaacaatttctcgactcggtggcacccgccccgctcatgagggaatcgatgccgtggattgggattgccggattttttcaccaacatcggcctctccctatcccccgcaaatcctttacccgcaccgcacacggcactcaatgccaatgtcttcatctcctactccccgcccgtctgtgtttttccccttaaaaacgaattcccccccccccctcgggggggggggggggggggttaatttttaatgttaccccccccccccccgagggtctcttaaatttttaaaatgccggccgcgtagccgctgcggacggacggtagagcttattttcatttaaggctcataacttttttcgttttctttttcaaaagcaaatgcaatgaattgattgatataactatttaaaaaaattaacggcccataaaaaattaattggctgtttttcgattttgcctattttgcaattacataattaggtaattaattgtttttaatcgcttttgagcaattagaa

SEQ ID NO: 13467 - DNA, 1491 bp, Heterodera glycines
aatatttaaatttttttacattccatttcttttcttatcaatcacaacatcttcattaaaaagccaaaagagcaaaatcaaacagcaaagaaaaaaggttgaaaagagtgaatttattcatttaatttcactgtttgtcacaacaaatttcctcactttatttgttttttggtcattaaaaagtgacgaaatacaaatgtatttggggctttcgctatttcgtcactatttctgtacatatttggccaatgtttccattataaattcatttattagtgactatgtttttttggcgtttcgtcactttgtccttgccctcgtcatttctccaccactgttttgccctttcggccagaaatattaaaaatcaatcaataattggccctgttcattctcgaataaacaacaattccactctctctctctttttctccccattctctctctctctctcccctctctctctctctctctttctctctctctctctctctagcattctcttttcttctctctctttctccctcctctctctcttctctctctcatcattatgtattcccgtctctctgcctcatttctcgagaattcgcttttcttcaactcatatttttgtgttgctatgggcggtttgttggcatagcgaaggacaatttgtgaacttatttttttatgtttaaaattgaatcttttgcctaacggctgaattattctaaaaagaattatcattggcagttagcacaataaaataaaaaggggcaatttatattttgtttatcaccaggtattttatatttcaatttcatttatatttttaataaaatttggaaacaaatttaaatcaaattaatcattgcctttttttgaccatgatcattactcaaattgggaaattttctaaatattattttaaattacaaaatttatttcgtcttaaaattccccctccataatataatacgcatgaatcgattccttaattggtttcgtaaacacaaagcatttccagtcccttctatcagtgatgatggccacaaaacatttgataacaaaattttcttcaccacttttagtcatacaaaataaaatgcagtgattattttcttgaaaatgccaaaaaaaataatttttcaaaataattttccatttaaaaaattatttccttacaggaaataattttttcaaaaaatgtcttccaatccagcgctaataaaagaaggctttgtggagaaatacaaaagcggctttttgagcagcaaatggaagtcggtgttcgcccgcctctattcggactccacattggcactgtacagtgaccgggtacggtacaacacaaatatactgtagttcctaaaatttgttcctaaatgaataaagttgtccggtgtggtaatacggtatatcatatattaacattaaacaccctttgttcttcatataaattattattgttttttaggccgattcacgtccatcggaaaaaggtttcct

SEQ ID NO: 13468 - DNA, 2714 bp, Heterodera glycines
aatgagtaggactgggatttttaagaccaaaaaccccgaaatagttacctaaaaaaatttttttaattaaaaatttttgccaagaaagtaaatttttgagaaaattttttttcatttcatatgagtatattttgaaaaattttagctcgattcttaggggtgtattttttggttttattgcatttttgttaaggaattttccaaaaaatgtcgaaatagtgacgatacgccaaaatagtgatttttacctttcttcaaatcaattgagcaaaaaatttagttaaaacctaaaaatcgcatccctagtgattattttcttgaaaatgccacaaaaataattttccatttaaaaaatatttccttacaggaaataattttttcaaaaaatgtcttccaatccagcgctaataaaagaaggctttgtggagaaatacaaaagcggctttttgagcagcaaatggaaatcggtgttcgcccgcctctattcggactccacattggcactgtacagcgaccgggtacggtacaacacaaatatactgtagttcctaaaatttgttcctaaatgaataaagttgtccggtgtggtaatacggtatatcatatattaacattaaacaccctttgttcttcatataaattattattgttttttaggccgattcacgtccatcggaaaccattttcctcaagaatgtgatcccctatgtttgcattggctttatgacagaccgaatgccggtccgtcgtccatcacttccgccgggcactgcggtgcaacgtaaattaaaattttcaaaaattaattaatttgatttactgtcttaattaggtttgattggcattggcatggacccgagagcagagaaagtccattggattttgttcccatctgagcagattttagagtaaacgcctaattatttttcttttataatttgttgtttttgttgaagggagtggcttaatggcattatgtcgacgctgccgccaccgccaaatccgccgccgcaacagcctacagtaccacagcaaaacattggatttggtactgtaaaactaatttactataaaaaaaaaagattaattttttataattaaatcttgaattatttcatgtttcagttccaccaccaaaatatcctgaccaaccgccaccctatggtggtcagccgatacaaccgcaacagcagtcaccgtattacccgcctccagcggcgggtgggtacggtgcacagccacagtacccgcagcaacagtacccggcccaacagactgtagtcattgacaggacaacaacaccgagcggaggctacggagggtaaacaaaagagcacggatatagaaaagcaggacccgcccaggatttttgcatgtgccctggtcttgtccctgcatttttgtggaaaattggagggattgcagtcccaaaaaaattaattatttttttctctggttcctgtcagcaccattttcaagtctttgcattttcaagctttcggtaccattgaaaattgccaataatgtttggtggaaagaggccagcagatcaaaaatcttggccgatttgaaatattttggaaaacgaataataattttaaaaaaaaacttgatttccattgtctcatgaatttaaaaaataaaatacgcacttagatcgtccggcttcggcaccggtctcgcagctggcatgggcggtgccatgcttggctcgctgctcggctacggcatcggcagttactttgcaccccacgggggttggggcggcgggggatggggaggcggcggatacggaaatggcctgggcgggggatacattcaggtggaaaatgagggatatttaaaaaaaaattaacaatttgcaggataatgacacttacatcaccaacaattactacgggaacaacgatgactcatcaacgcctacgcaaaacgccggaggcaataaattagcgctttttgaaattttaataaaaattttcatagattattcgacgcccgctcaaaatgactatggagacagcggaggcggtggcacatgggacgacggcggtggcggaacatgggacgacgggggcggatttggggacgggggattcgacgggggagggggcgagatggtgtgagagaagcgacggacgaccaaattgaacacaaaacataaacaaaaataaatgcaaaattgaaatgccgaaataggcacaaatccattctaaaaactacgcattgttttgttgtttttcttgaagccacaaacaaacaattttgctgaattcaccttttgaagttaagcatttgccagaaacgaaaatgcaaatttttgcttatgttttttacctttttgtttcattttatcaaaattgaaatttcctttcagtcgctttgtcaccttttattggaattaataaaatttacagaaatgcttgctgcactttttcaggagggtttttggtttcgcacaaattggcatcggcattcgttaagtgatgaaaatgtggtggtggtgatgctttgttttaaaaaaaataattttaaatttaacataaaattcagcaaacggggcaattaattaacgaattcgccggcaaagggagaaaaaaggaaaaattattgaagtttgaaaacatatttccttaagaaaattcatgaaaaatcccctaaaaaaaaatttttttcccggcggcgcctatcgatgccggtgctaggtcgtttct

SEQ ID NO: 13469 - DNA, 2040 bp, Heterodera glycines
atgttcaaggctggacaattgttaaaaatttttaaagcattccccgctttttaggtaaaaattaaaaaaaaaatttctcgaaattatcaagaaaaaattttgtaggagtttttcctttgaaaatttctaatttttgaaatttttttattattttcggggggggggggggaaggctgattattacagccaatttgctacaccaaaatgataacacttacacttctgctcttggccgagtagtaaaattcggtttttgggtcatggtaaaagccggttgccgggtcgtagaaatagcccgagctatgctcatattgaaactttgctgggtcgggctcagctaaacaaaaagcaattaaaaaacaaacaaaaaatttcatacaacaaattggcaaaattccaaacggagtgttcactgaatttgcggtggaagacgaagaactctgattatgagttgtttggtcaatgatttggacatctgaaaatggaaaaaatttgctaaattttgtgtaaattatggaaaaaaatccaataaatatgcaaaaccttcttgcgtttctggcaacaacttaatgcgcccttcgctcaaaactttggccaacgaatgacgagaaaatgagacaaacactaaagtaaatagtaatattaaaaacaaaatgatttattgatggctttcaatttttcatatttttagtgtgcattgaagcaaaatcaaagtcaaaaaaaaaaaaaaatttttttttgaattttcgactctttgttcgagttcgagaccggggttcggagttggtcgaaaatggacgccaaattgtgatcagcgacaaggaaaaccgcctaattgtgagacatttttcagggcatttaaaaaaaaatttttttttgcaaaatgacgaggcaaaagagtaaatcttaatattataggtattacacgttttctaagatacaattagacttttgattaggtgcaattactagaaatttgattttttgaaaaagaggacagaattttcggggaaaaggaaacttttttacaaaagcaacggcatttcgacagattatagccaattaaaaaaggaataattttttggttttcggtaccggcacaattgtcgatgtataaacatgttcgttgcagcttatggtgggccatttctgcgtcaaacagtgaccccatttgaatgaatgcgaacagtcgcgaggcggccaaacggacgttcaatggctcaacatcagtaaaacggacaaccgcatgacggacagacaaatcatcggcactcgcgggcagttcacgaattaacaaagctaaaaatggtgttttggacctatttacaaaattacaaaaaaaaaaaaatcggaaaaagtgaataaataataaaaccaattcacccttggaattttcaaagtgtcagttaaatcgtaaaagttcaccaggctatttttgttacataaactgtcataaaaacattactatcgcatggaagggtgccaaccatcgtcaagcccttggcgtccaatgcaaatgcttcgcccctggcccgcagtgtgccacatttgaagcagttggcacggccattgaaattgttgataaagcactaaaaggacaataaaaattccaccaaaaaggaatttggtgttttctcaatttgttcatttttgatcaaattcgtagcaggaattttccatggtaaaacaaattccgctaaaattctcaaaatttctcggtggaaatttgctggcgctaccatagcctaaggaagtatgcaataattgtcagtttacaggaccataaaagaatttcttacaattagagctatcgaatgaaatcaagaatgtttaatttagactcttctgagaaagccatggtgcattcaagttgccaaattgtttatggttatgtccttttttgtgattgtgtgagtctttttttttggacaatttgttaaccttgtaacaagtccattgttcattgtcggacaaacgattcggctccccagcatttgtcaaatagcgcaacggagaatgcgggttattcatttattcaaa

SEQ ID NO: 13470 - DNA, 1191 bp, Heterodera glycines
  unsure (1)..(1191): unsure at all n locations
tgacgaataaaaaagacatagcagcactttgatcaaagtgaataaagaaaaaaaagaagacaaaaaagaaatttttaaaattccataagagagagaaacagcagatcatcaacagacagttaacgaatttgaagcataggtaaatttaagaaatttttgttgtcgacggcacattcaattgttcgccgagagaagagaccatctcacggagtttggaacattcgcgaccactaaaaattaattaaaaaagagtgaaaaataaaattttaacaaaaaaaaatgctgcctgcttttacatcgaagcaactaattttttttttattctcttgaaaatagtccgaagtcctaattgtgatctattagctacatctttacaaaagtacattcaaatttttaaaattttcccggtatgcaaaattctatattgagaactgatgaatcttcttggacaactgcttcacaaaagacttttttgacgcttgacgattaattgtttttttttaaatttcattgatgcggagaaagattgattttttttattattattattattagtgtggtcagtaaaaaactataaatttgttgaaaaactaggcctatttttcatcgcggcgtcagtttttgtagcttaaaagcaaaaaaaagaaaaaaaggtctcactggaaaaaaatttgaaaaatggtcgatcgtaatggaaatgggctctgacccccccggggggggccaaagtcgatcgtaagacctcttggctgaccccaccccctcttgcacaggtatgatatgttccatcatcatctatttgatgaccaaaatcccaaacagaatccaaatcggcatcagataaataaaaaataaaatgcctgcgatccatggaccgcctgatcattgaaaaagaaatgaaagttgttgaagccgagtttagtcgttaaccggtgcaccattttgcccagcgttcgataggtgcccatgagacgagtcctgccatcgatttggcacaatttaatttttcggcatttaatgccgctaaacaattacgacgggacaacaacgtacaagagtgggaacacggtccgatccgtgagttcgtccaccattgcggttgtggtgaataccggtacaccgccaaccccccaaaattgngacatgcgcgcaacttgggnncacgagtacacatagggcaggcccatcact

SEQ ID NO: 13471 - DNA, 858 bp, Heterodera glycines
tgatttgttatttaaacactttgtgcaattcaccttcgctgtttgttcagcgcatttgctcaatttgtgctgcacttcgcccattttgtcaaccgccgtttgttcagcgtttgttgttgggaacaccaaaaagtgcattgattgagcgatctttaaaaaagaaaaataaataaatttgtaataaaattaaaattcaacggatcagataattgaatgagactgacccggacaatgcgctgttcagccacccgaacgcactgctgtcgttgtctgattttgggcttcagctcgttcaattgacggaaaatggctgtcaagcgttgggtggcactttgccgaaacagttcaaccgcctgcaaaagagaagccgagccgagtttcgctaggccgctagaaaatttaggttaagaaaaatagagaatttttgaacgaaatacaccaacgatttaaacccgataatttgattaaattttcgaccctataatttccgatgtatcggttaagaaatgtactgttccgaatcgagtcgagttttctatttcgataccgtttcgaagagcgtaatcgaatcgcgaacgagaacgagcgggcgattggccttgagagcgagcacttgatcgaattgactgttggacgaagataacgaactgagaaagcacgctgttgagagctgcgaaagaaattggactattggagagcgcttttgttcgatcccacctgttccggctcctcgtacttcggccgttccgccgtttttgtcgacggcgttgcccgcggcggtgtcggcgaagatgcacgacggcgggcgaatgactgaggcgacagctgttgtggagcggaaccggcttggtgttgggc

SEQ ID NO: 13472 - DNA, 3206 bp, Heterodera glycines
  unsure (1)..(3206): unsure at all n locations
gcagaaatgctccaaaattattggcaagaggcatcattcgtncgtctatgtctncatggcaagtcncattgtgatgtcccaaaacgtgatggaacgttacgtttttgtgtggactacggggctttaattcgatcacccgaaaagatagttcccgctcncaaatatcgacaatactcttntaatgcttggaggacgaaaatacttcagcactttagactttatgtccggatattggcagataagaatggatgaaaattccattgaaaaaactgccttttcgactgagtacggtctttacgaatttacagtaatgccatttggtctaaccaatgcagtggcaactttccagcgatttatgtcgcgtctctttgagggaatgattaatgactttctgttcgtttacattgacgatattttaatcgcatctaaatcctttgatgagcatctgaaacaccttgaagcggtcttttctcgagttaaagcagcagaattaaaactaaaatttgaaaagtgtcatttttgcacaaccgaattaccatttttgggccacatcctcacaagggaagggattaaaatggatgcggataagctaaagcctgtgatggatttgcctatgccaacgaccaaaaaacaactccattctctgcttggttttctgacttattatagaaaatttatccattcattcggcacgattgctgctccgcttttcaaattgataagcgaaaaagctgaattcaaaatcggagaacaggaaaaacaagcaatcgaagaattaaagtcaaaaatcattcgagatgttgtgcttcattttccggatttcgatgcagcacagaatgacctaactaggcagtttataatcatgactgatgcgtgtaagaccggcattgcagcaattttatgtcagcctgatccggagaaacagattaggccaatttattttgcctcaagacaatgcaatgtccatgagtcacgctacagtgccaccgaattagaggctttagccgtcagatttggtgtaaaaaagttcgcacaattcatcactatgattccgactcgggtcattacggaccataaagcactaatttggatgttccggagtaaaaatgagacaggaaattcacgtgttgaccgttggcttcttgagttaagctctcgtttcatcctaaaggtggaattccaaccaggaaagaaaaacataattgctgatgttctatctcgttcgggaaaatcgaatgagagcgtcactgaatccttacaggaggaagacattgcctttattgggaaagttcgagtttttgaactcagtaataatgtcgaagatttcactgaacaccgggaaaaatggattgaggagaccaaaaacagcgaaatgcggccaatttatgagtttttggagaaaaaaattatgcctgctgatccgcgaattcgacagagcacaatggacaaatgccatagatttgtgttaattgagaagtttttgcacctttgtgaaaatgacggaaaacttagactctttgttccattatcatttcgtgaaaatttggtgaaagaacggcatgaaggaaagtgttcgggccacatgagcgccaaaaaattgtataaacaattggcagagttatatttttggccaaacatgttttctgattgcattcatgcacataatgcatgcagaatttgtgcacatacccgaaatgcacgttcaaatgaacctcccttaaaagtagttcactcatcagaaccattggaattggtctgtatggacattttggacgttgggccaagtcagtcaaacttcaaatatatttgtgttatcatcgatcatttcaccaagtacttggtcgctgaaccaatcccgaataaatcagcagattctgtagcaaaagtatttgtcgaaaaatttttgttaatctttggaacgccgaaaaaaattcactccgacaaaggaaaggaatttatgaacaccattttcaaaagaataagcgaaattcttgggtttgagaggtcctttacggctgggtatgacccacaggcaaacggtttggcggaacgagtaaatggagttttgattcaaatattaaaaaagtctacagcaagtaattggacgtgggacgaacgattaccgtactcagtttttgcttacaatataacgccatccgagtcaacgggtttttcaccatttcttttaatgtttggcagatcagcgaaaattccgatggataagatcaccgaaatgaattttaaccccttatacacaattgattatgaaaattattttcaattgtttttggaaaacctccttaatattcaaaatgaggccaaacaaaatttggatgagtaccggaaaagaagtaaagattggtatgatgcaaaacctcaagtgaaagccaataaatttgaaatttcggaacgagttatggtggcttttcccggaatgcatcgcaattcacgacacaaaaaattattgtggaatcattttggcccttacaccattacaaaaatctccgaatcgtccgccgaattagtcccagttgataaaacagctgctgaccctattactgttcctttggaaagactcataaaagtgccaaaggcagtccctgacatcgcaacattaccacggggaaaaaacccgtataaaaatgtgctaaatgcaatgattttcatgatttcggcccaactgaattttgaaaatatgccaaaacgtgcgaccgaaaattggcaattggggacaattgctaaagaatgtgtgagggcggataaatatggaaaggaaaaaagtagtgcaaaaattctcagaattaattgcctaaacctgaaattgaaggtaaaaagggaaagaaaggcgaatttttcaggacaaacgcaaacggacgccgggatttgttggacttcggtttgcagtcaaaaagatgccgagcacgaactctgcacggctctgaaattgggcgaattggaccctgttcttggacgagtctggcccaggcgccgatgatcgtacgagtcgccgcttcaagctcttttggccgtttttctgcttcgctccggcacgagtcacttcaaacaccgcgagcccgaacgttcgtcgaaatgatcgttaaaagtggaccacaaatggaaatggccacttattcagagaagcgaggggattatgttggcaccgagaaattcccacaggaaaatgaccaagtcaaagcgcccgaaaa

SEQ ID NO: 13473 - DNA, 982 bp, Heterodera glycines
attaaaattaattaaaaattgacgtctaattatgtggacttataatagttttcaccatttttcagttcgggtcgttttctgtacaagccgttgatggaccgcacgtgctgtccccagtacaccatcaggtggttgggtggggtggtcaccaactgttggggacagtctgccattcgatgccgtttctttaattatcgctctttttatataattttacgattttcgctgctgcttttatggaattgactttccttgggcctattaattacctaattggggtgttgcgttctcaagtgtttttttgctcccatttttcaatttcccaattttttattggctgcgtttattgcataaatggtgccatgataatttgtccactgtttcaggttggacgtgcacaaatttcgcctctctcgcacccaaaagcgcgtgctgcgcacaatgcgcgactttttgcgcacggaccaaaggccgaaagagcgccggtgggcggacgacggcgaaacggcacagggaaaggcgccgcagcaaaagcaaagggacgacgaaaggggcgggggacaggcgcagaagcggcgccgaagacgcggcagcagcgctacggcacagccgacgacggcaccgcaaaagcaacgcgaaacgacggcaccagcgaatggcgccggcggagggatgggaacggaggaaaatgaacagcgaaaggaaaagcaaacgcagggcaacacaagcggaggaggcgaaggaggaacgacgtaaagcacacgaatagttcgaattttcctattcaatggctcaaattgggagaaaatggggtggggcggtgtttttatgttttcccagtcgcccgtaaccagaaataatttcgggaggggcaccgaagagttttttgcttgaatttaccaattttcattaaaaaaattttaatttttcatctcgaggggtggctttctacggacctacgttttcctcttccaatagaatt

SEQ ID NO: 13474 - DNA, 1082 bp, Heterodera glycines
ctcgacggtcgtctgatcgccgtcgctgtcattgatctgttgccccactgtttgtccgccaaatacttcttctacgacccggacttcgccttcctctccctgggcacatattcggcacttcggttggcctttttgtccgcattactctcatttttaattgttttttttgtggcatttttcgtttttaaattttgttggcatttttcactttttcaattcaatttcccttgcgttcgttcagtgaaattgcgttcacccaacagttggcccaacatcgtcccgacctccacttctattacatgggcttctacctgttcgactgtccgaaaatgcgttacaaaaatcggtttcggcccagcgaattgttgtgcgaccactgctttaattgggtgaacaattcaattcaatttttgccatttttgttggggtttttgtggacatttatttggaaagggccccaattttgcctctttttcctctgttgaaatgccaaaaatagcgtttaattaaataaatatttttcattttgttaggtccccgtgacggaatgcgaccgaattctcgaggcgaacggcggccgtttcagcactttccacccgtccgctgagcccactcgtgccgagttggacagtgcccaaatggaccaaattctgtgccttcacggcgaccccccgcggccgttgactttcgccagccttcgcaactcattggaaacggccgctgctcatccatcatcttccacagacagtcaacgacagaacggacggggcgaggggccggagatgggggtgggtactgtcaaatactgtactctaccgtatagtgcattattatttacagaagagtaaacggcatggcgaatttagaattgtagaaaatgcaataaaccgaaaaatggattcaaagatatttttctggcggtggatctaaccctaacgacttttctaaaactggggctatttgctctgtggcattctcctcccgtctccgtttcagcagcatgacgcctttttgaccgtcgatggcattggccccggcgctttgctgcgccaactgacggacaaagtgcgcacgtacgtccg

SEQ ID NO: 13475 - DNA, 1258 bp, Heterodera glycines
tggtcctttggcggctaacaatgaaagaaaaacgacaccgcctcccccccccccaatttgacaatgtccgtccgtcgtggtcattccgctggctgatgcttttcctccgctgctgctcctttgacattatttaaattctcgtcactttctgtttagtcgccttccggcgtttctcgagaaagttaactttttggctggcgctgtaagattcgaccaaattgaacttgtttttggaattttatcattcgatgatccaaaatttgctgggggttttaaattggcaagcccaacaatttcagtcgcgatttaaaataaaattcagaaatagtcctactgtacaatttacccttccctccctccctcaaatgccaaaaatgtgccaatttctctcgccggtgcctttcttccttttgcttcttccgctttttctgccgtcgctttgtccctccattttggcacatcagaacaatgcttttgcagcagccgaaaatttgaacgaacatggccaaattgagcagcaaaccactaaaaacaatgacggaatgttgggcaaattgcgcgtggcggtggcgaacgaaaatggcaaaatggtggaaaagcagaaaaagcaacggcaaattgagggggaggaggaaaagcagaggcagcagcacaagttgatgatgaagatgagagaaggcgccggcactttgactgataaaaatgatgcaactaatgatgacaatgacaacaatgagcagtcggtggagacggaaggggtaaaaaggaggggggggggggggggaaaggccctagggggattaatgggaatggggaaaggctctgaggtgattaatggaaaaagccccggtgcgactaaagggggaaggcccggggcgggattatggggaacagccagcagggggaggggagggaatggggaaaggcccaggggtacgagtgattcgaggagaactcggtgaaagctgcgatgagaattgcccaagaaggaagcgttaaaactccaaggagtgcctcgaggggagaaatgctcacggggagggcggacaaaaacggacaaaggccccggggagcaaaaagagttttttcaaatcagttttcaaaaattgagatcccacatgcgtatggcaataaaatcaaagaatattttttgtcagattttggaccatttggactatttgatccgcggtggggtggagaaaccgcaacagccggacacggaacagccgcgggggggcggcggaacgcgcggcaacga

SEQ ID NO: 13476 - DNA, 1157 bp, Heterodera glycines
  unsure (1)..(1157): unsure at all n locations
gtatgtttttaaaatttgnagatttttcaaaaaatttgttacacatactcctgatctgaaaaacttaaatttgacatcgcataattatttttttgtccaacaaacagctttgggacgagaacggtgacctcagtttacggctggacgaagcactgatgggccatgagcaactgtccatggagatgaaggagttgcaggaacggcacttggaactcagtgccattctgcgcgaaacggatgaggagctgaagcagtaccgggaccaagtgttgacaatcccgccacggcgctgcaacagcgtcgactcgttgtacgattcgttggccagcgagttggagggcgccgattcgggatgttttgggacaccaatgttttcggcacggtgagagaggagactatttgctcaacattttgtatcgacccgtgacaaaatttttgccaccgaaatttcgacctccaaattttctaaaaaaaaaaagtttcaaacatatttttaagatcctaaaaaatagaaattttttctagcgattatttggaaaattttgaaaaatgaataattcatcataaaattagaagaaaaaagacgctagaaatttttttcccttgaaatccgtttcataaaattttcttttaaaaaattttccaagattttaagattttttcttgtaaaagttgctaattgtaagtttgaactttgaaaacatgactatgatcacttgtatttcccaagactgcccttaatttttggcatgcaaaaactgtcacgtttttggacggtgtactttttgaataccaatttttgattgcacatagatatggaccatcgccacattggagttccctgagcaacgccaacaacaacagtcgaagctcttcggaccaacaacaacaacaacagcatcaacactatcaacagctcccgtcctgctccaactcgggccgaccgtccgacgcggccgaattttttggagtcgctgctgaacagtgctcactgcaccatgaacttgcacttgttgctgaacacatgccgatgatgaacagcaacataatgacatgctgatgatgatggacggtggcagcggcggcgcacaatcgtacgatgtgccgtccaaggcattgtttgaggccgtgtgcaggacatttgaggaacgacgaca

SEQ ID NO: 13477 - DNA, 1373 bp, Heterodera glycines
  unsure (1)..(1373): unsure at all n locations
cacagtcgcaaacaagctttgccccatncgatcttatcacaacaacaaccagactgtcgtcgtcncaacaacgagctccacaccaacaanccactggtggtgtgttgctacagatgtccatcatcatgttgctgctgaaggtcatcattattcacattcgcatcccatgggcattttgcgtcgatttgaccagctcgaacttggtgggcacagaatgtgatgaaacacgcccaataaattgtgcacatccgttttgtctattcattcgttttattgttttgtattgtatcctcaagcgcaaccagtcatttctcttctcttttttccttggcaattctctgatttggtccattaattgttttgttttaaatcccgcaattatgtattgtattcttaaaacgcctctcacttaaaccccatcaaaatggttccaaaaaaccaaaacattttgttgtttctcctttcaattcaattgctttctctcgtcacggttcattcactgctgcttaacgggatttattgaaataaatgcatttttctttttatatttctccttcgactcgaagtaaaatattcaaacacaacaaacaaaaaaagtttatctgtaaaataacaacaacaaaagcgtgccgtccgctgcacatcaactcatcgcaattgtttccgaaattagatcattttttcaagcaatttgttgatttggtcctcgcggtttccgtagtcgcctccctccacaaaatggttggacttcttcttgaacccgcccacggggttgctgagtttgaagggccacaaaaagttggtcacttgcttgaagtggggcccgactgtccaaatctgaaccgagacaaaacatttgaactaaaagacacgagacatgcatcaaacagtgtttcacaattgatacacaaccgcccgggctattaaagaaatttcaaatttggtatattggtgcgattcattccccgccccgctccccatgaaattttttataaaaaactttttcaaacaaaaaaaaacagtgaaaaaaacccatagttgtttgttcacctggtgaatcatgtcctccacacagatcacgtccgatttgcccatgtttcgctcaacaatggcattgtccgtgatcggaatgcgctgcccactctccttggcataaccacgcttgtacaccaactggcgaatgatcttctgactcgggtagccccacgcaatgtacgggtcagcaatgcgcaacatctgaagaagaagaagcaattgcataaattaattttacacgacccaattggagctaaaaattgataaattcatccaatttctaacctggattgtcgctttgttcaacttgacgaatacgccgttgttgatctgacgca

SEQ ID NO: 13478 - DNA, 1534 bp, Heterodera glycines
tacctcttctattcactgttgtgcctcttctaatctctcccttacctcttctaatcactgttgtacctcttctaatcacttttgtacctcttttaatcacgattgtacctcttctaatcaccgttgtgcctcttttgacaaatgttgtacctcttctcattgttgtacctcttctattcactgttgtacctcttctaatcactgttgtacctcttataatcactgttgtacctcttataatcactggtgtacctcttctaatcacttttgtacctcttctaatcacatttgtacctcttcatcaaatttgtacctcttcatcaaatttgtacctcttctaatcacttttgtacctcttctaatcacttttgtacctcttctaataactgcttcggatccaacaattactcacaacccataaataacgggcgcgaagcgcccgtcttgagcctcgatgtggactaacccataataattttttaaaaattcaaaaaaaaatttctccaaccaaatcgatcaatttaaatcgcttcacagtctaggtagcgaagctcacaaagcgcgaagcgctttttcccagcccagatccgacggttcacgcaccgctagtttgaacttttatgagtttgaccacttcccatgaaccagttgagctgaatttccactaatgtctttatatttatggaacacccgtttttaggaaaaaaaattcgtaaaattttttaccgttgtcatttcgccttctcactttagaatcttaatattttcaggattgttacgtgcatttaaaatttcaactcgatcggcccatgggaataggatgtctttatattcagcgcaattgtataatgtattatattaaaaagttatacgaactgaataattttattataattaaaatttcatagtgctgagcaaagttattatttttttttaattaatttttttgaaagtatttttcatcaattaaataattattttctttaactaaataagtaaatatcccttaagattttcgcaaatttattataatcttttacttgcctcattgcggaaatcaatatcaatgttacaatgacgacttcactgaattatttacggtaaataaacttaattatcaaaagaaagtatttattttaatatttttaaatttctttggtttcaaaaaaggtaactcagagttgttgcgaatcaattatttgctcttcaattattgattatttaatttatctattcaaaaatgttatctcattaagacctttatgagtttaaatattttagtaatatgttcaagtgatgagcttttttttattatattagattatatattttttcaaatgatgaaatcagttttcaaatgcaattaggaagccataccgtttctgattggaaaaacttcatgagagatgtgacatcatagttttactaaagtactatctttacccacagcactctgagaaaattatcgagtcatttggaatatgaccgaataaaaataaaaactaacgccccagaaaacttacacattttaatg

SEQ ID NO: 13479 - DNA, 2843 bp, Heterodera glycines
  unsure (1)..(2843): unsure at all n locations
aattcttttctcatcggcctggctcatcttcggccaactttgtgctaatgtaagcaaatttccttcacaatttctcactttccacatctgccaatttacattttattttttgtgcgccattttcctttgtgctcacttttcacttcacaattttctgcccgatttgttgtcccattttccatttcattcacgtgtcgtctgtcactccgcccattttcaaaattgtctatttaagcggccccgaccaaggggtcgctctcttctcttccttccagcccgagggggcctcttccttcggttcattccctttcggatcattcattttgctggacttttcgatcaatttcgtcgttacacatttttaattcgtcgatcgcttcgttaataaattttgttcggaattcgcttgggggaaatacggaaaggagggaaaagaccctcctcacttcatcaaattcggcaaagtctcgtgcgaggccaaacgaaggcgcccactgtcgcgacaacgcgaaatcctaagataaacccaaaaataaaaaagggaaaaataaaaaacaatagaaaataaaatggggaaaaataaaacataaataataaaaaatattttttattttggaaaaataatattataaaaatctatcgaaaatataattacataaaaatgggaaaaccttttgaaatgaataacggaaaattgtttgaaaagggaaagtgcatttcctcaggaatgaaaggaacgaaaattaattaatattaaatgattaatatgaaatggcgaattctgttaaggattccgttcgtaaacaaattattaatgattaataaaatataataaagaaatggaaatgtaaagggaaaaatggaaagcaaacaattaatgggaaaatggaaaaatccaaatggataaaataacaaaaacagattttaattaaaatgataaattggagcgcactatgatacaagaaaaccgtataaaagcggctgtgtttttcagtgattttcagattcgaggttccttccgaagattccacggcacccgcctgccgccattcagcacacccagcccgcactgctccctttccatgccattgcccgagtgccctccctttcccgtgccattgtctgggccccatttgaattgacgatcctgagtgccctcccttttcccgttgccgttctgaccttttgatttttgccatatttttccatttgtgattttttgcccctttttcgttcacattttcatgtttgccccactattttgttttcccctcaccgtcccgattgggacggtttaattacccaagtttgagcctgacaataaggtggattattcctgcgcacttgctccttgggtctttattccaacaactcgctctgaatactctgacatccccgaccccatcccacaaattaattgttttttatttttgccgcggttgcgctgagccgtgaccgcgacaaattggtgccatgacccgggacccctcccggctgttgctgagacaactcacttctgtcgctgagacgacaacttcggtcgatgtgccgacaaccccctcggtcgctgagacgacaactgccttcggtcgctgagacgacaattgcctttggtcgctgagacgactacaacttcggtagctgagacgacaactcccttcggtcgctgagacgactacaactttggtctctgtgtcgacaactgccttcggtcgctgagacgacaactccattcgatcgctgagtcgacaactttcggtcgctgtgccgacaactcccttcggccgctgaaacgacaacttccttcggtcgctgaaacgacaactgccacacacacacagacacacaaaaaacacaatacacatacacacaaacaaaaacacacacagacacacacacaaaaaacacacacgcacacacacatacacaaacaaaaaaaatacacacacnaaacacacaaaagcacactcacaaaaccanattttgaagtaaaaaactattacccaaaattaagtggatctaaacgaaaaactaaaactaatatactgtaataacaatatcacaaataatgtccgaacaactccgtctaaaaatttcaaaattaaacagtgaactaagttatttaatcgatgaatacaaagacggcaattttgctaacaaaatcgaatatgaacagaacaacttaaggcaatgcaaaaaagatttctccctaacattaaaattcattaagaaaattgaaccaaggattgagaaattgagaaaaaattacaaaaaatggaaaatatttataaaagaactgagtaccaaacataaaagaattgaagaaaaaatcgaagagattttattgaccaacaagattatgagcaaacattaattgatgctaatgatagattggacaatcgaaaagaaatttacttgaaagcaaagagagctattaaggtaataaatgaaaattatacacaaaaccaatacgcagatgaagaaaatgatagagaaagtgagcaaatagatactgaaaacgaaagtaaagtactatatttacccacagcactgagaaaattatcgagtcatttggaatatgaccgaataaaaataaaactaacgccacagaaacttacacattttaatggactattttctcagtggttttcattttgggacgacatttccagttctattcacaatgacccaaatttgaccaatatacaaaagtttaaataccttaaaggcttactgcataaagaaccatatgaaatgataagtccatacccgcttacaaatagcaattaccttatctgtgggggattaaccanaaataattatttgcagggtgggggaattga

SEQ ID NO: 13480 - DNA, 1667 bp, Heterodera glycines
ctcaaaaccccgatggaattattttggattttgtttttgactttcggtttggccaatagatttggaaacttggccaaaataaacatggccaaaaaattttgttttttctttttcagaaaaatttctttcaggctttttcttgttaagctcatcaaatttcataatctgaccaagttttaagtcgttttgacaattttaactcaagttatggacgttggtgtaaaatggtagccaaattttgttgaccttacccaattttttggactgtaactttagatataaaaggacaaaatcaaaatttttggcaaaaacatgacgagaacattcagataaaagaattacacacaaaaaagacataacaaacgttaatcaagtcttaaaaaaagtcattttgaaaaagcgcccttttttatgcaacgacctagtatatgaaaaaatcagataaaataaaaaaaattatttcgtgccaagaagggctaatttgcgtagcgcagcccaccgcttctcgtcgttgttgaacagcgccggctcagctgctgcgcacccggcggatagcacacggatgcagaccgtgtggtcattgttgcgcctccagcgtcgtcggctgtcagcaaaattttcgtcgtgctcattcgctgctgctgctgctgctgctgatgcttctgctgtttgagcgccatttcacgtgacggcggagagatggatgaatgttttacgtcactgccacctaagcacggcgtgccaaatgagtctttctggtaggccgaattcaaaagcggcaaaagactcaaacgaaaagagagagactgaaggagttttttcgatggccagaaagccaagaactgaagagagagatttggctataagcataaagctgaatgagatgagactcaaatggcatgatacttcgatggacataaagccaaagagactcaaatggaaatagactcggggcggcaagagtcgaatggctttcaaataagccaaattaaacttaaaaagccgaattagactaaattagcctgaaagccatgagactcaaattttatgagactcaagttgccgcaaagccgatgagagtcaaactgcacatgaaacggatggcaaaaatttaagcaaaataattccaccaccagcagcggcacctgatgaacgtcgtcgttgctttaagtcacctccttggcccactccagcaacgcacagtgtgctgctgcagttgctcggcggcgctgacgagccgccgccgatgcacagctgcatttgggggcgtgccaactcgcgcatctgtcgggggaaacggtaagttctacggtatttagcctcattagtcacatcgtaaattttaccgtaccgcttcgcgcaggcttaaaatggtagccgccggagctgccgacaattttccaccatattcgagtggaccgaccagctcaaccgaaccgcaacattcatcggtgccgctatctgttatgaagaaaaaacatttcggcttaaactgcgtgacagagaagtaaccctgctattagggctgtacgagaaatgatttttaccgagaatcgagaaccgagaccgagaagcgaaaaacccgagaactcagtgtttttggcaagaacatttttcttaattggtcaatgccctacattttagtatcaatttaaagcctgaagtct

SEQ ID NO: 13481 - DNA, 1592 bp, Heterodera glycines
ttaaattggcacaaaaaattgtaaaaaaaaagtcggcacgaaaaaacagaggaatcattgaactttcaactttggcattctttcttttccgcatgattggccccgaattggccggaaggaggtggggaggtgaatgaaagtgtgagcagtgaagtggatgggtggtttcatcgccgcgtcaaaaagtggcactccctaacggcgggtgggggacggcaatttcccctcgggggacgctgtgggaatgccatgccatgaatgacttcatttagccctccaagtccctctgcctcccccagcatgatgccctcctcgactttgcgtctcgggctgtgcccaaatcgaatttgtcgctggtcacagtgccccgccaggggacacaagtacaatttgttgccgaagacgccgtgccgtcctcctccatcgtcagcggcgcgggcactcgtcacggagagctgagcagattaaaatggttcttcgtcaccgcgggtgggggctgtggggtgagggtgttctcggcacataaatgggcaccccccgccccccgccgcccctccctttgtgacaggataggaggaaaagcggcttttcaaatcgcggttctgccgacgatgcttaaaagtgtgccgcactgctcccaccaacaaaattcaattttggcaaatacaatgtgccgttttgtccgttcctctctctctctctcccctttttaatggcatcgctttgtgtgtgtattgtgatgcctttttggaacataaaaagggaaatgaatttatgaatggcttttcatttgcatgggaatgtgtaagtgatggaaaatctgctgggcgttttaggaaaaaaaattaatttttttcaatacaaattacacttaatgttgctattacgtaggcaatgaaaaaacctaatttgcaatttaggaaatgtatctgaaaacagtcattatatgtcctaaaaacgccaaatatgtatctatatgctaaaaaccctcaaaatatgtcctaaaacaccctaaaaaaggccaaatatgtctcaatattgaaaaactgctcaaaaaatgttaatttttcaaaaaatctcattatttatccatttcgctgcacaattgcaaatcaaaatcattttgactcattgtgcattattttttaattcaacacgctactttatacaataatttgagtgcaaaaaaagatatttttgactaattttttagaaaatcgccaaaatattaacaattgttattttgataaattattgcaaaatgaataagaaacaaagtaataaatctttatataatattaaatttgcaaaaataaatttaaataactatataaaataaaatctaaattaatttcttcacaaatgagaaaagcattaatgcacttgtcgccaattttctaatttgcgatgataaagcgggtgccaacccgccacagcatgcgagagtggtggtgttccacgaagaagaccccgacggaaagctaatcgggaaagagctcgacaccagcagggatgtgcctaggtttcgcatttcgcctttcgcattttttggcctttcgcatttagcttttcgcttttggcgcaaaatgcga

SEQ ID NO: 13482 - DNA, 904 bp, Heterodera glycines
atcattaagcttttagcgtgcatcttaaatctctggagctgcgatcagcccacaaaagaggtctctaaatttgtattccaaatgtaattaacaccctcactcatagccaccgcggcccatcattaagctttagcgtgcatcttaaaatctctggagctgcgatcagcccacaaaagaggtctctaaatttgtattccaaatgtaattaacaccctcactcatagccaccgcggcccatcattaagctttagcgtgcatcttaaaatctctggagctgcgatcagcccacaaaagaggtctctaaatttgtattccaaatgtaattaacaccctcactcatagccaccgcggcccatcattaagctttagcgtgcatcttaaaatctctggagctgcgatcagcccacaaaagaggtctctaaatttgtattccaaatgtaattaacaccctcactcatagccaccgcggcccatcattaagctttagcgtgcatcttaaaatctctggagctgcgatcagcccacaaaagaggtctctaaatttgtattccaaatgtaattaacaccctcactcatagccaccgcggcacatcattaagctttagcgtgcatcttaaaatctctggagctgcgatcagctcacaaaagaggtctctaaatttgttttccaaatgtaattaacaccctcgctcatagccaccgcggcccatcattaagctttagcgtgcatcttaaaatctctggagctgcgatcagcccacaaaagaggtctctaaatttgtattcaaaatataattaacaccctctctcatagccaccgcggaccatcattaagctttagtgtgcatcttaaattctctggagctgcgatcagcccacaaaagaggactctaaatttgtattc

SEQ ID NO: 13483 - DNA, 1047 bp, Heterodera glycines
aaatctctggagctgcgatcagcccacaaaagacctttctattttgtattccaaatgtaattaacaccctcactcccctcaccgcggcccatcattttgctggagctgcgatcagcccacaaaagaggtctctaaatttgtattccaaatgtcattaacaccctcactcatagccaccgcggcacatcattaagctttagcgtgcatcttaaaatctctggagctgcgatcagcccacaaaagaggtctctaaattttgtattccaaatgtaattaacaccctcactcatagccaccgcggcccatcattaagctttagcggcatcttaaaatctctggagctgcgatcagcccacaaaagaggtctctaaatttgtattccaaatgtaattaacaccctcactcatagccaccgcggcccatcattaagctttagcgtgcatcttaaaatctctggagctgcgatcagcccacaaaagaggtctctaaatttgtattccaaatgtaattaacaccctcactcatagccaccgcggcccatcattaagctggagctgcgatcagcccacaaaagaggtctctaaatttgtattccaaatgtaattaacaccctcactcatagccaccgcggcacatcattaagctttagcgtgcatcttaaaatctctggagctgcgatcagcccacaaaagaggtctctaaatttgtattccaaatgtaattaacaccctcactcatagccaccgcggcccatcattaagctttagcgtgcatcttaaaatctctggagctgcgatcagcccacaaaagaggtctctaaatttgtattccaaatgtaattaacaccctcacttatagccaccgcggcccatcattaagctttagcgtgcatcttaaaatctctggagctgcgatcagcccacaaaagaggtctctaaatttgtattccaaatgtaattaacaccctcactcatagccaccgcggcccatcattaagctttagcgtgcatcttaaaatctctggagctgcgatcagcccacaaaaga

SEQ ID NO: 13484 - DNA, 4398 bp, Heterodera glycines
tttttcaatttttcatttttctgagatgcaaatgactttttcaattatatggttttcttttccattgcaattaaaacaaaatgagactattttttgtgttggttaaaaccactacagatttgttagaatttgatggcatttatcattgttattatgaagacggtaagatattctacaaaaatagctttgtgttgtgccataccacgcttctcgactacaaaatgcaaactaaaagatgagagattttttaattgttattgttgttgttgttgtctttggcattgttttggttagagaccgtactggaaaatgtgtcctttaattttggttaacatgaaatgcaagaaaaaatttaattttaattagtaaactttaattaaaaaaaaatcttgaaactggaagatttcgtatggatttgaaaaattttcttgtgaccgcgggagcctgtctattcgtgccgtacctgagattgggagcttttgttactgtaactctggtggacaataaatgcaaaaaacaagccaaaattggttttgcttattcatggttaaaaaattatcaaaaaaggcacaaaattaaattttgttccatttttttttgcaattattaaccaaatatttccccaatcatcacaatttatggcattcttttaacattgaaaattggctaattttctcttttttgcataaacattttggcatactttttgtcaaagagaattcatagaataatctctttaattaagaataacaaaatgatttttatatagattatagacttttgcattttaatttacaaaaaactttaaattaacagaaactgataaatattccttaaaaattaaaaactaatcaaaaagtgcatttttcaaatatttcctattagtaaagagaatcccaacttttaaaatggtgttttctgtggagcatacaaaaattattgaataatcgaacattgtctggccataaaaggacatggcactgtgacttcttgttggacttaagtgcattggaaagagaaaataaaaattattttattgagagcataaatttataaatcagaagattaccaaataagggcactgagaaatctgctgataattgtctggcatcgatgatggcatcacgcacaatgaaatggaaaagttcaaatgttgcattggaattaaaaatttaaaaaaattttttgaagaattttcattttcgagtgtcgaattaaaaatcataaaaagaacattaaaaccataaattaaattaaaatatatttcttataaatgtccaaagtttctctttcgaatagtaaattcaatcaaataatcaatgaattattgctaaatttttgcattacatcattaaacggtgggtttgggaaggggctttttattgccaaatttggcaaaattggcatcacataattaaacataggaattgacaattgattgctaaattttaggggaggagttgcgttttattgccaaatttggcaaaattgcatcacatcattaaaccatattcatttattttataaattaatagcaatttaaaaatatcactttcgctttttcttctattgactgtgaaatctttgtaaaatttaattataattgggccttcaaatgtctattaataataatcgtgagattttttttggaatttttttcctattttgggaagttatgccacccgaacccttttttgcaccttttaaatgaataatttctgatcaaattcaaacaattaattttcatcaatgacagaaccgaacatttcctcacccaaatataaccgaaaattaattttcgtcaaagaaaaaatcaaaaagcttccccgagaggaagattaatggatcaattgaggcaacaattgatcctatatggtcgaacaaagtggggagctgctggagaaggcagggtcggtagttcagctggtagaacactggtccggaaagccagagacgccggttcaaagccggcccgccccatagtttttccctcaaaagcttccccagcagctcgttcatatatttcactattatatttttcctgtctctatttcttaacccatccaaaacttaatgtccccaaccaaacatcctgcaaggttaataaacaaaaattttcagacatgaattcgaccatttttctgtccacgatttgctgcttcctttttttggctttcaacaatctccaaagtgtcgctgctgtggtaaagcaagtgtgttttccaggcatagaaaactacgaaattagcatgtttaatgatcgagatgagtcgatagaagaaatcgaaacagaaacagttgtaacagacggcggaaaacaatgcttaatgcttaatgcagataaatgggatggatatgaagaggatgatgtgatttgtttctatgttgaaactgaggtaattcaaaaaaatttttaagcaactataaaaatatacaccaaaatcatttttgaaatcacctgttatttgattaagaatttaaaatttagcctattaaaatatttaggaaattttattatattttatattttttcaaaaaattccgatttgtgacttccgattcccgacgttttggggtcggaattctgatttccaactttcgaaaaaattttgggccgcggaattcctgtttccgatttccgaaaaatttttgaccctcggaattccgatttccgagaatttttagggtcggaatgccatccctgcccacggtactacacgaaccaatcgcacttctaatattccgtgaaatggctctaaccaactaaaattaatcaaaaaaataatttaaaaactaaatttattttataattttttatttttatctaaattcttaaacttagaaaattattttcaatttgtaacttctccaaaatttctattttttattttttgtggttgggaaattttcgtaattaaaattaaaaagaatttttactttttatgattttttcacaaggctttagtttcttttaacaaaaaatttccttttcttctaatttattttctctcaactccctcccccattcttaccattgcttaaaaattttggtttttctgcccaaattccaaaattcgaaatgaaatgatcaaaatccctgtgctactcgaaccaattgcacttctattatttcgtgaaatgctctaatcaacaaagctacaagattactttatttttgtccaggctccgccagtctcgccttgctcaactctttccgaagtctttttaaaccccaattttattcgagaggtaacgaattattatttttttgctaacttttcccaaataatataaaatgtcttggttgtttcagatgttaggttccgctccagtttctttattgagaactgatgatagtaactatgtcttagacttttcggaaggactgcgacattattattattactttaatcctgctattggtgggatggattttggattctgaacttggaagtgaatgtgcgatatcttggtgctatgacgtcactcaaaaaaccatcaaaacgacccggcaccgaaatctttgctaaaaatattatactctgttgatcgaattctttgctttgttgatgcctatattggcctgttgcataaaagatttttaaaattttgtatgcaattttaatgcttactgattggagcttcagtgattgatttggggatctgcagtgaaattgcaaaaatataaacaaaagggaaacaaaattttatagtcaataaaaggcttacctaagtcagaattttttggccaaaacttttaggacccaaattacattttttttttgaatgtttaggttaacaaataactcaaaagttatcaaatgacatcattaattgtttggctcaattgaattttaattaactaaaagtttaaagcctataattatacatagatacatgatcatagctaaaaacctacatattttttatataattttttcagatttaacccattttaaacattaaaaaaattacatttaatttcaaaaaagtttcggccaaaaaatctgactcaatgttttttgaaaaattttgactcggttatagctacaaaaataggctaaattcggttggccacgaggagagaccgtattcattcacttcatcataagaaaaatgctaaaacaattgagttcccttatgattcgttaagttcgagagtctcggtctcatttagtctctctcgaagacagcgaccaaaaaatccgagatttttctcgagtctaggctcgagaacgagactcttgaacaccacttatcaaaatgtaactagattgctaatcttttttatcgaataattttgtgcttatttttcactatccattgccccacaacgtaatgtcttttattttcaggctgattaattaaaataaatataacataaatatgtagaaagaa

SEQ ID NO: 13485 - DNA, 1587 bp, Heterodera glycines
gaggaagggagggtgccaagccatcgcattcccaagccaattctctccaccccatagcccagccatctttcgttcatcatttgatcatttgttcgtctcctctaagttagcagcctcccaacaatttctctccccccccagcaaaaagtgatccctcccccactcaccggcagcaaaaaatgatcaaattccgtccgaagaacaaaatcggacaaaaaagaaaatgttctaaaggcttatgaatagttcttaaattcgaaaacataaactaatcataaaattcagtaacttcgttttcgcgcctcattctctctcccccccccccaataaatttgtgtgttttccgttcgattggtcattcttcgcctccggcgggggtctctgccactttaagcaaaagtcatcctctccctttccagcagtttgctttgtacaattcgtttccaaagggcaaatgtcccctttactctctcccctcgtcgcctcgttgccccccgcccattttccccaattttctcccaatcattttttgttcctttccatcgttccagctatacaaatttagttgcattccaaaagtcttcccagctatttcagtactaatcggtttatgtttcaacaattggtttttgtcggttgtcagtctctctcccccctccggctggtcacttcctccgtccccttctctccccctcgtttttccttcttttgccccactcctcactcattccttcatttcctccaccgctactcgtgacccttttctgatcggacaactttcccaccatatgtccccccatatccctctcgtcctctgatcaatccattatctcccctctctgatcagttttgtcagcttttccctttcatccttcgctccccccgtgcccattgttcataaaattgcatggataagtcagtcatttgtttggttggcccgtaatattggtaaaaaggcccggtaacatcgcccgcctcttcgttgtctgccggaggtgctttgcaagtgataccccgcggggtgtcagttgtcccccgccccctcctccgaaaatgtcacgactcggaagatcccccgggggaagccacgaaatggccaactccgacccaaacacaccaatccccggcggaaagacaaatttagcggaagaaagaggccaaaaaattatgatgggcttatgacatgtccgtcctccctcgtctatcattcacttttccttttccgtcgattgatttgcccaattgcccccacccctccagcgattcgtccgtctctccttccgccgatcgcttccgtctgtcttcgtccgatctccgatcagtgccctccgccactgaccaccgccgccgcccttcgccaactctgtcccgctctttgtgtgagatttccgccgatcgcaaaacaatgcaagcagccctaatgaggaggagggaacctgatctgtactcatccagcgaatatgtcagacacaactacggcaccagcggaagagcggcggacatttgccacgaaaaaggcaaaaaaagggggaggaaggctaattgacttaattaagaggactaatgatgacataattaaggcgatgg

SEQ ID NO: 13486 - DNA, 1639 bp, Heterodera glycines
cagcattttccccaaattcactcagatggaaatgaatgcgcgcgacgcgcaaatcctccgacgcctcgaaggcattcaattcgaactgaatggagtgctgcaaatgagcggccaaccgaagcggagaccgaaatgaaaaggaaacgaaaaacacgcgcctttggcattctccatttttggctaataaatgctttaattaactctttttatagtccagttacaatgcaaatatttccgatcacatttttcatttgatctgatcagattcgggccttcaatttgctcgggtccagcaccgtcttcagcttcatggctttcattatgttgccccgtattttcatctttccttgcatgaacgcctaaaccttctcttatcaatgaccatgatcagcggtcccctaactccaatcggttatcagtttcaaattgataggcttcctgtaccaataataccctcattggcaagatacccatgagggtaccatccatacaattttcgaattttatgcttcctgtaccaaggttaccctcatgggtaagatgccaatcaggatatcattcatacagattttttaattttattattgttcgatttcgggtcaggggttcggaattagcaaaaatggatgctatattcgtaatcagcgacctcgagaaccccttaacacttattttcattaattcctgaaacacatttatggcatctgaaaaagaatgtagaatctgtcctgtaaactagagaagtaccatcagttccccctactatgatcagtgactcgtttttgtctgatcagtgttctacatgtttcttagatccgtttctctttctctgatcagtactttttgtccatttctgctgatctgtcccattcttttccctttcttcgattgacctgatcaggtttcagcttgccagcagccatttgaatgaaagtgtcgtcagacagtgcaatttcgacgtcggctttctctgtctgatcagtggcagtttttttcccaacaaatggcggcgaattcttcagatcgaccgtccattcgcgtttgtccgcgccccgactgatcacaaatttgaaaatcgatccgatcggctgttgatcacccaactccgattccttttaattttccttttttctgaattatcctctcaaattccgaaccctcgtcgctctttcgcgaatctcttcgaaaatcgcgtcacttttgaaatcccttttgtctccgtcttcaacacctttcccgtgtccttcgtctttcttttggtttatgagttcgggaaagcccaatttgtaaatggcgacgacgcccgcgccaccgatgcctaaaaaggggcacaatgccaagccgaacaaaaaggaggcaattcaaattccggcggaagttttaactcaagtaaattaaaatgcaagaaaagtggtgaagcattcattgaacggaatgaattgggcaccgttttccggcgacggctgtcggtccgcacggattacaatgcgcgagcctaaagggtctctttcagaagagattttgcacgaagatgagcagcagccgaactttgattaagcgaattgggcgaagaaaagcggagaaaaaagggaaaagcaaaacgaaaaagggaaaatgaaaaccaaaaagcgaaatgaaa

SEQ ID NO: 13487 - DNA, 1237 bp, Heterodera glycines
atataacattttatatatttatattgttttatttttttgaaatccctccctctggtgcccaaacttcatgtcgcctctccgtttgagtgctcaatttgtttttgttttttcgcttcttttcaaaactcttttggcttttaattattttatttaaatctactaaaaatatttttgggacaaataaatctttagcacaataaaataaacattttctgaacgaatttcgtctggtcctacggaaaatagaagttttctgcgtcgaatttcctttgttcgttctgttttcttccgtttaatagcccggggcggtgcgtggcgttgggcagtggtcgcatgtgcccatatttccaatttcgccggcaactcccggaccgccgttctctccggggtttccgggcgtgccgggctttcccgcgtcgccgggctgtcccagccccccgggctgtccaaacgagccgggcagtcctggttggccaggagcacctgggtaccctgaaatcccatgaaaattaagtctttttgacaatcttttcgctttaccgttgggtccgggtggtcccgggggtccgacgactgtcgggccgtaccctgtgattctgccgggggctccgggttggccagactggccagactcaccaggttgaccttaaattgggaattttgcatccacgaacaatggcgactgttggagaatgatgtacttaccatcaggcccaggtggaccaggcggtcccagcggcccttggcctccgttcgggccaggaagtcccgggtttccggaaggaccgggaagtccgggcgggccaggcagaccgggttgggcaggctgacattcaccacagcccgcgccaaaggatccgccaccactcgcaccggcttggcctaaaaaaatgtcaacaaattaaggctccatgaattccttcatttggctccctcttttgaatttgtcgccccttcacttaccatttggccctgtttgtccaggtgctcccggcactccgtcaaatccgggctgtccgaccgggccgggaggtccgggcaatccgggcggggacacgccacagccgcagcagaggccggcttgcgcggcggaacccgagacgcccgcttcgccgtaaacgaggtgccttgccgttctggccttggctgcgccgttgccacgtgcgtttccatgatgccgaccacttgggccagcgtttgcgtacgcgttagcttaaatgattgttaggcactttgc

SEQ ID NO: 13488 - DNA, 1664 bp, Heterodera glycines
tcacggagtatgttccctgaacgctgcttgcaaaactcgagctcattctgcattttggtcacattctgctggaagtttggtaggccagcggcacgctgagtatgcaaatcaccgtggcaaccttaaattttaaaaaagctcgccgatgagcgaccgttttgtttccctttccgattcgcttttaccgttgacattacaacgccgaaaaatgcgagccgtcggagctcctcggcctcctttttgatctgctgcttgttggtctccatgctgctggttgatttggttggtttgtcttccttcggtcggatggatcactcactgactgatgctcactttcggtggatgtccctttaaatagggcaacttcgccagggggggcatttgatttgcccggccgactccccgggccactgaactgattaaattggcaaaaaagtgaccccttctatctgcggctgcaaatgtcgggcaaaaaaaaaactgcacaatgtcttaaaagattgccgtcccccaattccgtcaaaatgtgcgcacagttccgccggctgcgcactttccacactttctccccggcgtcggactgccactgattaatttaatttcatttttatttttgtcttccatttttttggtataatcgcaatttttgggcgacagcggcagagagagagagagagaagagaaagaagagatcggagggccaaaaggggcggagaatggcaaacagagcaaaacgccaaccaacgccaaaaccagtgtcacgatgatcgtgtcatgttggacgactgtccaacgacagataaaccgacaaaaaaccaaatcagcaaagcgacgaacgacaagtgtttgttgcgtcccctcccccgtccaaaggggggggggcactgctcaaaaaacagtgcccgaggcgatgctccgccgattgcccattatttatttatttattccccccccccccgccaatcgcacagcaattttcatttttatgtgtgctttttcgcggcaaaaagttgcgaaaataattaatttcctttgctttttgccaccattggttggaggcgcagaacgaacggacgaccgaattatacaattttcgggcctattgttgcgggagggggggggggggaatccccggcggcggggaaacgatgaaaagcggaaacgattcatttcactaattaatgaattaattaagtcactcttctgaaagagcagtgaaaaaatggaacatttggacaggagaaaaaaaaggacagaaattatctaaaatgagcaaaaccatggaccaaaagagtgcttattgcttatccaattagacaaatgctcaaaggaaagtccgtccgtcccaaaagactaataaaaacacaaaaaacaatgcctttttttgtcgacggttccatggattaaatatttgttgtcctttttgatgttccttctgtttatttgtttcattctttttttgttgaaaaattacggttaaattacatttaattaaaaatttaactgtcaaaaattctaaaacaaaacaaaaaacattttgtgtctttctttctatgggcgtgcttttctcttccttttcccccctttctttttttctctgcgctttttgtcgtttctctttggtccattgtgccgttttggcgttcgaaattctgaaaagggat

SEQ ID NO: 13489 - DNA, 2621 bp, Heterodera glycines
  unsure (1)..(2621): unsure at all n locations
ccaaaacacggacaactgagtacaactgagtaccgaggtcncggttttgaccggggaccagttcccgggggttttcccggttttcccagccaaaaattcccggtttttcaacccgaaaaggtcccggtcccggttaagcccaaaattcccggtcccgctcaaaaaaacgaacagaaaatttatttaaaatttataaaaatcttgtaaaagtaaaaaggaaaatctgtttttcgcgtactatataaaaacaaatttaacaaggcaaagaaaattatcagaaatcacgggttcatgacaattacgcgaaacgcagcgatgaaattccaaataatatgcgcctttttctttacgtaataaaattttttttattttataaatgaaattaccgtatttgctctttttatatgccatggtatattatttttcaacctcctcagaagggggtagataattggagattggtagactaatggagactgggagattatttttcgatgatttatttagtggaaaatttttgaaatttattttaaacatgtcgccaaaaaatgtcatcgcgtcaaaaaaaaacatttttattgcatttatgttaaagaacttctgaaaatgactccaaaatgacaaaaatctatcattttcttgcttccggtatgcataaaaattggaatttttaatttgaagaaaggagctcaaaaaacgtattttttcgttgaaatttttcgattctgatgtcactatcgggcactagaaatcactacctattttggcgcttcgtactaaaatagtgaaaatttactatttcgacatttttaggaaaattccttaacaaaaatgcaataaaaccaaaaaaatacacccctaagaaacgacctaaacattttttcaaaaaatgcacccctgagaatcggtctaaaaaatttttcaaaaataccactaagaattggaaaattttcttaaaaattcttcccacaatttttttttcttgacaaattttgattaaaaatgttcagtattttgataagggaatagttcaaaggaaaagtacctcatttgcaactccaattagtgaataaaattattttggcttaatttttgactgaaaattaggtcactattcgtcactatttcggactttttgccactattttggaatttttactcactattttagttaactatttcgagattttccgtcactaaaagtagcgacccaccctactctaatgatgatgcagggctggatttgttcatttattagccccttttactgttgaattgatttttttggaaaatgtgccaaataaattattaaaaaattctatttatcccccctggcacataaatggagactggtagattattttgcaacctcctcagaaaggggtacataattggagaccggcagtttaatggagactggcacataaaaagagcaaatacggtaagtcaatgacttttttttctgctgattcgaaatgccataaattatttaaaaatctacactttgtttaaagcttctaactattatgcattttttttttctacttttaagaatttttttgcaactttttgattttttcgtgaatttttagttgacttttgatgttttttcgcatttaaatttctatccctacttttcgttccggcctaaaaatacacagcacagttaccagaattggtcgtccaaatttgaccttttttccgagttcgggttgcgcatggggtcgaaatgggtctaaatggatgacggatttatgatcagtggccttgaaaacctatgcatttttaatttaaattaaaatgaaaaattgttttgagttaaactgcataagagctgccaaatcgaaatcgaaaaaagagagtgaagaaatgagaatgaataaattggtactttactgttatgtgactaaagccaaatttcaaaaaatcaacaaaagggcgcgcaaaattcacacgataagctgatccatttgataaactttatcagcgatttttacattttttcctcccaagtgatgctgctgtctgctgtgcgattttcgcgcccttttgttgattttttaatttcgagttgtgaaagtccgggctttttgtttatgatggaaaatctctttgctgatgaaatgctataaggaatcactcggaaaaacaaagtcaattatataaaaaagcttagaatttgcggatattataaagcaaaattatattaaatttacgcctaattcctcccttttatcttttgggaaaacgagcaaaatttcaaaagaatgaaaattaaattctatttatacctacttcgatggattatttttttaaatgacaggtctttgaccacgatgttaaccggcaaagggtcagccgtgcgcaattgcccgcggtgattgacgagatcatgaacgaagcaaatgaaggcgccagggcattcattttggcgaatttagagaatgtccgaaaggttaatatggggttaaacggtcgggaaggctcggtcaaaaagaattagtaactgtatcagccacgggtcgcagtcgcagtctttctgagaatttttactaaagttttttattttttgaattggcaatttgcgtccaggtcgacgctgttggtatcaactagagtag

SEQ ID NO: 13490 - DNA, 1794 bp, Heterodera glycines
  unsure (1)..(1794): unsure at all n locations
aatcaagccctaacgagttaaaagctgaattgaaatgtccatctaggccaaaaatttaatttccgaaaaatcaatattttttctaaaaatattaccaattaatagagcttgaaaagttttggcttgaaattggttcgttttccctgggaattcattgaaaataaataaggttcaaaaaccaaaaaanatgataggcaagtttcgacatctacaattatgcattttattttattctggtctgcgcaaaactctgagagtagtacaaccgagactgaattaatttcggggtttttagcgccatgtacaaatcacattttaacgaaaaggaacctgaatttttgcacaacgttttggaagtctaaggtaggggatacgaaaaccccaaaaagttaaaagtcgagttccaaaacctaggaagtctgaattaaaaatgacctctgatagagactggagacgggctattttgatgaaaatctgttaacaagtcacaacaaattcttcaaaatttcgcggagggaatttggacatttgtatgaaattggtttcggcagccccccccctccactagcagttatcgtcgttctaaatgcgaacgagaaaggcggtaatttgcgttttcccaaaaaaaaaaaaatttttttttgtaaaatttttattgttatatctaagagaaaaaaagatgaaaagctaagaatcttgtaaatttttaagaactgatagtagttagcaggaaaaattggtatcttcggcacaattaataataattttgaaacaaatgtctatttgcctataaatatataaggtttcgtaatccaatttttgaaagtagaactgagcgggaccgggaattttcgggttgaaaaaccaagacatttctgggtggtaaaaacggaaaaaaacttggactagtccggtcccggtcaaaatcattaagttctagagtttcggtttatttaaagaaaaaatgtagaaacaaaaacagacagcaaaacacaattatttgtttatttttaggtggcgattgagctgaacgcgatgaaggtgatcagaagggcgaagatggaggagtaagttactatttttttaaatcacacaggcccaaaatgtgcctatataaaatacgaggctttttaggccaaaaaaataacaaaagtgtgggtcagtcgatgccgacaaataccgccggttacaaattatgaaaatctgtggcccatttctttgcatatttttactaaaatttaaaaatttttgtatgaatcggatccgtgccaaaattactttttggtttttttatttgtattttctcttctaaaatgatttttatatcaatatttagtcattctcgagatttattttaaaattatcgaagaagttttgagaagttttaccattaatttggaaaaattaatgtgcatatttcacttttatgtgcatatattgaaatttggtagtttatattttatgcacatatttgcgctttaatacatataattccgaaaccgattctaaaatgaaaaccgagaatttaatccgaaaaactggttttaattaaaagcctgtggatatttttttaattatagctttctcttatttgtttatcagattgttgggaccgcaggtggcagggggccagctgaacgatgatggtgatgatgaagaaggagaggaggaagaggggtcggatgatgaatgaggaggggagaagggagggggcggggaattgtttagtttaaaaggaccacccgaactgaaattcggaaaatgtatatgcattatatagagccagggcttatt

SEQ ID NO: 13491 - DNA, 2826 bp, Heterodera glycines
ctagtggatttttcaattttagaaaaaaaaacaaattactatattttctactgaaatttcacccaatattttcgtaaatttaagttcttcattcgtttccccataaatttcatgcatttttcccataaattttccatcatccctattctttttccactcaaaaattattctgcatttattaatggtacgaagctagcatttaaaaaacattgaagaaaagttgaacctcgaattttaaaattattattaatattcaattaaaaaatagctttaaaataattcaatttaaatatttttattgacactgatttgtgagactattttcaaaatatgcacataaaaagtaaaaaatatgcacatacctaaatttttccaaattgggcaacattttcacaaattcttcaaattcgttaaatttaagctaaaaatctcaaaaatagctaaatgcaaaaatatagctaaaatttattaattttgaagaatctgagtaaaaatagaaaatttttaatttttggacatattttccattttttaaatattaatattttgaaaaaccccaaaaaatgaaatttttgaaaatttttcggtccttagagatcaaaagtttctgttccttgtttatgaattttgcaagctcttctcgtcatttttgtaccagtgttatcccatgaattgaaacagaaggaagggcacactttggtaatcgttcacatcattggtcccataaaaaaggtcgttttttcgattctaagaagtgctcgggggttatcgatggcgctgatcacgaatctgacatcagattatcatataaatcatctaatctatgatttttcatcaagtgataacgtcaaaaaaaatttttgatggattttcacttttactgttattcattcacaaaaataaattccatcaatatgtatgtagctggaatagttgttcgagacgaatgacacaagtcaaaaatccaactttcacatgaaaacattttcgacaaattttatgttgtcaattaattttatgcatattcaagtacatacataaaaggtataaacaaaacagtatattagatgaaagtttttttagtgggtgaacaacggtaaaaaagtgaaaatccatcataattttgacatgaatttactagaattaagcagaccgagttcttcgagagctaaccctccgaccaaacagacgcaaaattttaccgccctcgccaccctcttccctacaaaaccatctcaattgaagcacaaaagagcatttattataaacacaacaacgacaacaatacaaagtacaatcaatcactgggattggggcgggaaaaagtgagtggtaaagtggctcgacgtcttcacttccagtaccgcgcccgtgtttgtttggcctgtgtaggcgggtgcagagaaaacggtgatgagtcgttggttgaacattggctcaaatccggattggatgaactgcaaatggggaaacattaatttctgattaaaacgaaggccgcttaaactcacttggtgcgctcggatgatgcacgaaatcttcagcagctggcaagttctgataaccacatcttcgccgaacaggacacctgcgcctcgtggattcggtagttgtccttgcgcttccatcgggtcggcccacataaggtcaatgtgcagactatcggtcggcggtagcagcatcgggcgttccaattgtttgagctgttcaatgcttcgaattttctcgctgatgcctccatgcatgcctgaaaattgaaaggtggagaatgaacaaaaaaaagagcatctcacataatattttttggccgattagcccggtcagcggcatccacgcgaaggtgtcattgaagctgtcgaacagggcttgcgaatgggccggatagcgttcctccagttcctttttgaagccgtacctaaaaaaagaggggggaaaatttaaatatgaataagtgtgagaaaaaaaacccacgttgcgttgatgttgctcgtctcgtggttccctctcagcagcacaatcgatgtcggatatttgacctaaaaatggaaacgtttctttagtattggctgaaaaagccaaaccacaccttgtagcaaagcagcagcatgatggtctccacggattgcgcaccacggtccacgtagtcgcccaggaacaggtatttcttctccggcggggtcccgaggcagttgaagattctcatcaagtcaggaaattggccgtggacgtcgccgcagaccataacaggcggaaggatttcgaccagcgatggttggcgtttgaaggcgtcagttgcggcagcgcacagttgttgaatttctccgctggaaacctgcaaaaagggatgaaattgacaatgcaaaactcgctttttcacctctttcggaaactccatttgtttcgaccgtacaattttttggatcaaattgtcggggaatggtctcggagcttctgccatcggctttgctggtgctgttgttgttgccgcttggacgcacaatggatttgattatttccataggacaataatagggaatagttaggcaaagtggcgctatatggaaagtgaccagttttgaaaattttttcaaaaggggggacccttttgttttgcaaaatttttttgtgatagtcataaaaatttattcatcttaggtttttggggtccccgatcacgaatctttcaattattttgatcaattccgatttcctaatctaaatttgaacaaaaaatcataatttgaaaaattcaaaatttcgatttttattcgagttcgggattagaaattagtcaaaacacatgtcagattcgtgattagcgacctt

SEQ ID NO: 13492 - DNA, 2949 bp, Heterodera glycines
accctgacgtaccgtatgtacttcctcgaatatagcctttctcctcgccaccctcgaatatagccctcttttaagggggttaaacaatagatcccctggggctctattcgaggaaatatggtatgtactataaatgcttaaaatgagtttaaatcctaaaacgccaaaaatgattaaaaatccaaaatcatgctagccaggccaggcccgtaaattgttttgagattgaaggcgatctcttctgctgctcgcggctcaattcagcaaaaaatttattctttattattcattttgctgaaatggcattttggccattttacactaatttatgatttttctgttaacatccaatagaattggaattttaattaaaggaaaattatttaatcattattttatcaattggcaattcttttggtaaaacaaaaaaataaaattattaacaaagattttattattatttctttgtaattaagtaggatattaattgttccattaaatgagtagggttatgcttttctgactgcttttgattcagaaaaaaatcatttttattcatttatatgcccaaaaaatatatgcgatttattgaagaaaaaaaccaaatttggaaaaaaaattagttaatatctttaattaaatattaatttttttttaacatggaaaaaatttatttgctttttctttataatctaataaaaaaaaatcacctccaaaagactaaattttccttaatttttgtaaagaattgaaaatcatttgtataaattaaaatatgccttaatttttcggcaaaatccgtttacaaatagcactcagattttcaaaaatttccccggcggcgcctatcggcaccgcctgaccacgcccccagttccccaaaagttttttgaaaaaagcgtgccgcaaaaaaatgctaaaaattggaggcgaaaaataaaatattaatatatttttaatcgaataattttaaaataactgatttgaagcaatttcgcaaaatgttctgatttgtgaccccaaaatctgattttatttgactaaactcaaaaattaatggtcacgaaaacctggatttgtttttcgatcacggtcagggtcaagcttcacgggacgaattcacggtcacagtcacgattcacgggttttttcgtccagttttatttgtttaaatgacatgaaattttacagtttaattatttatataaatacatcggcctgaaaaatttcagaatttttcgcccaagtacaaattttttttttacaaaaaccggcatgtttgtaaaacatgaaaaataataatcaaattcacgacactcccgagaaactttcaagttctaaaaatatgagaatttttgtaaaaaaaaattctaatctattaaatttagcttgcagcagatagcctaatattaagttctctctgcaaaatttcaagtcaatcttaatgcgccagctaatggtttcattttttttggaattttaacgaaactttctttctattcagagaagaccccagaaaagaaccgacgaaatgatttaaaatttgaattttattcacaagtaacctaaaaaatcatttgaagaaattggaaactttaaattagaagcaaaatgccaattattaccgcaactggatcggatcctgtctggatttttctcgaatcctgatccgatatttggaattgatcaaaaagattttctaattacctagaaagaatttatgaaaaaacatttaagacaaatattaagtgaatgcttaattttgtcataaattttgctttgaatatacgtttaaagaaactgacattttaggaattttcaaactgacaaatgagtcacagaattttttgagcgccccaattctggtcacccacaacgacgactcgtctcattaaacaattcattttcgcataaattaaccaactcaaaaaatatggcacagtgaaaaagaaaaagtaccgaaataatagataattaattttaggtccggtcttgaaaaagccgggtatccccgggtctgggcccggtcgggcatcgggacccgtgcaaccctagaaaatacatatatgaaatttaaacgttaacaatgttcatgtgaaaattaaatataaatgcttattttttttattaattctgccggatttcctaatcattttgattgattttattaatttatatatttattcaatttaaaaatttctttagttataaaatgcaaataaatttttaatacataaaatgcattttcatttgtaattcctattagctatcatgaaaaaactatcaacaaatattatttattttttattaactgttaacgaaattttaacagtttcagagaatttatttgatgaaataaatgaaattataagtaaaataaaagtatgtgatttattaaataataatattcagttaaaaaaaataaaataaaaaaatacaaggttaaggttgaaccaacagcagatgaaccatttattttcgaacaagaaccaaattggcaaggaataaaaactgaaggtaaaatgaacggtgctgggacgttagtcaaaaaccatcaaaatggaaaatttttgacagaaaattattcataatttcgcataaaatagatcaaattctataatctagatatttttcgatagccctaagtgttttctactatcttgcaaaatttttaaaaaattctttaagtttaaaaaaagttgtgacctgagaagctcaaaaacccatggttttttgaacattttcagtcataactttcttgaaacttaacgaaactttttgaaattttgtaggctaatagaaaacacttagtgctatttaatgatatcaagaattaaaaatttagttgcttttgagcaaagttatatcaaaaaatattttcatttgatggttttttgactaacgcccattatgatggtttttgactaacgtcatagcaccaaatgaact

SEQ ID NO: 13493 - DNA, 1913 bp, Heterodera glycines
  unsure (1)..(1913): unsure at all n locations
agaaatttctgaaaatgaaaaaagaactcagtgtgaatggggataagcgacgtatgggcgagaaatataaagaaatatgcgcgaaacttggcgcaagttcacgttcaatttataaatggaaaaggaaatttggctntagtaagttgaaaaattagggccttaattttattaaataaaaagtcataaaaatgcgtataaaataggaaaatcttatgaattttaatttgaattcaaatcatgcagaggaaccaacaaaattaattcactgaccagtcatttttcattcctacacatcctctccttacaaattagtcaaaataggtccttatttttgtcattctgtgcctccatttatacaaaaaataaaaaaaaataataataataatattttcgtaaacaaatttttttcaatacttttatttttaatatttcctaggttaaattttttttattaattttaattagatctttttggctccaataaaaacgcatagattttaaaatttacgaaagttcgggttttcttgaaagtttttgttcttatatagccaaaaatgcctaaaatgtgaattcttcgtaaataatttatgagaaatatgtccaaaactcgaataaaaaataaattttcatgaaattgagtacaattaaaatcaaatgttcaaaaattttagaggcaaaaggacactcaaaaaaagaaaaaattgaaataatgaaaaggtatcaaaagctaaaaaaagaaggcaagaaattggatgaaattgcaaaggaattaaaaatcagcaaatcgaatttgagacgatggcaaaaggaattgaattttgaaattggaagtaattaaaaataagtcaaaacataaaattactaattaaaaaaaataaaaataaaaaataaatgccctttaagagaaaaaattaatttccaatgaagaaaggttaaaaataattaatacttttgacaaaattgagtcaaaattggtcctccgctggactatttgccgagatgttaaagaattaattgccaaaaaattgggaattgaactcagaacaattaatcattggagattaaaattcggcttaaagagtaaggcaaaagcaattgaatttaaaaaaattaattaattaagaaaaaataaaaacaaaaaaagaaaaaatcgaaattttggaacgttttaataagatgaaaaatgattatccgcaaatgacgaataaacaaatcttgagagaattacaagtgggcacaactctgtatcggtggcaaagcaaattcaaaattggaaatggaaatggaggtgaatttattaaatacttattcaaatcttcagaaaattgttacgatgattttgtttgggacaggaaaagcaccaaatatttttaaaaattggaaacgattctttggaaaataatatcttttagttttttactgttttaccaaagtgaatgtcatcgaaaatttaaaaaaaatcgttggtataaacaaaaaatagctaatttttgaggtgatttaaatgtaaaagtacaaataggtgatgtgccgtcgtgcagatagtcagcgcagtttttatgaaaccataaaatcacgaaaaattgctttacaacaaaaaacgaatttttctttcttttcgcgaacctagctaggagcttgataaaaactgaatttttattatcttgaaattaaactccgtttttcattgataaaaataataaatttttttagaaaaaactatcctttctgataaagaaaaaattaaaataattcacaaatttgataaaatgaaaaactcatatggaaaagacattacacaaaaagatgcaaaacaaattgcacaacaattgggctattgcatcagaacaatttataattggaagaaaaaattttagaaaaaatggtaaattaaaaaaacgataaaatattaa

SEQ ID NO: 13494 - DNA, 1585 bp, Heterodera glycines
aaatttgggcgtacaagttgaacagttcggccgtgaacagggacgcttctgtgccatctgttccgctaaaaaagccaattttaaatttgaacaaaaaaaataattcaagtaagaaaaagttgtgactaaaaatgaaaaaaatcatagccatttaaactgttttttgaatattttgctgaaaattttcagttattttttaaaatttttaagaagaaattaagcaatttgtcattaaacatttaaaaataggttataaattttttaagccaggcccttctactgaatatgtccatttttgatcagatgtaaagaaaatgtcttcggttttgggggcccagaattggaccaaaaagcatttttagttttttttgacattttggtcacaataacaaaaattttttcataattttaaaaaaaaatttcaattttatggggaccagagttgtacaaaaatttttttttatcttttcacagttttgactataatttttggaaaatcccgatattaaaaagttattttgtgtttaacgttccaataattagtcatattttaaaagaaaaaaatttcttttttttttttgttttagaggctcataatccaactaagcatttttgaaaacacccaaagttgtatttttggtttgaaaacgcccacaaaatatacttttgcacaataaaaacccgaaaacgtaatacagaatttttaatacttcaaaaatataatagaaattttaaaaaaaatttttggtttccgaaaatgaggaaacctacaaagtgctgctggtcgacgcgtctttttgtgtgtgagctccaacctggaattgctggttgatggactacgtgttcacgtcaatgccgctcagccagcagccgtagccgggtgggactggtaccagccgaccacctgtgccctatttaagcaaattaattcaaaatttttaaaaaatagtttttttgctaataataaggttttgctggacccattatccaagatttagttgaacaacatcaaccggaatttttataaaaaaaaaattttgaaaaaatcgagctttttttgaaaatggtccaattttttagggaacctttagaattaaacaccaatcggaattttgaaaaaacttttttgtaaattttgacatttttggttaaaattgatggcttttgtgaaaaatcgagcttttttgttgctataaattaaagttttctggcctattacccaaaatttgttgaacaacatcaaccggaaatttaaaaaaaaactaaaaaatttgaaaaatcagcaaaactcaacaaaaagtttgcattaatttttttaattttcaatgtaaaaaaaatttagtagcaatgataaactcacaattagcgcaggtagtgcttcttgagaatgtcgacgattacgcagttgaacattgtgaggccctcgggaaattgcaaagcaacttaaaaaaaattaaaattttcaaaagaccaaatcaaattcccctatgtgtgtttattaaaattttggattgaaataacccaaaaatttttaaagtaccttcagaacccaaaacaacccgaaattcaaatataaaaatttttt

SEQ ID NO: 13495 - DNA, 1092 bp, Heterodera glycines
  unsure (1)..(1092): unsure at all n locations
tgtgtgtgagctcctaacctggaattgctggttgatggactgcgtgttcacgtcaatgccgctcagccacaaggcgtagcccggatggaggtggtaccagctgaacacctgtgccaaaaatttgaacattagacaaaaaatctaattttttttttcaaaaaataatttgtatttgtttgtaattttttccgggctttaaaatagagtaaaaagggtcaagggttagtgatattcaacccacaaaccatacggaatttgttagaaaatttgtgaaaaaactattacactttgttcagttaccaaaaaaccccgcaatcaacgaccttttaaaactccaattttttaaaaaagagattcagaagcttaacaattgcttaaaaaatttccattttccattcctctaaagaaacctttaaccggcagcgcaaaagcgtccagcacaatgattgtgttggcgtccacccggcagttcatcagacccataatttcgatgttcccgccgctgcgccgtgcatcaccattttgagcaggatcaaggccgaaatttagacttcctaaaatttgaacaaattgagcgtaaaatgacagaaatcgtaaattgaccccaaaaaattttaaaaaattggtaataattcctccgttggtaggcccctcttttaaaaattttttggaaaatgtgaaaaccacaattgtacacaaatgccttaaaaagtcactaaacattttgtagttttccaaaggcattgaatgtcggagtgccgccccataaaaatgaaaacccgcagtaaaaccttgaaatagtgcgggtcctgctcccattgcttaacattgcgtatcattcgctgctcccgctggtcatacttgaacatggagtcggtcattttgaaaatttgaaaaaatagtaaaaatctaaaatagaaagtgcagaaaacattgtattgatgacgtctgttacccccaccaccaattatcttttttgactgtattctagttttcgtgtacattcaattgtttacgcatctaataactgactattcttactttntatataacttttttcatacttgggtaatccanacattctttgtatca

SEQ ID NO: 13496 - DNA, 2317 bp, Heterodera glycines
caatgctagcaaatctaggtaattgagcctcttttataagcatatgttatatgtgtattaatgtttattgttagctttggctctgttttttggtgtcttaaaattgtaaaattcaaaaattacaaatttctcctcacacggaatggcgcggacggcgccgctgcaaagtgtgcacagccgactctccccccccccccccccggcgacatttggccccttcctccggcgcacggctaattatttacgcttgttaaaaataaacaaaaaaaaaattggctaaacgaggtgctgacctgtgcacattatttagacaatgaatgtgcattttggtcattgttttggcactacgattttttgacaaaaatgcttttaaaatattaatatgcttttaagtcacaaattgagccaagagtaacggcataaaaaagtgaaaattagttaaaaatttaatactgttaaatttatatttatatatcatcataaatttcatacagaatatctaaattttagaaagttttaggaaagttaataaatttttcagctaataaaattatttttttaaatttcttttcaattaattaaacacaaaaggcaccaaaaatgccaaagaaaaggcaatttatttttggaataataaaaattcattcccgtgttctggcattcattcattgtctgtgtttacattccaattaattaaatgttggcgcgcaaatgccattcatctgtcaaaataggccataattattcgaaagcaaatgccaacaaaagtcaaattgttcgacgtgggcacaaatgtttctttaggccatagattgtgctgtggtttttccacatttggccaaaagatcaccgttatgctattaatattgttctgtttctaaaaatgccatggcaaaagaaatgccaaatgtttgaatgcttttcacatggcaccgcaatcggttgcatataaatacgtcagacggagacagccaaacaaatcattctgactcaaaatttgaaaaacttttctttcctaaaaccaaaaatgtttgccccaaaatttttcttatttttctggtctgtgttgcttttgccattggtcatccaatgacatcttctgaggacggcgatgaagcagtgggagaaacgaaacatgggaaatcggcacgaaaaatggccaaaaaccatctgccaaaggacgagttcaaacaggtcataggaaggaaaatattgaagcaccagaaaatgggttaaagtttttgggctagaaaaatgaacacccaaaaaaatttacctgaaatagaatttaaaaatgaggctaaattactttttgttttactttttgaaaattaagcataaaattgacaaaacccatgggaaaggaaagggttaaaaaattaatagattttgaaatgcattaaaaataaatagatttatttccttttttttatatttttctaatttttcactcttcttttgattctcaattttctgattactctaattttaacgtacaccgttcaatggagttattacagtaaggttattttcgtttttaccctttatcttttaatggattaattttaatattgttctcatctttatctaatttattgtcatcttcttcaggctttttcgccattggtgcccatcgaacttgcgcagaagaagtttgagcgccgcattgatcagatggagaagcagctttcagaagtgatcgccaatgtgcgcgaggacaattgtggggggaagaaaagagaagaagaagacgaagaagaaaagtgaagaagaaaaggaagaaaagtgcagaagaaaatggaaaagaaaaaaggaacaaaaaacggatcaaaaatgcgcaatttcttaacatcaattcactgcctatttaatgtatttgctgaagcatctttttaatgatttcataaatagctttggaaaaattagcaaatgtgcaaaaacctaatcaaagcaagcaaaaaatgaagccaaaaaaagaagtaacaaatgttggcatacggcaaagggtgtcatggcaactcgtacaattgcttaggtatgcctaaactttaggcctgcttgggcctaggctttgttttgtaaaatatgagtcgccttttgtacaagttgcaaatgacccaccgcaaattgccttatttcatgaaattgcttgagcttaaagcatgttgaaaccgttctggtaaaatccgccagttgtctttttattatcattgcatgaatagaaaatacaaaataaagcaaattaagtgatttattatattaaacaaaaatataatttgtcttaaatttgacagtttcttcaatatatcaatgaatc

SEQ ID NO: 13497 - DNA, 2327 bp, Heterodera glycines
aaaattttcaacccttagactaggccttaaatccaaatttttctcgagtccagactcgaattcgacaatgttgatcgaacaccacctgtagttgcgacaggactcgtaatcattctcaaatttccaaaattaagctctaaaaattttaaaacttttctttgtatcaaaaaaaaactcagaactaatgtaatttaaattttaaaatttgccagcggcgcttgtcatcaccgctgggcccaaaattttattatctttttattgatataaaaactctgtgtttttggataaagtccgtaaacacatttatacaaaagttcgaattttccccggcggcgccttcggcaccgtcggaacccccttaattgctaatagtttttccagtaaatattccttttaattaaatatttaccaagtttttccgcaaagtcctgcattgggatgagcggaattcgaactttaaagaatgctgggccgagcattttgcgacgattttccaccgaacattctttgcccttttggcgaagttgttcatcggaccaacgaagtacctaattatcaaaacaatcaaaatttaatttttaaaacatttaaatgctttggaaaggaaatattttctttgtttattaagctacaaaagatctagagaattaaaaagattaaattaattgttaataaaaccaataacacaaattatttcttttctttgtttttaaattagaatttcaaaaatttgtgcccaattaatttaccgcattccaaatgacaatttcaccgctgatgatcagctgatcacggtccaaaatttcacacaacaatttatgctccatttgcaaaaattctttggagaaaagcacagcgcccacattccggtcaatgtattcccaacaacgccgtgaaaggtcctaaaattaaaataaatataaatttaaaagcaaaattaaaattttattttttattatttctcttgtcctaacctcctcctcataaaagcgagcttgtgctagcacaaggaacacattggtcgggtccaattttgggtagttaacacacgccttcacgagcccaacaacgccatattttttagctgaattatattttttattttagaattaatagtcatattttaaaatttatacatatttgaacagtgagtgtacaaatcgtttctaaaatcacttttgtgtagaacatattcagttcgaaaaaaaataaaattgcttttttgatcatagcctttttaattaacattgaatagatgaataatacatataaaaatgcttaattttagtgttttcgagaaaagttatacattttttgaatcggacaccaaaacaaaaatgattcataaaaaataataaattaacaaataccataatacttatataatgtttatagaaaattgataatttcccaacccgcataaagaacggcgaaaaggttgtccccattcagctcccgtaaatcttcggcataaatgaagttcaacatcagtttgaaagctccaacttccacatccggcacttcgacaggctttatctcactctgcgggtcttcaaatttgattaagtttaaataaaataaatttttcaattcaccctttcctgaagccttcaagttttccgtgtcaaatcgaaacattgcctcgaacacattggaggccgtcttcaaaatcagtttatgcgcaggaagaagctttaattttggggcaaagggaatcaaatcataggaagtaaaatttttatatttttattataaataatataattttatttatttccaatgattttccaataattcgttttcagtgccaaattaatcgtaatctctgatgcctaatttataactcttctttttggcattttcctcacctcttttttgtcatcgctgccaaccaaaaagtgcacatccgcgtcattgcccgtgttcagcaaatgcttcatccgctccgtcaaactgatgtccgatggaggcgccgttaccgtatgcgttgttgacgaccctttcacacaggtactgttaccgttgttgttgttattattagtattaatagtgttattagcgctgcttgttgctgatgttgtcccggacattagtagaacagtgccagaggttgttgctcctccttttttggtagaatttcacacataaacagaaaaatggttacactaccaaaaatcgtataccatggttttgagccgataaggtacaaatggcatgggtgaagggttgaaattcaaaggtcaaagatttgattttggatggaaacataaataaacaagtgtatgcttgctttaagttcgtccttaaagtatggacaaatgattatc

SEQ ID NO: 13498 - DNA, 2775 bp, Heterodera glycines
tatttaaattccaatttttaaattccaatttaaatttcattataggcggcggatgggatgagcgcattttgggcggtcgtgaataataatgcatggagagaatgagtgaagaagaagaagaagaagaattcgggatggatgccaaaaaagtaaacattcattttcaattcaaactattgaacataaacaaaacaatgaatttctttcctggtcattttccaattaaataaattgaaatatttaccacacagaattaaattaaattctttaagagagtttaaaaaatattggagtgaaaattaaacgaatctcttcaaagtcattaaatttacattatttaaagaaaaaatcataagcatttatttttcattttttgtgccttgagaatttatttgctcagaatcccgagatgccattgtaccatccataatagtacccagatgggctccttaataaacaaaattcatcgttgataaattgctcagatgcaataaaaacttacttattcggtcgatacggcgcataagtgtaagagccatagaatgagcatggcttatacccactcaacgaaaaagggtaactgagaaaaaaataaatataaaaaaatacaaataaaaatgtgtaaaaatgacttgaaatgatgctcgggccaatttgaggagtgtttgtcgtagggagaagcataagtctaaaaatgataagacaatcattgtggggttggttctaaatgataaagcatagtttaataataagcaaggatgcatggaatggatggattgttttgtccaagaaattacggtaagtaattaaactaattacctacctaatgcacataccgattaatttaacgagaattaattgatgcgagaataaatattgttaaaaaaaaagtaaatatgaaaaatgttttaccacttgattcttatatcgcaacaacttactcgacaccgattgtattggtaggacggatatcggttacggtaaaagggatagtaatagaagtagcagaatttcggcgacccgctaacatcgtccattgacgtaatacggtagttgcgctcgggcaacggtggagaatggtgcaacgccgacacggacaaagagcggaaaagcggcataattagctaaaaaggcaacaaatccaatttacggcattttgaagaatttttttatcaaattaaaatagggcaattaattcaaagaaaaatttaaaaaaaatcgaatggaatttcttgaagacaaaagaaagaacagcaaattgagttaaagcaatgggaaagtgttggaagggatgggaacagatcaatcgcaatggaacaaacatttgttatccaaacagcggacggatttccgatcgaatggctcagctaaaacatctgccgacgaaaatgtgtgggaggagggcgaatgacagagaaaatgtttaaagctgaatcgatcggttcattaaacaattaaattttgaattaattgaaaagaaaaatattaaggttggtattgtatagaaaaggtgccctcaaaataaaataaagcacaaaaagtaattgataaaaagaaattggaaaataaattcatccatttcttcagaccgtaacttccactgaagctgaattccgtccgcattgtgaaacagaaaaagtcggaagcatttgcattttgaaagggactaaattattcacaataaaatataaatttttaaatattatttattttctctcacaatttccaactttttttttgattaatttaattattctggtttttaacatttctatttgtgaacaattgaaaaaacgcatgactaactcggattggcataacacttgaattggcatttctttcttatttatgaaagaatgaaaaaattgtgcatatgacaccaaagaaattataaatgtcaaaaaatatggccatataaattgcgattaatgcttttgggttttcaaaataaattttcaaaaataattttccgcttttaataatttcaaataattttccgcttttaataatttcaaataattttccgcttttaataatttcaaataattttccgcttttaataatttcaaataattttccgctttttccaaatgttccatttgcgtttcgttgtgcttcttctgctggtaattgtcggccttttcattggccccaattttgtttctgctgattgggataaaaaggtggccggttgggacgacaagaaagtgaacaaaggctgggaggaagccgaagcaccgctcaacatccgtgcccgtcgtcagttttttaatttatttaaattccaatttttaaattccaatttaaatttcattacaggcggcggatgggatgagcgcattttgggcattcgtgaacaatgaatggagagaatgagtgaagaagaagaagaagaagaagaattcgggatggatgccaaaaaagtaaacattcattttcaatttaattccccctttccgcccccatttgagcccctttttccaaatttcaattatcaaatgcataaacctgttctttctctcccaataaatgatccgattttgcctattgccaatttcctttttttatcacaactttcatcgttcgttcgcttcactccgtcgccccaaatttggtgaaaatttgtccgtccgtccctttccatccgtcgaccaatcccagcgaacacagcgcaattccatccccaattctctctccgctcaattcgattgcaatatattaaattttatttataatgatgagtaaacattggccatcaatcggtgagaaaattgg

SEQ ID NO: 13499 - DNA, 801 bp, Heterodera glycines
ggaggtagcgggggtcgaattggacaccaaaaaaagcattaaaatataaattaaaaaggcaatcttattttaattaaaatttatcattctttcagttggtacaacccgaacaatccattccgccgtgacccccaactccgtctgttcaccatcccggcactcgtttgtctgttccgtgccggtgccaatggcagttggatgaacacagcgaaagacttgtgccaaatttacgagtcagaggaccactttgccagtgtggcaacgttggagcgcattctgacaaactttttagacattgcagctgaacgccaaggaatgagtgtcagtgagggacgataaaaagcgatggaatgccaagaaattgcaaatattttcaaaataaaataagcattttacacaataatggtaaaaccgcatagggcaaagatcggttagagagcgacggagccaatggtaaagataaagccaaaaacaaaaatgaattctttggcattgagttgagcactattaaaattataagggcgttcctgataagttccgtttgtccgggcttataaactaaaattgaaatattttttatatgcaattgctatacaattttccaaattcgttttttccatcgttggcatttttagcttaaaaaaattattgctcaaaaatgaattctttggcaaattgaactctgctgcttccctgctgctggtattcattaaatttacctgctgactttaagccaaaagcattttcatagaaataaaatatagatttctctcaatttaaaaaataaagcgtatattttat

SEQ ID NO: 13500 - DNA, 2024 bp, Heterodera glycines
tcgttgcaacaatattcagggagtttttccttaaggttaaaaggttggttgtaattattattgtaccatttgtcaaatttctgttgatcggggattttcatttgatcaggacagtattgttcacgtggaggaagatgggagagaatgttgtcatagtttgatgatttgttgaacatgtgtggaaaatgttgtttatcttttatatgaagcccaaatgatttgatgaggccagataatttaatgggcataaggttgtagctgtcgtgaagaattgtaagcggtccatgttcattttgattaattttgagttcgtagagtcggttcccttgtttgatgatgtccggattgtgaattccttgcgccaaaacctccttgatgatcatcgtcatgtcgtagcgccccccaaagtgtgcaaacgcgactgttggaaactttttgttgtggtcaaaaaggagccattcaacgaattcgcgtagcggttgttgagtgatgattttttggtcgactgttgtctccgtgtagtcaaagggtgaaaaggtgattgagcggtgaagaccgcaaatttggcacttttttccctgaagtgatttgttccagtcgccgttgataatgcaatcggtacaaatgatggtagccgctgcaaagtttacctcgtgttcgaatttattacctacttttttatcctgtgtcgcttcaaaatcataagcgatgatcctgtatggtttaagtttatggggttttaggggttggatgaagcagctactgcacggattatcctcatcatcctcttttacatggaattgcttgcaaagtcgacaaaacttttccccgcattggtgacctacatttccgtgatactttacattataaattaccccacagtcctcgcatcgctgaaatttggtgcatagatccttgtgtaggtgacgttcatagcagaccttgttgtagaaattgttgttgcagtgctcacattttttgaagtatccctgttgtggctcgcatgggtagtcgacgccaacctcccgacatccatggcagagtgaagagcaattcattgaatgttgagatttgcgctcgtagacgctttcacaagagaggcaatagtaacgtttattgaagaatttggacagggttttgatgccgtcaaagtggttgttgttgtggtagagaagaatggggaattggtagtcggtgacatcagatttggtgattggtcgtatctggtaatcgttaaatatgaaaattttgtactcaccgggatatttgacgttccataacccttgcacttgatggatgtatatttctgcatcgtattccggttcagttgtcggaatcccggcatcgcggagtaaaagtagtactttttgacgaagaacagttgtttgattatctttgagccatctaaattgtttccttgaaattactcccctgatatataatgagtagtagcgcatcagttccagtgcataaaaaaggcaatagttgtcgttgttgttaattttgaaaatgtgtgattgggaagagtgaattggaggggcacttcctttggttgttcgtcgtcgtggtaggccttcagtgtttagaacagttacggtgacaacaaaaggggccccatataagttgacgtgtttggacttgctctgctccactttacaaaactggttaaaaatggtgtccacgacatttgatgtaattggagttataggcatgatgatgtctccctggtctaaaagttccgaagaaattatgacacctaccttatttgctcctccaagtgtgttctgtgcgtcttgaatagcctcctcgaccaccttgtgcacgcatgaacgtaattcagcctgtggatctgcacatttttcaatttgatcaataacaaatttagatttggaacggataaaatgatgtttaagacttttggaagaaattggtcaattttacgaatgcatttaattgtttgagattttttgggggagggagatgaacattgtgatttgggggcacgcttcatatttatatttttt

SEQ ID NO: 13501 - DNA, 2108 bp, Heterodera glycines
  unsure (1)..(2108): unsure at all n locations
aaatgatgtttagactttggaagtaaatggtcattttacgaatgcattatgggtttgagattttgnnggggagggagatgaagattgggcttgggaggcacgcttcatatttatagtttttatgatttgattgggtaaaatatgtatatatgaataaaggaaaatttttttttaattttatgaagtaaagtttttataaaaattttatgatttaaattaagtttatttgagtttttttatattttttaaattgagggatttatattaaaattaagtggtgaaattggtttaaatagtgagcaaagaggaaaagcaaaagcaaaaaagggtaagtaggtaaaagatgtaaggatacgtagaaaattaaagtatttttgtaattaattatttaattgtaatattatttaaattatattgttataggtttattggaagattatggaattatattttttatttggtgaattcggtttaaatagtgaagaaagagggaatgcaaaaatttaaagggatggtaggaaacaaaaggttatggttaaattggtttaaatagtgcacagagagcgaggaagcaaaagggaaagagcgcgttagtcgtttgcagaaaaatttcaaaatttccaaatgaatggaaaaaatgcacttttgctggaaatgacaggctatttatactccaccgagtaggcggggcatatttttcggctgggttaaatttggcaccttgccaaaagaggcagctgtctcaagcacagaatatctgatgttgggttttgcataggcacaactgtcacaattaatcattgactcacagcttgacctctatttccagtggtatattaccgacacttccgtgggcattatacagtcaaaatgcatccaagggattattaatgaccattccattggctttggctcggtcagaaatgcaccaaaagaattcccaagggataattaatgaccactagcttcggttggacagacatgttcacaaaagaatggttaatggcgctcagttggcttttggtacaacagactccacatttcctaaggggatatttatgacactttcggaggcattagttagaaatgcactcaaaggaatgattaatgaccctccgtaggcttaggcttcggcaaaaatgcactcaaaagaattattaaagaccctccgtagactttgggtactcaataggctttgggtctcagaactgaaatatcccgtgggcactgggagtgaaatggctaaacttaaaaaataactctggggctcaaatggcggcactgtaaaaataactctggggctcaaatggctgcgcagtaaaaataaatctggggctcaaatggctgcgcagtaaaaataaatctggggctcaaatggttgcactgtaaaaataaatctggggctcaaatggcatacgcgagcgtttaaatggcacacacgcgggcgctcaggtggcatgcgtcccttccctataaggcatgacagctgacgcctatcctctgcctccctttccttctctaataggatttgacctcgggttttatccttcagatgttttttcaattatttacctcttctgggattggatatatttattataggtgttttttaaaggtttaaatttggtactgaaatgtccctttccagtgggactgaaatggcggggctgaaaattaagggccaaaatctggtggggtaactactccggtaccaaaaaaaccggtaattaccggccagtaccggtactggtaccgagcaactctaatacgaattatagaattgaaaaagatgtaaatgaaatgcagttgttttttatgtaaattgatgcaaagtgtgtgttgaacgaggcagggcggtgggatgggtgggtggaacgaccttttcttcacccgagcgaccagccaacgccaacgaaccaccactgattcatctcatagtagtatttgttgtccaccaatagaaccaaaaacattttgtccttttcctcggaattaaatggcttcttcatctttttccaaaaatcaaaaaaaaacaattttttgataaaaatctgctaaaaatttgcaaattttgtaaattttggacanaaataaaatgaacatcaaag

SEQ ID NO: 13502 - DNA, 1574 bp, Heterodera glycines
cccccccccccccccccccaatacccagagaatacattttaagattttttatgataaatttttgtaagtgctgccccccccacacctctttggtttttaaatgattttcaaaaaatgccaataaaacttgggcattttggccacccatccagcaaaaattcaaaattttttaccaacataaacatttaagattttctaaaaaaaaataattgattcagctagaatataaataatgcttatttgaagatcgacatttaaaaattcgatctaacctaatagagtatactaattagggctgtgaaatgcgggaatggggcttcttagtcctaaacatttttttaacttattacggttataccgtatatacatttttttaccgtactcaggcacaaatgcaacaccaccaccaccaccatcatcatggcacggcaccatccgcattcacgccactccaacaacacaagcaacagtcgccagcggcaacaattgtgccacaaggtgagagaatatgcttaacgaattatcgaggctgatcattgatcagaaatttggcatttttccgtggtaatcaataacctccccgagtactcatttttctggttcccaatttcctaaaaaaaaattttcaatgcccaattttctgtgttgtatattcacatacccttttcttctattctaggtaccagaattttggcgtttaattatccgtaattcctcactttccagtgccaaatttgaagaaaatttggcactcagttttccccgtactcaattctctgggtgccaatcagttgtcaaagaatctttggttatccggcacattcaatttgtggcacccacccaatttccggcactatctctctctgctgggaactgtccggcccggctgcgaaaacttcatttctttgcacgtggcgtttggccaatatttttttatttgttggccataagtatgtccatgagcttcttttcaggattagctttttgcgttatgttgccttaagcagccccccatttgcttactcagccacataatccgcttctttgcgctgcttggccgacgatttctcgtcattttaatgccactttttctccttggcacaaaaatctttttttggaattttgataattggaataaattgcgcaaaatttggcaacatttttaatcatggctttatgaaggacgccctttttggtaaccaaggacaaagcagaaaacatatacgcgttttaaggacatccatgtgccacccattcaacgatgcttctttgccccagtttttggggtggtttttaaaaattgtacgagtttttcgaaccatcattttttcaaggacgctcttgtagataagtaaggtcaggcccgtccccctccccgacattttcttatcatttggcattaaaatttccaaaaactttccccgacagcgcctatcggcaccgccggaccccattgggccattatttcttcaaaatttgaccccaaaacggcaaaaattgtcatttttggcgcaaaatcgcaagaaattcctgctttttcgcccgtgcgctaaaaatttagaaaaataacactg

SEQ ID NO: 13503 - DNA, 1241 bp, Heterodera glycines
tcagttcggccctcacggttcggccccaactgtttttccaatataactttctatatactttttttttgccatccaaatgcaaatgttggtatcattcgaacgcttaacatgtttagaagctttttctaagctattgcttcgctttagacaattaccaaaaaagttatacatgaaaattgcgaaaagtcaaaattttgaagttttttccaaataaaattttttccagtcttgaaaatcttttcgctttttgtaaggctaatagagcatctgaagagcttttgaatgataccaacaatgttggatttggatgataaaggaaaaaagttatagtggaaaagcatgttggggccgaaccgtggcgccgaaccgtgggggccgaactgagcgagtccgctactcattaagtctcggtactcgttttattcaatttgaaaactggctttttcagtcttgagcaaggggccaaatttttaattctggatcttcattcttgaaatccgggattaacgatctcgaaagcctttcactataggttttcacgttcccaaacttaggcacatttaaatcctagtcctattttctgtatatttcattatgatttagtttctttgaatcccgagcaattgaatctaaggcttctaaatttcatgatttagttttcaattcaaatggctctgaattttctcaaattatccgaaattctccccacccttgctcttaattttctcaaatttttcggtattccaaatccaaaatatttgaattttcagtccctaacttcgacaatccgtctatgattttggctttttatgtcatttcaatatttttgagtccccattcccgaccaattctctaaactaatttttggccttcacctgtcttttcgcggtttttgagtcgccattctctcctccctcggctctctcgataatgtctcaattcttgaaaccacaaatttttttttcgccaggcatcataaaatggcaccacaaaaatgggagcagctggttaatttatggtgtgccgtgccaactgtgccgccggtgttgccatggtgtatatagtgtatcatatttttgttgtttttgatttcgtctcatttatttatcagccaccattttgtttgtttctcattagtgattttgctcattaaaccaaaaaaggcatatggaattgtgcccgttttatactccgatggaattattgtgccatgcccctttcatgttccgcttttcctttta

SEQ ID NO: 13504 - DNA, 1776 bp, Heterodera glycines
cccccgccccctccatccattgggcgatggatcacaaaaattggtctctaaaccacatgtattcgagagatgggagcagtggcttttgaggccttcgtgacggtggctttttaataattattttggcatttttaaataaatgccaaaggattcataaaaatagtaattttctctaaaattgtgccgttttatattccgatggctatgtgccatgccctttcatgttctgcttttccttttattaattgggctttatcccgcgcctccccccggatgaatcacaaaaattggcctctaaaccacacatgtatcgagagatggcagctttggcttttgaggccttcgtgacggaggctttttaataattattttggcatttttaaaataaatgccaaaagcaaacgaaaattttttttttcattttctcgtttttatgtaattttgagttttataaagtatttacattatatttttaggaattttttgggaaaatttttatttttttgcgaaaatctttaacaaaatgaaaacccctacctatatctgcttcgaaaaattcaaaataaataggtaaataaatattacaggcggtgcaatcagtaaaaggagccttgaaaattttgaaaatttctgagacaaattttaaaaaatcaatgaaaaaattgagggttgcggagagtacctcgtgtaccccctcccctcagggaaattggcactggaaattttgacactttagaaaaattatcatagaaatgcaattaggtaattgcattaacgaattcgcaaatttattttacccgtaaataaattgttgtcataattatggtgcccaatattctggaggtgtccgtttttctgcaacttttccaatttctagtgccaacattcgctctccccctttggatatgatatatcttcattggatatgatatatccctggaaattttacaaaaaaaaaaaatatggaaaattctcaaaaaattgacaaattggaataatacagtaactgttacaataggatttaaaacttttttggcattatttatgccgtgccattttggttttgatcattatggctcataattttcgcacataaacctgccaaaattaaaaatgtgcattcataaaacattttccgtaccattcgcgcgtaaaaagtcagtgccgccacttttctcacggcactttttttttgacacattaccttcaacataattattttattaatttacaaaattcacacgccgcccagttctttgtgatgccatgggcccattcatttgccaaaattaaccaaccaatcacaaccaattttctcattagatgacgtccgcaattagagaattggcattgacatttcctacctaatgaccgtatcacttccattttggcactattaccatcattatcatcgtcattgtcaacagcatcattccatctcttcgagagtcccgttctcgacgcgagaaaagtctcaattttcttgggttcgatttcacgcgggatttcttacacgattcccgcactgaacagaatcccgtcccgtatattttttatgtttacctaaccctatgaattattcccaatttgttgtacgtcgaccgtagtcttgaaacactgaatctcgtggcaaggtcttaatgtaaacctgcgctaagtattcacctatatcccggggcatatggcttcgttttgaatctctggacccttttaaataaaatttcggggcatttgaaggtcttgaatccttgggcttggctcggtcttgaatttcgg

SEQ ID NO: 13505 - DNA, 1053 bp, Heterodera glycines
catgctaaagaaatgccaaaaataataatgaaaataaaattttcacattctaaaataaatctctcaagagcctttttagaggcaaagcagtctaaattttcaatgagttcaattatacgacaaaaaattataaaaaatttttgaatggctgtcaaacattttaaaagacagcctgagtgatttctacttaatataattgtcagcactaataaatctaccaattcatgctaaagaaatgccaaaataataatgaaaataaaattttcacattctaaaataaatctctcaagagcctttttagaggcaaagcagtctaaattttcaatgagttcaattatagaacaacaaattataaaaaatttttgaatggctgtcaaaaattttaaaagacagcctgagtgatttctacttaacataattgtcagcactaataaatctaccaattcatgctaaagaaatgccaaaataataatgaaaataaaattttcacattctaaaataaatctctcaagagcctttttagaggcaaagcagtctttattttcaatgagttcaattataggacaaaaaattataaaaaatttttgaatggctgtcaaacattttaaaagacagcctgagtgatttctacttaatataattgtcagcactaataaatctaccaattcatgctaaagaaatgccaaaataataatgaaaataaaattttcacattctaaaataaatctctcaagagcctttttagaggcaaagcagtctaaattttcaatgagttcaattatagaacaacaaattataaaaaatttttgaatggctgtcaaaaattttaaaagacagcctgagtgatttctacttaatataattgtcagcactaataaatctaccaattcatgctaaagaaatgccaaaataataatgaaaataaaattttcacattctaaaataaatctctcaagagcctttttagaggcaaagcagtctaaattttcaatgagttcaattatagaacaaaaaattataaaaaattttgaatggctgtcaaaaattttaaaa

SEQ ID NO: 13506 - DNA, 1728 bp, Heterodera glycines
  unsure (1)..(1728): unsure at all n locations
attttctgccgggtccaattttttcggcgcgtttttccaaaaaaaaatagttggggaaaaatggaaagggatctggcggtgccttttgaaaatttcgtaatgatttgttaatagattttcacaaaaaaggcagatttttgcgcttttgagccattggcgacgacacatttagtttttttgcgacgcgcttttttccacaaacttcttgggaacaggggggagggatccgggggtaccgatcagggctgggcgaaacttcgggttttttgggcttcgagcttcggacttcgccttcgaataaaaattgtgcttcgccttcggcttcggctttgagtgtaacaaaaagggaaggtccccaggtgtccgtgggatttccgaatgaaatttggtgggtggatagagcacccacaggttcttaagaaaagtgattttattttttgcggaatgaactcgagtgccgagttatgacgtgccaaagtttttggttttttctaattaaagaaaagaaataattacttcactacgcaacaagcatctattggtgtagaggtagtgcgttagtcaaatttattttgtgtctcaggttcgaatcctctgcatgctaatacattttacaatttttatttttgcttttctggtgcagtctattattaaaaatattttttatgaaatagttattttaattttatttcattaacacccaaaaaatatcattaaagataaagacgcaataatttaatttaaaagatacacacctttctgttaaagatataattttatctaatatttttattgaatatcttatatgttaaaatggtaaaaaaaattagttcataaaaaaacatatttgattatttacttttgcataaaaaggcaaaaataaaattaaaaaatgagtttgcatgtcagggatccgaacctgtgggcttaaaaaacgaggactagctcactaccgctgcgccattagagacctgatgagggcgcaaataaattttaatttatttattcactaaaaaacttcggcacgtcataactcggcactcgggttcattccgcaaaaaataaaatcacttttcttaagaacctgtgggtgctctatccacccaccaaatttcattcggaaatcccacggacacctggggaccttcctttgtgagtgatttctacttaacataattgtcagcactaataaatctaccaattcatgctaaagaaatgccaaaataataatgaaaataaaattttcacattctaaaataaatctctcaagagcctttttagaggcaaagcagtctaaattttcaatgagttcaattataggacaaaaaattataaaaaatttttgaatggctgtcaaacattttaaaagacagcctgagtgatttctacttaatataattgtcagcactaataaatctaccaattcatgctaaagaaatgccaaaataataatgaaaataaaattctcacattctaaaataaatctctcaagagcctttttagaggcaaagcagtcgaaattttcaatgagttcaattataggacaaaaaattataaaaaatttttgaatggctgtcaaacattttaaaagacagcctgagtgatttctacttaatataattgtcagcactaataaatctaccaattcatgctaaagaaatgccaaaataataatgaaaataaaaatggcacattctaaaataaatctctcanagagcctttttagag

SEQ ID NO: 13507 - DNA, 3673 bp, Heterodera glycines
cagaataaatccatgtctcgagaagattcaaaaatgaattcgctccagatatgatggggcagaaatccaagtcaatcatatcaataatcatctaatcacttgaactcgggatattttgaaaaaagcctgaacttgtgatctggattttgccgacaaaaatccagacccaagaaaaatcgaggttgcccaaaaatagcctgggcctctagatccagggaaatccaagcctttcaaaaaatccctattaataagcccatagattgggattttatttttcagtcccaatctgatcacttaatgcttttgcccacttctgtgtttcgacgcttctgatcttcgcctctcttccgcgcgagttaccaatggaagcaaaaaaggcagctgatcgacttcctttttttgggaagaaatataattgtagaaaaaaatagtagccattttaaatgggatacaccccaaaacgtcgccgccgaaacgtcgccaggacatacgtcgccgcaaaaataaataaaaattttctagatttcaagaaaacttaaaagtattttagttttttgaaaatctaagtgttaataaaaactaaatttgctgaattttcggaaaaaaaccaaaaaacttgaaaatttttttttaatttccttgaattttcttgatagaaattttttttttgaatttttctagaatttttttcgtattaagctagttaactaaatttatcacaatttttctagatttttttttataaaattaaaaaaattttgcggcgacgttatgtcccggcgacgtttcggcggcgacgttttgtcctgctccctttcgtctttaaagagggtcaagagcgggaattgatctagcgaaattcaaaaaaaaaaaacccaagacccaaaaaaccgagaaattcacgagtccgggaaccgactcgagacactcgcatagccttgtagaaagaccaaaaatttcaaaactttaagttttctttaaaaaaatccggcattttcattttttcccccaaattttgtcaacacctccggcttttcctcctgctgatcagccaaatcgaacattgacacattgaaaatttggtatagcagatcaaaattatccatctgctgctgttgttgttgttgcggcggtgccgtcgtttttgttgtgccaaaattggcgattgaatccgaaagtgaggacgacgcatttgccgttgccgccatctgctgaaattcggtggtgtggttagtgattttgttatatccgaaaatttgcttcgcatatgctaaaaaccctataaaatccaggcccgaaagtcgagtaaatccaaaatttcatgaaaaatccattcctagggaagtccgatcggaatttcaaatttaactcctcgagaaagtcctgatcaatcaatattcgactgttttacagtgccattttccttaccatgctacgcccttttgccgttgtcggcttaaattggctttttgccaataatgacggcatgctaactgtctttggcactgttgttgtcgttgtttctgtgccaaatcggctaccatgccgaatgtcgagagtctccagcttgttgatgctgatatcgtcattgtcactgttgttgttgtcgttgaacatgctcagtgtggccaacaacggattggcacgcatcatttgtgccaacgttgttggcgaaggaggagaagcggctatcaccggtgccaatacttgttgatgatggtgatgcagtgccgatttgcccacaaagagacgtgccctgggaggacgattggctgaaagcaaaaggggatggacaattagcggataattaatgagggcagcgggtaattaagaagatcaaaggaatgtgccgacaatctagtttggtcctgggtttgatagttttggttttttgtgtttgatcgataggcacaatgtcatttttgttttgtgtccttgaaaagtgtcggcaaattcaaaaaaaaagaaaagaaaaaaacgaaaaatccccgaatatttgacattttggcttcatttgagcggaaaaacaatcagagaccgaaaaaatttgccgatttctgccccgatcaaatcgctgtccttattatgtccttgaaaatttgtcggtagattcaaaataaaaataaaaactcactgaaaatggttaaatcggccgccgtttccaagtcggattgggccaacacggggccataatgattgtgataattgttcgatgtcatcaagatgagcagggacatgatcagcagcaaagtgaattcactgggcacaaaaatgggcggcatttggcacaaaaagggtgggacaaaaaaagtgccgtcgtcgtcggtcaattcatcggcgaaatgagacgatagtgataaagcgcaggcagcagcatatgccgagtgatgatcagcttttgaaatggcacagattgcgattagaaatttctcaatttagtgttcgatcagtgatcagagagtggattgattaatgatgcgccagccatatgaatcgatatttgatcaatgaattcaaaaaagcaaaattgatcgtctctgattaaactagggatggcgctgctgacctcgaattttaagaaattggaacccaaaagacggttgcaaaaaagtttttaaaataagtcgcaccctccgccaaaaaatcataaattttaattaaagaacaaaaaatttttcgataagtcggaatttagcttctcctcccatgccccccccgcgaaagcaatgatctcccttcttcattctgctgatggcaaacaaataaaaatggatgaatcataaaaatgccattccctcaaaagcgtcgatcaaaaagcgaaaaccaatggaatgaaaaatgaatgaatgcaaatgaatgacaaatgagaaatgttagcgcgaaatgacacccaaaaaaaagtggcataaaaaattggttgtggcacctcggcttaaaattggggggaggggggggggggatttgttggttttaatgggaaagggaagaagcggctctttcactgtgacggcggcggtggcggcgatgaaatgaaatttcttccaatttgccccctcctccgtcccgccacgtccttcttcctcccgcccccacccaattcctcaatttaaccccgcgctcttccctcatcagggaaatgtcgcgccgcgagatgggatgagaagggatgcaaattgggggagggggatttgagaggaatcactcgtcgtggtcaacgaggggagaaaggtgatcggagttgactttcccgccgcaggcagacaaatggagggatgggaagaacctctcttcctgactgggtatagctaaggatgatgaagtttagatttagtggtgggcaggaggtagggagaaaattgaaatgacggaagagggaggagggggagtaactgactgactttctcttacctctctccctcattctctctatctctctttcccctctctctctctctcgcactctctactgctctctctgcttttttacctctctcaggcggttggaaaatcctatgagatttttctctcagtgtagggatgccttcacagataggtgcaatgagttaaggtaggagcaataagctcaacacagggatgagcatgaacacaaagcataattattttgagactcggcaaaggtagggaagtgaaaggaacatgaaagtgggggtcg

SEQ ID NO: 13508 - DNA, 1411 bp, Heterodera glycines
ttttctaattgttcgccatccaaccacttttttaaggcgcaaaatcagcggttccaagacattgatcatgctccatttgccatttgaccaacactccaagcttcatgtacggccaaatgtgtcgtgccgtgaagcaatctccacaatactcaaggttggcacaaattattttatttttattttttggcccagtcggacatttttttcccattttatggtcataaaatgctgaaaatggtatacaattaacacttttgctttgaagcaattttgacaaaaaagtttttgaccaaataaaggggcctaaaagttaattaatgccacctttcgaagaatgctgccaaattctgttatgatcaacaaagaacaaattacgtggtagggcattcgcttaaaaaatgacaaatttttgccacttttcgggacaatttttcaaaacatcttggtaaaatggggtcggaaaattctttgaaattttaatgcaatatgaaaagaaaattgtgcgaaattttctaaaagtgcttcaaatatcttcgtaatgttgtgtgcccatagcatatgcaatttgtctcgaatttgccatttttcccacccaaaaaaaaaaaaaatttttttttcaactttcagaaacgtaacattgtgccggagatgtgcacagtgtgcgtgtccgaggacccgcaaagtgaacagattgacctgtccgttgagttggaggtgctcgcccgccaattggtgcgtaaagaattgtgggtgcacagcgaggtcagtaatgggtgaacgggatggacatggacattctcccctctcgccacatgagaaaattttgaaaagttttaccaaaaactaataatttttcattaatgagaacctaggaaattaaaaaaaaaatttttttttttggaaaaaaatgaaaacctgaaaaaagtaattaatttacacttaataatctctaaagatttttcttcgtttccatgattttttgggcttaccagtggatagaaaattcttgaaaaaattaacgatttcaaacaatcggaattgggggtagaaaaaaaaattttccaggtccgttgatcatgaaaaaaatttttccaagatggggtgatatccaattttgagcatttttgggttcatttttgaagcatttaattgaaaatttagtcgtcccgacgcattcgacacatttttccatgtttttcccccagtgtatggagctgttcaagagcattcaccacgaatttgtgccaaaaacatttctgtccgtcacttattgcggcgtgtgccggcgaatgatcattttccagggctaccgttgtgagaagtgccaggtttgtacaacaacacacagacagagttttggcatttttgttgaatttgccaatttcgatgttccttttaacaataaaaaagc

SEQ ID NO: 13509 - DNA, 1703 bp, Heterodera glycines
ccccccccccccccccattatttttttgcttcaaatttttcatgaaattttgaatttttccaccccctacctatccctccatttttttttttgcagttcaatttccacaaaaagtgctggggccaagtgccgacgttgtgcgaaccggagcggatcaccagcgaaatggaggaacagttgcgcagcgtttgcgaaaaatacgacggaccgcacgaggaaattgcgaaaatactcagcaatttgttgcccacaacatcggcgacaacaaacagcaacaacaataaccacagtgccaatgccaataataatagtaattttacttattttcttggaccaaattcattaaaaattccaaaaaaaaaaaaaaaaaattcaccaagcagcgaattttattttttgaggcggaatttttggggaaaaattgcaaaaattgacaaaaataatggaaaaaatgcattttatttttatgaagttaggtattaggcatatgcaaatgttgtaaacaggtttcattgaatttattaaaaaaaactaacaataggaggtgagtctccaggttcttccgaaggagggtggaaaattttaagcatttttatgagaatttttcaaaaaaaaaaaaaaaaatttttagctccaacaacattgacaccgcgttcttccgagcggacaacaatggacagcaacgccgacattcattacacacaacagcaacaccaccacaaccatgtgcagcaacagcagcagcaccattttgggtatgatggggttttttttttgaaaaatgcgttgcaaatccaaaaaaaaattttttgaaaatttttccaacgattttttgtttttttgggagaacttgaaaaataagcattcaggaggtggcactggcacctcctactagtatttaaacaattttcaattcctctccaaaaaattcagagacaacagcgccgccgctagtttaacggctgtgcatgagccgtgcaattgcggtggtgacggtggagcagcaccagcggtggtgggcgacgatgggacgacgacggcggaaacggacaatgaacagcaaaaccggcaatgccatcatcatcatcagcattgctatcaccaccaccaacaacagtgccaatgccaacaagggcaccatcattactactttgacggccgaacgcgggaccgttcctcgtccgcgccgaacattaacagtgtgatccgtggcggtggtgtcggtggtggcattatgggccgtggcggtggtggtgggatttgcttgaagttgcacaccaactcaatgcactccggactgcacaacatcatcaacagtgagaaatggccatccgaaaaaaaatttataaatttttaaaccccacgcggactcgaaccatcagtccaatatgacagccgtcagtaccacttgaccactgtatctgaatggaaaatgcaggggaaaatttcgattttcgaggcccaaaaacaatttttttttttcacagccgctaattttccaggcatccaattcccgcccaactcggccggcatgtgccgtcgttctcagaccccgaccctgttgcatgaggtggagtgttcaacgacggttgtggcaaatgttggcggtgccggcggtggacaccatcgccatggcaagggcagaggccaaggcggcagtgccagcaccacgacgcagtggacttggtgagtttgtgatgcat

SEQ ID NO: 13510 - DNA, 665 bp, Heterodera glycines
ggaggacgcctcacatgccttcttcattgaacagcgaatacatcggagcaaaagtaaacacattgtgatgttgatgatgggagaatggcatgtcgagggggtaaatttgcatacgacggcacaaattttcgcgactttagccaatttttgagaaattttgattttaggcgacgctgggaaatgttagaaaattttacttaattttgagtcgaattttggaaatttttttgcagagttttgggaccggtgatgctgctaggcgacacgaaaggaaaaatcaggcatttttgcccatgttttaatagtttttcaacaaaaatttagccttttctatggtaggtacaggtcacacgctgcggtacaccccaaaacacagccgagacataacacagccgggaataaatttttaaaaattttcaaacagaaatttttcaagaaaaaaatcttagaaaaatttttcttgaaaaattcaggcgatttttttcaaaaatttttgaaaatttttagtaaatttaaaaaaaaatcgctgaaaatttcttgaaaatttttttctcatagaattttcaaagaaaaattattctaagatttttttcttgaaaaatttctaagtttgaaaattttttaaaaatttattcctggctgtgttatgtctcggctgtgttttg

SEQ ID NO: 13511 - DNA, 2251 bp, Heterodera glycines
agagagagaggtgagaggatgagaaagagagcagagagagagaaagagagagaggtaagagattgggggagagagaggtgagaggatgggagagagagagcagagagagagaaagatatcaaagagagaaaaagagagagagagaataaagaaaaaagtgagaagggagaaagcagtgagagagagcgaagagagagaggtgagaggatgggaaagagagcagagagagtgaagggatagagagaaagagagagagatcagagagaaaaaagagagaagggagaaagcagtgagagagagtgggagagagaaagagagagaggtaagagatggggaagagagagcagagaggatgggagagagatcagagagaaaaaagagagagagcaaagagatgggggagagagtgcagagagagaaagatatcagagaaagaaaaagagagagaagagagaaaaaagtgagaggggagaaaccagtgagagagagaacgaagagagagagagagaggtgagaggatgagaaagagagtagagagagcgaagggatagagagaaagagagagagagaggtgagaggatgagaaagagagtggcagtcctaatagttacgtaaataccaattatttctgtttatgcgcgaaaaatatgagtttcgggttttatcgttgtaataatattttattttttccgtatataagaaatttatacccatgatccaagcttaaaaactaatttaagactttctagcgaatgttacgggtcgggagtggggtcaatcgacgcagtttttcaagggctataagggaaaaatagtgcggtttcgatcggtttagaactgttcgaactgtgttcgaaaaacgagtcaaaatttgcacttttttggttgtcctatttttgaacgctttttgcatgccttaaaagtggtcaaatcaaaaatcgaaacaatttcgcatgatatacaaactcttggctttcgaatgataccagggttgtttgggtacgggtccgggaagtgccctaaaaagggattacaagcacttttggtcgggttttcttccaaaaaagaaggaaaaggaaaagggaactaaaagggatggaggcaagcgacccagtggttaagtggttagtgcgtctgcctgtgcttttgtggctctatggttcgggtcccatcaatctttgtgttttcatttatttattttattaaattttttgaatgcttttttttttaaattaatttttatttttttattaattcaaaaaataataattttataaattacatattaattaaaataaaataataagtatagatacaaatagtaaatattgactaattttaattccagttatgtagtaaagaagttattatgtaccattttgcatttttttttctttatgaaagtagaatggttttttgccattttttcaactttccttttttcattgtgaaaccttttttttattttctttcaactgaaatttaattaatcgaaaactaggaaaagatactaattcgaatgaaggaatgtcaataaaaaaaattgattacgtttcattctttacctctttattctatgatgttgtgtatgttgtgcctactctatatgttctttgacctcacccggtccactagcataaaagggtgctttccttacattgctcagtcaatctctatggttaatgtgtaatcctttttttgttctttttcataatagtaacattttttgtttctcttcattttaaaggtattttttaaagttaaattcttctaacgattcctttgatttatttttttatcgaccttttcatttgttttttgtattttaacaatgttttatatttttcagattatatttttattgttatgcctagaaagcgcacattgaccggatatagagaccacaagttacaacgcgaagctacttctcgtgttcggaaaacattgatcaaccattttcggcatcaatggctccattgactcaagctcaaactgagcaagggcgcattgactctttatcaagtgacacccaattggaaaatgaagcaattttggtccaagacagggatgtcgcccaacaaaacgaggaccatggtcagtcttcatattcaatctgataacttttaatttgtttttaaggacaaaaggcccggggacgcccgccaaaaaagacaaggggcccaggccgaacgaacataacaaaaactgctgggaatgggggcacccctttgtttgttgaaagcccgtccgg

SEQ ID NO: 13512 - DNA, 1820 bp, Heterodera glycines
  unsure (1)..(1820): unsure at all n locations
gttcggaaaacattgacttcttccgaagcaggggcgtcttcgtcttccaatattgacacaagacaagagtccgaaactgctgttttacgtgacctggaccagggcaatttgaccaatactctgacaacgcccgtggcaaaaagccaaaaattggatcaaccattttcggcatcaatggctccattgactcaagctcaaactgagcaagggcgcattgactctttatcaagtgacacccaattggaaaatgaagcaattttggtccaagacagggatgtcgcccaacaaaacgaggaccatggtcagtcttcatattcaatctgataacttttaatttgtttttaaggaccaaaggcccggggacgcccgccaaaaaagacaaggggcccaggccgaacgaacataacaaacactgctgggaatggtggcacccctttgtttgttgacagcccgtccggtaggggcgacagtggtgtcaattcacgcagaattgtggtcagattttcggttgtttttaaaattaagcatttgtttaagctacgatccaaacatatatgccaaatcgaagagagactttacaaagtgctttccgattattctcagcgtccttggcccttaaagaaccaaggtgggttttgaatattttcagccatttttcaaattttaattgtcaattttagctaaacataattggactcgctgcaagggcgattgcgattgtacgtctgctgctcaatgtcaacagaatgcgcaggcctacattgcctctgcaaaatatgaccgtgaatttaccccaaagaagacaatgccgttgaaattgacgaagatggcaaaacagtgtcatcataaacatgcttgtgcttcttctgggacaaatcacagggtggattagattagggtacctcaattatcttttcatttcaggttgattattatgacagcggtcaattcggcgatgcaaactgtcagcattgtggtgctgttttgctagccaatgaagcatatgcaataagaaagcaggggcgtgtgtccccttgctgttccaatggccagtgtcacaccgagcaaatgaaagcggaatttgccgagctgcaaaaccctcctcaaaaattgaaagatttggtcgcggctccggatgaacgcatccgttttgagtttttggacaacacaatgccactcaataatactttttcgtttgcatctgtccatagcgagaaggcaccagcagatcaaatggcaggcagaatggataccgttaaatataatggtgattagggagtaaagcttttagagaatattttatttttaaggcgagttttcgttcatgctaagcgacctcatctctccgcaggggcgtcgtcccttatttgctcaagtgtatacattaatgcctgaggatgcgctgttattgcgctctgagaatttatcagattcgttgacaaaaaaaattcaaaatcaaatccttgaaaagttggagtgcttgatgcgtgaaaacccctttggtcaaacctttgtcactgcaggggcgaagcttgctgaagcgactgagcgtcttggcggagcagtgccacattttcaggtgtgcttttgtaaattgtgttaggaaaacaatgctttgagatcgtcttattgaccgatcgtgacctgaaaatggatgctgttcgtagccgtgctgactgtacggttatcgagcgtgcagatgctcccacagctaagcaagtggccgtaatatgggtgcaagaagacgnctgtgctccagaaagtaatggtaaaactgcactattgctttatgaattaagttttttaaggtttctggctga

SEQ ID NO: 13513 - DNA, 4012 bp, Heterodera glycines
  unsure (1)..(4012): unsure at all n locations
caacattttgttgttgttggttgaacgattgccatgccaaaggaaaagcaaagagaagncattagtagcagcaaattgaagcacattgcagcgacaaatgccacaaagtcagagattcaaatttggttttagcaaaatgtattcacatatgcaaaaattaaaaaaattggatttgaattgacatttgtaattgaggtaattctgatcagcaattaatgattgggagagaatggtacggatcaattccctgattaaaatcatggacaacaattttggcttcattaaagtaaaaactctgtgatttataaatttttaaaaaataagttcaaatttaaaaaaaaaatttctcttgctatactggttttacaatacaaaaatgctaaaaatagtacaggaaaaaaagtttggctctgataaggaaaaaaattcttcgccacgaagtgataaccaacagcacctgaggacctgatcaatacaataaaaataaacctatgaaagcagtggatttgggcaaatgatcaattatgaaaaatggcatgctccatcatccaatcaaatttggtgaatattttgatcaaaaaagaaggtaactgatctgataatccgatctgattataaccagatggatgataatttgccgatcaatgaatgccaataatgtattgtgataatgattagaacaaaaagcgcgcaatgcgttggtcaaaaggaacatataatgttgagagtggtcatggaatgtgtgcgggttgatcaatcaatacacaacacaatagcctcaggtctttttttattgatcaatcacagctaattatcacattccaacaaattaaacgcaattagtggctcaaaagagggcttatcaaaacatagaagaattttttagtcaatccccctaattagtccttaatatatatttatatttttagtaatccccctaattaggtcgtcttaattaataaattataacgcgccgacttttttttgccatttttagcccaaaatggaattttgcaattaagcgcaattagtggttcaaaagagagcttattagaacatagataatatattgggcagaccccctaattagcccttaatgtatatttaatttatctccctaattaagccgtgtcctaattaataatcgcgcgccgactatttttttttgccaacaaaaatggaatttgtgttgattgacaaaaacgggaacttacccgccataaatcgatcagtctgtcagttggtccccgtgctcattcccagccctcccgccccccgcaatgatacaaaataaatatagtacatacatacagccctcaaaccgtaagcgcccggggcgtcagtgtcggcggtcggcggcccgtccatttttgggtgctctgtgccccccacccccgccccgttgtccctctcccctctccctccccaacaacactcctcgagactctcgacagcaactaatgatgatgatgtgatgtgatgatgaggggacggatgatcgagactgttatcactccgttcgctgccgccaaacaaatcgcacaaaaattcgcaaattatgaatacgaatgaatgaatgtggcggcggcggtgttaaaatatgatatgtaggtgctgattggtgatgatcagcacagcagatcagggcaatcattcacgccatcccatccccaatcactcctcactcacaacacatcacaaacacccgccgccgatcgccgcctcgtcccacccctgggcgaaattcgggggggggggggggggggggaacctgtcgatcggtcggtcgatgtgcctgtccttgtccccccccgtgatatgccctctgctgctgctgtcgaatttaggccccattttcaacttttggactgagaaaactaaattttgtgggacgcgccaagccgagaccaaaaactctgacggtgagtgctaggctgattagatgattgattagttctaattaattcattaatttagctaatcatcaagtattcagcacccatcaccatcatcatccaagtaaaaagcgaccgatgctcgagactgttggggagcgggagcggtaatcagtgttctctgatcaactttgctgtttagcctaattataccacgcaacagcagtgctgatggtcgagagtctcggtctcggggttctcgctctcgggttccggattttggtctcgggcctcggggttttcagtctcgggtcttggggttttcattctcaaactcgaggatgaagcttaatttcggggtcaagtctcggtttcgagagtgtcgggaaattttcggtctcgaactcactaatcagcacccaccaccacccgactaaaaagcgaccgaccgatgctcgagagtcttgagagagggtttggggtttgcgtgtgtgttgttgtgttgccccccccccccgcccctcggtggggcgggaggagggggcgggaaggccaagatacctctccccccgccggcgctctcaaattttcccatttcttcgttttcgtcccatccttccgtctcccatcattttggccccctaacagaccatcatcatcatatatatcaccaccatcagcagagtcatcactcatcattccatcctcgtttccccgtcccctctcccctctcccccccccccccccgccgattttgtcttttcgactttccaaatttggcatcactttttcccaccatttgcccccctccgacgcccaccgccggcggggaaaaagggaatatgaaaatgttttgttttatgtgtgtgtttgatgattgatttgggcccccaattttgggggacaaccagcaggacaatgcacattcgttcaattcattcatttgttcattcctcgaggggttgcggggacgacggcgatttttatttattttattttttgtaaattattttccccgccgaaacgccgcgttgtgaggacttatttttggcgctcaaggacatattttgtcgggtttacactttaaacggttcgaatggacgaggaaaaatgtgaacatatttgggcataacgaaaattcagacaatttaattggccaattatgaggtgatcaactgatcaaccgccgaaaagtgtgaaatgatcattggtcatatttgtgcatccgatcgccatatgggtgatgaactgatctgatcgaactggaaaggacacgttattgatttcctggaaaaactcagggtaattaatatgtatttaaaattaattattgggtaaataactaaattttgaaaattggttggcaatgctaaatattaattatttactaattaaaccaatttataattaatttatcaccgaagaaatacatataattaattttctactgtgaatttcaaaaaaaaaagaagttattttgaaaatttaatattaaaatttcgtttttataagaaataataaaatattgtacatttacagtagtttattagtaattgtgtcaattaatggagctcttaacttaaaatgaaatataaaaatttatttggtcattttcgcacaaaattttatttcacggatatttttttatttttagaatgggcaaatgatgtgtccttctgctgataaaaatgtaatcaattagtttaattaaatggtttcaccgaggcattcattgtaaaaattatgattaaaaatttccatttttgcacacctcccattaattaattattatttgtaaataaatatggaaatggttatcatcattaacattgcactgattgcaattaattgttaattattttcagacggaattttccgtactgaattatttatagtaagatccgtggggagcagggctgggcgaaacttcggcttcggcttcgaaaacttcaggttttttgagcttcgaacttcgtgcctcggtttcggctattttacccgaagtttcgggaaaaatacacccctgaagattgagttttcaatgtgaaaatgcaccactagtgattgactnttggtaaacttaaaattaatatatatttaaactattttgcttattt

SEQ ID NO: 13514 - DNA, 3162 bp, Heterodera glycines
catggacaaaacttcgtcttcttgtctcctactgcacaacggcatgctgcatttacgtcacattcatttttgggcgcgatgtcctgatacccttggtatgggtctacttgatggggcccgtcatcgttaccgcccgcaatttggtaacgggaaatcagtggacgcagcggaacagagctactcgaggcacacggcgagcaccggcaatttcaaggattgaagcaattgagctggtaccgcctccaatgccccaggagatgagagcgaatgaaacggcaagttcgcaacaagaggaccccgagccgtcaccgctggtgatggaactgaaattgggtgccgttggaaatctggggcccaaaggaaccgaattcccgtccctggccggggtcttttctgggtttggacagacgagcagatggtgcttctccccgcagcggaaacagagtgcttttagccattcctatttcgggtttccccaaccaccggaaaagagcgtcggatgggctcaacaaaacgtggtggtgccctcgggggatgaggttgggtgggtccaggattgttgtcccacggggcgtggacggccttcttaagcttaactacccgtgctaagcgttccctccatgtttttgatgtccaaggtcctccctcttccatttccttatcgaaaagctgtgcctttatttccgtaggcaatttttccttaatggccacagttaggaaggggttgtcatctaagttgttgcccagactttccaattgtcggcaaattctgtcaacattctcagaaaaggctcttaatgatgaggaatgccccgttggcttagctaagtggaagagctcactccttaggcggtccgcccttttatcatcgtcgccataccgcccttttaaaaggtcaacgacgatcagataattggggtcggttagtgcgaacccgtccaccaaagtgcgggcgttaccccttaggcgaccaactaaataggtgagtttttgcgcgcccgtcagagaggcattatcgtgaattgtatgggaaaaagcggcccagaatgagggccagttgccttcgtgcccatcaaagtcaggtagctgaagcgcaggaaggttaatttgggggcgaattgctggcgcaggaaaggacccttgagtggggggcggtgggggagccaaagaacgaattcggtcaattttgatgtccaatttcgtctgaaccccatggcccttggcgatgatctccccgggggatttccctcccaccaaaaaactggaaaacaaagcattttcctcatcccgaatttccgggttcggggaggctaggacatacgtccactctttcaaaagctcctttgtcaccgccaaggtacgagcgagattttcgctcgttgagcctatggcgtccaatgagcaaggctcattgggcaaagcctcaagtggtggcccctgggcaacatccgccaaaatgtccaacaacaaaggttggagttgttggcgaattatggcggacataattggggggaaaaaaggagggtaaaataagcaaaaagagaaaaaagagggtacggtaagcaaagggaaaaagtactgcaggcaaaaagagaaaggaagaaaaaggcacggtaagcaaaaggcagaaaaaggaggtaaataagcaaattaggagttcgggagtctcccaaaaaggtaaaactaaagttgcccggttagctcaattccgtgacaagagcaccagactcttaatcccctgtgttcaacagctgggaatcggagggggtacgcccaagagaagggggggggggccctcaaattcagcagaacactcaaaacaatcaaaacaaataggcgccaaaaaagtttccgtttcccgaggcagtgagtgctaaccaggggaaagggataggaaaagggcgaccgaagggaaaagccaagcggtcggccgacgtataggcaagaaaaagcaggcaaatgccgagggcgaaagtgccaaagggttggacgaagcaaaggcgagaaagcaaagtgatggccaaatggctaaacgccaaaattggtcaacgcaaagggaaaagcgaagaatggccaaatggcaaatgccaaaattggtcaaagcaaggcgagaaaggagaaaagcaagggggccaaatggcggagcgccaaaattggtcaaattgtaagcaagggaaaacaagggaaaatgtgaacaaatgagagaaagttttttttgtttttgttttatttaaaatgacttcgggaaaatttgggtgagaaaatccgtcgttggtgatcagcggagaaaaagtgagaaaaaaagcgagtggcccagtcattggcacatccttcttaaatagcagcgtccatcggggtgggcggggcacagtatataggcgattcgcggtgggcggaaagcgttgattggtgggccgggccgggcgcggggtgggcaacagatggaaggagtcgcgggcaaaggcattgaacaattcgggccgggccaagcgtggggtggtcaacagatggaaggaatcgcgggccaaaacattgaacaattcgtgtcatttcgctgatacatttttctgtgcgattaatttgggagggaatgtttgggcctggcccagattagcaatgtttagaaaaaatggaaaaaagtgccaaaaaactaatccccaaaatgttattatcttaacaaaaaatcggggtcgccaaatccccaaaaaacaccaaaaataatatttatttataacttaatttaaatatggcgaagacagcctcccgcccccctttaaactgacgcagcgcgtgaagtcgaagaagccccggaagaagatgccgccaccaaattgtccgcagcctcgattggagcattttcacccgctggtgcatccgcgatgaccgggttgttcacaacacccactggcgggagcggagcctgtccttcctgaaaatgtgaccccgggggccccccttgaatgtccctcaacggaacggggcggcgtccggaattctggttgttacgccgacgttggcgcttatctccccctcctctaactggtccgcccacctgccggccaatctggttggccgtcatttgcacaacaagtcgttccaacaaaccccgttgggcttgtgccgtgctcgttaggtccatcaaagtcttgttgatcgacacca

SEQ ID NO: 13515 - DNA, 4483 bp, Heterodera glycines
  unsure (1)..(4483): unsure at all n locations
acgctttacattcccttttatagacttaactcgaaatataaattaggcaaaaaatttataccttttgcggggcgggtaactaaaatttggaaccaactcgataaaaggctcattgaaataaactcattaaatcaatttaaaaataaaattaaaactatctctattcccgtaaaatagaccggaaaaattaaagtcgaatttttaatccattcaaactaaaagtgatttggtcgctatttatttatttgtattgatttcatattatattttattttttggcggcgatctcgtttttaattgttttgcgctttcttgaggacattttttaaattaatgttttgtcctcaatgtaagcggatttttcccttttgtggactttttctttattgacaataaataaataaataaagaaaaagatggaatgtaaatattaaaaaatacaatatcaacaaattaagttgttgtgttgtgctttgatgacattgtccaattgcgtaaatttgcactgaatttatttgatggcggactctacacaaaggtcaattaattaattaatgagtggtcaaatttacgaattataattgataaaataaaaaattaattaaggaatatgtgtacataatgccggacaatgatttgtatttgtcttgtaaggggttttagcaatgataattaattagtttattttgttaattactctcagtcaatttgtcgaggttgcccttttgggtgcaaaggaggtaattttatgattttaattaactgttttggtttaatgactattttaattgccttcattcaagtaacaattcgattgttcttgacggaagagacgcggacgcggaagcaattggccgattattcttttgggtatgaaggcaaattttgacaatggcattcagccttttttcgattttactttttaaataattaaaaaaatgttttaactttcaaataatttactgacagtgacaatagaaatattttccgatgtgatgccagaaggaacggagtgtgggagaaagtgggataaaggacctgagagaacctctacaagaggcgcccgtagctcagttggttagagcacggcacggattgctggggtcgtgggttcgagtcccactgggcgagttaccttttatgttctacaccgaaagtcttatctcttcttcaaataatgagctcttgtagaccaaggaggggggagaactccaaaaactattttctaaaattctgaaatcatcttgttttttttcaaaaaattcacatgaagctaacaaaatgccgtaatagatgagtttaaaagccttgtaggacaattaaacgaactgcttttgtggtgtttggcataatgctttaccgtctcacttcagtggcactatgacatcactttttcgacactgtccaaccgcaattattacggcttttatgagagagttgtgaaccgaacgtacggttggcccttttattgccccgagtcggactgtggcactgttgtaaatgcgtggcatttgagcagatttctgatcagtttgattgatcaccacaaccctttagggatcagtatattccatccttctctacgacacaatttataattatggcattgcgttaaatgaaagttttaagcagtttggcatacgacctgaagtgtaccgtaatgggtcattgttggccagcttcagaaagccatttatgggtatgaaaactggggggggggaataataggctaagggcttttaaaatgaatttttttttttgatttgtgagtgttttttttgtcatcaggtttgagcggatatgtgattacggagtcggatcgtaatacgcgcgttttggtgctgtccaatcgaaggtcggaaggaagcaaaaatgcgtttcgcattttgatgcaattgggatggaaagatggcgaattggtgagcagcgccaactaattatcaaataattgacaaaaatgggtataggtagacattaataactaacattttttgcgcctgtcagaatgtttcaatgagtgccggcagcagcccgttcatttggtcttcccatggcggaagcgcgccgttggcggtgccccggtgcggttttgatggcaacggatgtgccgtttcagtgttcgacatgtataaagtaagaccagcagcagttcactttcactggccagggttggcattccgagtaaaaacttgggaagctgctatatccgagtcggaaggcatttccatggaagataccgaacccttaattctgatcctactcaatgattattttagggatattttttgagtggcatcgctttgtctgcgctgctcattatcgccagtgttacgataattgtctatttgatacagtaagaaagagaaacgaatggaacatttttttacaaattattttacagtgccaaaattgttgaaactcgtaaaaacaatttactgtggaaaataccatttggattgttgaagcgacagaagcaaagggtgagtggttgaaaagatttattgggatattttaaagcgtaattacatgttatatatatatatatatatatatatattataaattaattagccgaaacatttcaatttttaaagttatttaaattgctatcaaaatacaattaataagcattccataatttcatatgccagacatttttcttgcaaatttaagagacccgaacggactgccgaacgcagtcagcactctctgcgctccaaccaaacaaatctttcctcgctgaccaattcgaccaccgacagtttggcacagtccaaaacatttacgctttactcatacaacggggagaagtgcattgtgcgcatttactgctcaacctccttggcgacaatggcattttccgtcgcgcaaatggccgagtgccgaacggtggggcgaggggggcggggggcaatgaatggaggaggcatttagggggaaatcaaattttggaattaaaattcacgtagaagccgaatggggaggaaacttagcaagattcaaatttctgcccccaaacctcatcagcgactcgtcaatacattgaaaattctagaatcagcaccaactaatgctaatgaatcttccaattttaaaatccctataaattttgttttttttttattaatatacaatttttatttctgtttttataagtcgtgatttttgatggaattaatgccttttctttcatacttttgcttgctcattatttttaagtcataagagatttataattaaataaaatttatttaaatggtgtaattcctttaaatgttcagctgcgattgttcgaccatgagaatttgaatcgttttttggggctgagtttggatgggcccaatgttttggctgtgtggaatttctgtgccaggggttcgctcaaagatgtgatattgtccgaaaatgccatggtcaaggacgtggtgttcatccaatcggccatcaacgaactgtgcgaggtgaaaagtcaaaaattaaatgccgaattaaatttcatttaaatttctaaaataaatacattatataatgtttatttcaattagcaatttaaccctcctaaagttcgaaatccaaaaaccgaataagaactcattaatctgtcttttgattaatattattaaatcatttttcttgattttttaaaacgattttattaggtttttagattttccaatgaaaaaaataaatggtttttcacaaaagcttatggtcaaataaatggaagaatacagtattttcttttttttgatctcagggactgtatttcctgcacagttcgcccctccaattccacggtcggctcaaatcgtccgtttgtcttatcaatgaccgctggcaagtgaaaaatttcgtattttgggcttcgctggctcaaaaatgttcaaaaaattgaaacaaaaggtgaagcattgctccgaatgacttctcttaattgaataaatgcctttaagactttttgtggttgtcgcctgaacaattgcggaaaatgggcgacaacactaataataataataatgaccaacaaattgacggttccaaacaaccggacatttacacattggcattgattttcactgaagtataaattaaatgcattaaattttgggttcaatttcacctgcagaaggcggcaccatcggatcatttcatctttttaaaactaaaaaaacatttagatcgttttccatagaaaaattagtgtttacaaacatactttggacacttttggctgtaccatataagatggaattgtgaagcctttatagagtattaattttaattattaatcactaattaatgggtatttgtatggagaaaataaaatattattgtctaaagcaagcactanattaatttcatttataaataattgttaccttaattaactttgtgtcccaatttcgatggntgatatgtgcccgtgttgngaagagagtgacaatacgccgccatgaatacggggaaaacgagcggcgagcag

SEQ ID NO: 13516 - DNA, 1358 bp, Heterodera glycines
  unsure (1)..(1358): unsure at all n locations
ttgcaattntgggacgccaagtggagaaaagggacggcattttgccggataaatagccgaagtaatgcgctgggagggcggaagaacgaggattggtcgggatgagtggacgagaaaagaatcgttggctgatttagggtggacgattggccaattggcactgatcactgggccggggtgggaggggcacgcccagctgtctgtttggcagagtggcggtgatcgatggtggatgaatcgcccttgggcccgggccattggccgaaccaactcatcgtcccttcccttcacaaagtccccaatcacggggatttgatggggagggaaggaaatgagcactttacaccgcaaaataagaaaagcagaggacaccaataagaaggaggaaagcatataacataatgtgagatgaaaattgagcatttcgggggggggggggcaaacgacgacaaaagtgagccgaaagagagggcggggaggggtgggggatatgaccgaaggatagggaggatggatataaaggggggggggggcgagcaacaaaatacacacaaaatataggagcgacaaaggcaatgacatgatgctcgaagggttagtgccaaccagggatggcatttcgaggccccaaaaattttcggtagtcggaattcggaccgccaaaaatgacggaagtcgaaattccgtgccaacccttttgccactcattccttttggcattccgtttaacttttgaactgttcctttgcctgtctctcacctctctccaacagttccatcctctcggtcttccatctgccaatgtttttcccccgcatttccctccctttcccatcctccgccatttttacacattcttcgcacggatcgtcactgaacggaagtgaaagaatgtctcctgagcagcgccggtgggaatgaccggctttgttgcgaatacaattcaaaagcatggccaaattgtaacagataaaactggtgaaggagcagtttattaaaggagcgggaaaccgcaaaacaaactgacgaatgtttcgttgggggagcgggaaggggtcggattggcaaatcagcgaaaagtgagtacaaagaggggagggggggggggaccctcttgagaatgtcattcataatgattgacaagtgccgaggcgaggagagggcagttgtcacaacggttggggtggtcggaggggggggggaaatatttgcagagcaaagaaacggggggggggaggggagggcgtccaaatgcgccgattccgtctgttttcattcgtcgtctccgaccagcgtgttcaaacacctcttcttccggcaatggctttcgcttccacctcgggttcaccaccaacaac

SEQ ID NO: 13517 - DNA, 1422 bp, Heterodera glycines
actccgaaatgccaaggaaagcggcaccggtacagcaaagaaaaatgatcaggccgaacagttggtggaaaggcagcacaaattttcgcagggaaagcgaagcgccggggaagagaaaggtgagaaagccgatgatgaactgaaaaaggagaaaatgagaatttggacaccaaaaggtggggaggggtggacctgaatgaagtaaaaggagacggccgaaatgccgaaccaactgtgcaacgagtacaaattgggctgtggctgtaactcgccgttgggggaacgatggaagtctaacggagggatgaggagtaattaggagtccgatggctaatgttttggcactttgtcaatgcgttcacttgccatgagagtcccagaccgcctttagagagacaacagccaataatagagcaaccgaatggatgctcatgtgcaggagcttaacaagtccaatggaaaaaggggggtgggaatgccatcattggcgttgcaattggcacagaattttttggccaagccgaccttggtgaagcgtttgcgttcatttctaaaaacgcggtagacgagaatggcctcgccctgtaggaaaagtatgcccatggccatgaactgcagcaagggacgggaaggagagattattgcggttggagacggctaaggagaaaaagcagagaccgtcggatggtaacggaactgcctgaaggcccgaaaatgccaagggctgaaccaccgtccaataatcacctgtccgggtcacttcgccacgcaaagccaccctcgccacccatccaaacggcgacgaaaagaacggcacaaatgccgaagaattgggaaaggacgaaagcaccattgaacagcttggcactctgttgctcattcaacagattggggtattcgaggagcagtgacatttggggggagcaaaaggagacaaattggacagaggaagataataaattaattttgttttttaaattcaatggatttccgaattttaattttatcaaaaataaaaataaacgtgggacgacaaaaacaaatgaagagacagagagagagaaaaggagaaataaatgccaatgcaaatgacgggaggggaaaagggacgggcgccattcgcccgcttttgcttcggtgtgccattcgcttttccctcattttccccaccttttcagcactgagagacaggcggaagaatgctttttttgattgtctctcaacaaaatgagagaaaattaaggaaaagaataatgggcaacgaacagagaaggcattcgaagggaaacgaaagaaaaatggtggcttaattgagttaaattttgaatggtatcacagagggattaaccactaaaacgaattataatttattttaagagtataaactttaaagcgtggaaagggacattttaatgaaaactg

SEQ ID NO: 13518 - DNA, 2283 bp, Heterodera glycines
aaaatttcggaccgggtcagtttagtacggccggtttagtacggccgttttagtacgaggggtcgttttagtacgagggtcagtttagtacggcaagctgtttttgtccaaaatagattctactgcttttttccgaaaaaatgtttaaaattaataacataacatatttatcaatgtgttaacaacaaaaaaaaataacaagcattgaaaaattacgggcgcatttcataattgcgagaaacaccaacgagcaaatgattgatgttatcgggattaacattgacattggcatggtaattgtggtcattttggatagccgggttattgttgatggcattgtagccctgcaaaagtcgaagaattctttcatcggcggcacgatatttgggcttctttagaggagggacttcaccagcgatgcatcgtgagatgtctgcatcaattgacttttgctcacatcgaattgtgttgatgaagtggaagacagtaggatgggtacaatcaaatgcccgttgaagttttcgatctgtcaaagcaccgttgaaccacggtctcccggtgtaattaaaaaaattgagttaacgtttcaaaaaattcaccaattgaagacgcccataagttgttgaggaagttgtgcctgcaaaacagtgaggccagcagagagatgatggacaggaagaaaagccatagaggtgatcattttgctcttttcagcaaagacggcattgttgttgtaagtcttaatatgaacaattctattggaaaaatacaaaaatgcaatacctgagttaaaccctcggcagcaattcgtttcttcatatttcccactaaatggaaaaagcagaactgcacacgacagagtggcaacattgtacggacagcaatttttcataataccgctccattccgaagtcgaagaacgagtaaatatcaaaattcttaatatggaaatttgtgaaatttaatggtttttattttttcacctttgcggtccagcctgtccctgaatttgaaaaacgccggtatctgccaacaaaaaattctcctcgtcattctctgttcgattgtacattctgtacgagggcggcaattccaatgcgtccaaactgagtggtgcagcaggtggtacatcttcgtcatgacgaacacgttttataacctaaatcaaaggaaaaaatcaaactttggcataaaaatttgcaaacgttgacctttttgtcgcagctttggtcggaaccaacacgggggttgcagtgttctgcaatacttgcgcacggattgtagccggcgcttcgcacgtctcaactgcacgccgcttgagctgggttatatgtcgctgacactccacatgtgcggcgctcatgtcgcatgtgtggcttccaattattttgaggacattaccattaatgtcagtgtgaaggcgccctgtatttgaaaaatagtttttattttattttatgcatttacctttgcatttgtcgttagctccgaaaaactcgcatcgccaatacttccgaagtccatcgtcactgagtttgtgaagaacataaagtgaaccctcatgttccagcttctccttgtttcgctttgtctttatttcctgattgggctgttccatttgtattgtagctaaacatagatattataagtttttccttctttataattgacaaaaaaaacatttgtaacagttatggacaaaccgaccctcgtactaaaccggccgtactaaaccgaacctcgtactaaaacggccgtactaaaacagccgtactaaaccggccgtactaaaccgaccccgacccaaaaatttgtctatgtttgaatttttttggcgttctgtatttattttttatttttttggtcactacctccaaattagagtgccacgggaccgggaccgggccgggaattcccggtcatccgaggtcccggtcccgggttttgaaaagctcaagtcccggtcccggtcccggtagggtaaccgggaaccgtgaaaaacaagcactggtaagaatgcggtctgagttaaaaattagtgaagaaaattggagtcaaagggaaaaatagaaaataataattaatatattctttataagtaacactgcccaggtgtgcaaatggcctaatggctagtctccttgactttcccttcttctttcccctgcctctatctctctacagaaattagattattttcagttttttttttttttgtatcctcgtgtgtttcctataaagaagatatgattcctcatagtttttttttaaattgatacatat

SEQ ID NO: 13519 - DNA, 3374 bp, Heterodera glycines
  unsure (1)..(3374): unsure at all n locations
tgatttgacacnttttcccttacaacgccatcgtccactttccgtccgtcagtccgttcactcattctttcgtaaaaaacaacacttcgcggccatttgtactttgaacttaaaatttaatttattatgatgggtgccatttcatttcgttattacttgtccgataatttttttcaatgcgttttccgtcactgtctctcaccaagcacagaagagacatctgtccaaacagataaattaacaaaaagataatttttgagggaacgaagatggatttagaaaaatttttaaaaaataatccaattgcaaacattttagatccttctgctataaaagttaaattttccggaaccctcttaaaattttcaaaatttgtcacgaaaaaggcagacctatacgctttagtgtttttaaataacagtaaaaattaaaaaattcacttttttggaattttttgtattgatttgtgttttcatttaaaattgatttgaccaataaaaagttttgccgctcacttgctcgtccgtgatgacaagagggtcggtgaacattgtccacgtgacgccttcagtgtacggatgggtcgttaaggagctttaatcgttttgaattaaaaaagacaattgttttggcaagtttacccctgataacggagaaaaggcgacgcgggatgatccatgtttgatgatgatgacacttcttggctgttgttgtctggcaatttcgatgacagcgtgtggtcgccgccgatggtgacagcacggcgtttcagtgccgatagctcgaaattgatcggggactgttgctcaactgccaagcaaattgatatatgaagtgtttattttacaaaattgtttggacttgtggcctaacaaaaataaacaccattaaatgcgtaaattaaaaaaaaacagatttctctataggaatgaatctctataggaatgaatgtggtggcccagttcgatttttttttctggcctatataggcgctgacggactctaattcccaaatttaaggccaaaaattcaaaatgggcatatttgacgaatcacaaataaacaattaagcatcagtcactataaacactgaaaacaacaaaaatggagaattaccgcgtccggctttccgtttcggttcctgtaaaaaaaatcaattagtacataaaatgaatgggaacttgtgaggatttaagcggttttgaaaagcaataaaaaggtcgtaaatttatataatgcattttacctccgccttgatgcttctttcgcctgctttttggacagtccgttcgtcaatgtcttcaccacgattgatcatttggaataatttaataattgaaagaggcgtaggcaaaatggtctgtaatgcatgaatcagaatagaagaatatacgcctagggctgaacttgccaaaacaccttacaaattagggactgataaatcggaattttggataagagaagggcccggatttttaggcgttcacttatttttttgcggataacatatggtgagataaacgcaaaaaacatttaatttagaaagtatttttcaactattttcgcttatgaaactattttgcttgtgaaatttttaaaaaactatttttcaactacataatttttgcatataaacaaaaaaaattatgaataaacaattttcaaatttttggcataatgtaaccgaaaattggcagaaattttacatttttcaaaatttcccctggcggcgcctgtcgacaccgccggactattttcaactatttctgcttgcttgtgaacaaaaaatttattatgaaatattcaacaaaaaaaaataaaatgggcgctagtgcactttatgagtccaatcagagtttatgagtccgatcaaatattttgaattctgattcaactttttgaagaattttcattttacatcagtaaaaaatataagaaatcctttgttttcgcgaaggatctgaaataacaatacgactactgttgggtaaatcatcggatgtacttcgttgatccgaatgacccatgtcttccaggattgggagtacccgtaaaactcccgctcccgtaaaaaacctgatgggtagaaaagtacgggagcggggctcccgtaaaactccgacggataaaatattttattggactcaaaatacctttgggctcataaaagtcaattgaactcataaaggacaatagagccgaaaagggcacccctgagaatcgacttttcaaaaagcaaaatattggccatttggcgggcaataaatttttttacgcctgaaaagcttgaaatgtttgatttacaattattcaaccgaaatgggtaaagaatgcggcaattttaaaattcactcgtaaattttttagcaactaattctgtcattataattatttttttggtacacattttagtatttggtgtattttattctaaatccagggttcggattaccttaaatgcaaggacatcctggaactaaggccctctcacttgaaaatattcttgaaatcaagatgtccttgaaagtgagcattcaaaaaaatagtttcaaaaatttacaatttttaaattttatacataccaaattcttattaatttatggcatttttgggtgaactatagtcaaggccccattaaaaaatggcacaaattatataccaatcgattcgtctcgacgagctatgcacgaaaaagtaggtctccagtttcttttatatttgatttttttcctttttttgtgactgaccggtttaaaacagttttaacgattttgaggacccataacttttgtcaacttcttttttgtctaaaaattctttcggattcgtgcttttcatgctgagaggaaccctttggtatctattttatcgcatttccatgcgttttaagtcagtggacggttcagtaccaaaggtatttggccacttcagtcccgggtctgtaactcatcagggaatggtcgcccccgaaaaattccttcggattcattcattatagaccgagagaagtcgaatgacatatcatttatatagaaattcaattacttcagtattcttcacttttaccaaaaatttcaaaaggctaaaaaaatctgaataataagaaagaacgcacagaacccaagagactaaccagtaagccacgtgagcaaccaaatgagtagggttggtaattatatgcacatgcatatttttttcctagactgtgggaggcatgaaacgcacgaaaaacatgtttttagcttggtttgaagcttctaggacgtatttccatatgcatatttgtgcatatttcgcgatttatgtgaagatttgcatatttgtgcatattttggcatttcgccttgggggagtgtgcatattttggcgttttt

SEQ ID NO: 13520 - DNA, 2577 bp, Heterodera glycines
  unsure (1)..(2577): unsure at all n locations
aattttcagtaaaaaaaacttgttatctgaatatttaccatcaaaatttaagaccatttccaaagaggaaggaacaaaaatttttgcctaaattttatattatattgttgaattgtttgaaatgcatctgttgtctgccgttttgaaatttttcaacttttcgcgaaaagatttcccagaaaatgcatgggacaaataaaaattaaacttctattatgatcaatttaaatttcctatcagtttcgggtttgctttaaacacgctggcctatgaaaaaatggagttttatggatgtcaaattttgggacttttcttcgacgtggccatcagcgggttgtttcgtgacaaaaacaaaccagtttgatgctattcgaatgagctagacgcgctctacattttcaaatgtatcaacaaagggtctaccgccactccctggcgagatatggcctgtcaaagcagaacggggccaataaatttgaatttttgttaatcttcggcagttgcctttatttcgagcctactctacttgtgcatcttttcccaatatggcactgcttccgaattattgaactgtttcacgactgattgttgagataatttttttttccgattcctttatctccaagcatgagccttataagtgattgttcatatccttctcttgaaaaaaattgtcactaaaaaacacgttttctgaatattaacaacaaaaatttttagacagtttctaaagaggaaggaaaaaaatttttcatttgcctaatatttatttatactgttgaactgttggaaatgcagctgatgccgtcggaaaagctccgattttttggggaagtttttttctttcagtttcaccactgattgttgaggcaatttttttcgccaatttcttttgtttacaaacattatttattgcgtttcatcctgtagtgtgtaaaaaattttcagtaaaaaaacttgttatctgaatatttacaagcaaaatttaagaccatttccaaagaggaaggaacaaaaatttttgcctaaattttatattatattgttgaattgtttgaaatgcatctgttgtctgccgttttgaaatttttcaacttttcgcgaaaagatttcccagaaaatgcatgggacaaataaaaattaaacttctattatgatcaatttaaatttcctatcagtttcgggtttgctttaaacacgctagtagtatatgacccctaaaggttgcgggttggttgcgggtgtttcccgcacgagcccgtgcctatgggaggggtgcagccctttgaagttgccgccccatcaaaaatccacgatgggggggtgtttcaaaaccaaaacctattggaccactttgaagttgccgcctgaccaaatccgatttcccaaattgttgcgggtgtttttttcccgcgccgcgcagcgccgcgggaaggtcatcaatcatccacctgtcaccaaagtgacaggtggaggaaattcaatttaacttttgcaaattttaatcttttgtttcaaaaccttttagcgttttattttctcaatcctgaaattttttttatgatgattttttgatcctgaaattaaaaattctttttgaaaattagccaaaatcgtgaggtttttttcatttccactcactccctgccgatgcgccgcgatgccgagtcgcgcgcaaaaaaaaaaatcgataacggaatttggaagaagtgcaaattaattgatattggcagcaaataattttgattatgaattggacaataaaattactatttaaatccaatttaaaagtaaaatcaaagaatgaataaataaattaaaaaactttttcaaaagtaggtcacctgtcaactaaaaattgattgatgggttttttatttttcttcccttatttctcaatctgcacgtgactttttgttcaaattatttcgcaatatctcccctaaattaggtcaactgtcaataaaatgtgattgattggtttcttatttaaatgtctccattatttttgggtccaactatttcgcaatatggcccgtaattttgcaaacctgtcaaaaaaaaatgattgatgactttcgaaataaggaatatccaaacgatttttgcacggtttttgaataaaatgagacagctgtctaccgaaatgattgatgaccccctaaattaaggcaaccccagacagtcatgtgactagacccctcccctctcgcccaatccgtacacccgggccaaatcgcaaatcattcaactaaatagttggatttcattaaactctcttcacgctctaattttatttctctccgctctatttttatttgcattaattaaatcttctattanattcccgtctttttcttttcaaatctctgctctctttaattcttctgtttcaatttcttgttttaaaatgtcttttaaacgcgtgaactccttccaacccgacgtgccaatggccaaaaaatgggatttccgatcaatcgggtaagtgattttaataaataaataaaaaatatttctaaacaatataatacattatagatataccccttgaattatttcaaaaaaaattttttt

SEQ ID NO: 13521 - DNA, 1701 bp, Heterodera glycines
aattttgaaaatgcccgtgcgctctgggaaaaattatataaggagaaggatttaaaatttcgaaaaagaaaaaatttaaaatcggtgatatcgtcgtataccaagggaaaagggaaaatctcaaaggggtacctcccaaactttaccgaagaattgtttaaaatcgttgttgccaattcgacgacacccgattcatacaggatcgaagatttggaaggaaatttaataaaaggcatattttataaccaggaattagtgaaaacagatggatgatttttacattgtactaccttcgaacacaccagggcaggagaacactacgtcaaaattcacagttcgactccccgagactttggaattgggcacaaattggtcagtagctcagctctctcatcaattatttacccctactcattcaccgcactcggtataaacggtcaagagtttattaaagtatgggaaaacgacatcagtgtccctactcaagtttatttaccggacatgaattttaaaaccgccgggggcctgggaaataaaattaatgaggcattcacacatcattacaaaatcaaaaaacaacgtggaaagagagaagccaaggctgaagataccaaagattcaaaaattgatgtcgcaaagagggccgcagaacgcgccgggagagacgtagaaagacattttaatcagatcaacaatatatcgaattccatccaaacccaactaaacacactacgagaaacaaatcctcaaattttagaagagcctgatataaaaatttggtttgacaaaatggttgagatgggaaccgaaattcaaacatcccgaaatgaacttaaatcttttcaagaagaagtagataaagccaaaaacataacattggagcatgtggaaaagaatgacttgaaaaaagcaaagaaatcagccgacgtcgcaaagggaatcgccagacaggcaaagaccaaatatacatcaactctcgaggaatataatgataaatcggaaaagggttttagcgggatggtggttaggcttaacgaggcgctcggtgagcattttaaacataaggaaattgaaaataaagaagtttcagaagctgaaaaagggccgcaaaaaagagagagattagccaatgaggatgttcaatttaactacgacagtattgatcaaaaatttattgtctatctttcctctgccgtcacccatatagatttgtcaaaacacctcgcatatgttctggggtttaagaatacaaggctatttcacgcggaagaggcgacttatatgccggatttgacgggaggtgtaaggcagctatacatttatgcaccaaatttaatcgaaaacacaattatcggcaaccagatggccccactcttaagaatagttaacgtcgtcgatgacccgggatcaattagtgaagttatatatagcaccgagtattttcatcgtctacagtcgaaacgaatttcagaaattacaattgaaattcacacaccatttggtgaattcgttaaatttcactggggaagttgtattcttacattacattttaagaaaagtatattttaaaaaatgacacatgtgtttttcgatcccgagtcggtcgattggtcatcttttatcactccccaacatggaagaggacagaaacaatattttgtcaaaagcaagtatcaacggggattcggtttcctcggtaat

SEQ ID NO: 13522 - DNA, 1028 bp, Heterodera glycines
ggaggaggacaaagttgggaagggaaagcaaaacgaaaagtgaaattataccccggcgggggaggagaagcaaattgggattgaaaatggagaaagtgccgaaaggcattggcaacacattatgtaattaccaagaaaggaaatgcaattggcaaatttgaatggcatttaatagggcgcaaatgacaggtaaaattcacaaaacaattttaattaccaattatttcaaatgaaaaatcgcaacattttccaaaacgatgcgattttcgtttttgatctgctgatgaaaattgcgcatataaaatacccttgtcgattgctgataatcgcgcaaaaaagtcttgcgaaaagcgagacgatattcggtgctaaaaagagatgatgaaaccaagaatgcctaattagcattggcattggcacctgcaggcacaaagcaccggcgcactgcttgtgtaagcgaacacaaaaatggcacagcaaatgggcgaagcgacaaattcgttggcattggcactgagcaaaggtgcgacgaagacaatgaagagggcattctgaaaaggaatgatgggaaatgccaaagcaagccacggactaccccaatgtagcagaagaagccaatggacatgatcacactcagttaaagcatcagacgccgtccattttcagacactgaacttgccgactcaattagtaccactaattacctaattagagactaattaggtgcagtgccccactcactctgcgctttgcgccaccaactgatcacccaaatcagcacatagcagcaaaactccccgaaataaatgcacaaattcagtgtattgaagtagtaattgttctccgggtgccgtgccgggttgccgagtcggcacatcacaggcctaaaatggagagatgccaaactagggcagaccagattatccataatcagcaatattcgcacatttccaattgctttggcaccaacaagtaaaagttgcacacatcgaaaggcgtcaaaagacaacaaagtgccaacagccatt

SEQ ID NO: 13523 - DNA, 1319 bp, Heterodera glycines
gatttcgatgaaaccaaaaatcaagaaaaatggcaacgaattgaaggtgccaagattgtcttcatattcattttccagcagatttgcaactgcttattcttcataatctccagtttcagatttttgctgccttttccaattgatccgttgctaccatggcattttgcttggcattttcgcaaaaatttttcatttttcgttcaaattcaattcgaagtttagcaatttttgtttccgttccatttgttgatgcattttcaccacttttgttctctttaatttcataatttaattcctcttcatttaccaaatccatctcccaaataacactggtaaacaaaaatttattttgatcattttgccaaaatttgcaaatatcattcagcattgtgacaacatcaattaaactacaataaaaatattgttcaataaatattggcttcatcaatggtggcaattgtttcaaaactgtaaggtttttagcttaacaaatttgcatcactagggatatgatttttaggggtgtattttcaggaattttggctggtcgattcttaggagtttatttatcgtttttattgcattttttgttaataattttgggcaaaacgccaaaataggtttttaaattttttttaaagttttgtgtcataaatagggctgggatttttatgtgctaaaaatcctgaaatatgtaataaaatatgtgccaaaaaaacccaaaatatgtgctaaaaaccaaaaaaaaggcctaaatatgtgttaaaaatgcaaaaatatgtgctaaaaattggaaaaaccaagtgtatttacgcaaaaaaaaaatcatatttaatatcagtctttatcaattttcgcccgaccgccagtcaaaattttggcgatatcaatcaacttgtaaagtcccggattaatttttccatcagttgaataagttccttccgggaactttgaaatccagtgacgatttaacacagcgtttgatttggctgctttaggcatttaaatatataaagaaattttctaaattcttaagaaacgtaaagtagtcaatttttagggtgcattttcagattttcttgtatttttcttacgatttttctcaaaaatgcccaaatatgtgctaaaaaatccaaaatagcccaaatatgtgcgatatgcttttatgtgccaaaacgccaaaatatgtgtttttatgtttttataagtcgctctaaatcaaaaattgttcggagaaaatgctatttttgggcttctctcgccaaaactaagctgcaaaaaaatatgttaaaacagaaaaatcccagccctagtcataa

SEQ ID NO: 13524 - DNA, 889 bp, Heterodera glycines
  unsure (1)..(889): unsure at all n locations
tgctgcacagttctctcaagcaccaatccaaatttgtcacccctcccccctcccattctcgtccccctttggcgctgatcggatcggtcagcagcatcagacccatcaaaaagaacggcaaaaaagggtgcgcttccctttacaacaagcgaacggagtgagcagaaagcgaaagggacgagagcggtgaagaggagcgggaaccaatcccgcctcagcttggcccaccccaacccccaagcgcgcggcgcaaataaaagattggcgacacaatggatcagaagaaaacggccgatatcgtccatccatttgaacgtcaattgttcatgagtcaattcgtttggtcagatcgaagggcacaacggtgtcagcaaaagacggcggaaagcgaatgacagcgatgaaattgacaggagatgaagccgaggcaaaagcctaaaatgatggaaacagttaaaaatttaaaaccattccctgagttgaaatataatagaccaaaaataaaaccattaaaattccacaatttgaatgccgtccaaaatatttttgtcagcgaacctcaatactaaaatgccaaataaaatcaatagtaacaaccgctttaaaggcatgaattgaaacgcgaagcaatggacattcgtcgagaattgacgggacgtaatgtcgcaaacggcggaaaattgcaaggcacaaattttagtcgcgatcaatggccaaatgttgcgcaaaatggactccaaagtatggtcactggtcgtatagacttcgacgatggccaaattaattggagaggcggcgaaaattggatgaaaacgatggagaaaagcgatggcattgttcaaatttgggccanatttccaaggaattaatcgcccagcgccgcgtcttg

SEQ ID NO: 13525 - DNA, 3047 bp, Heterodera glycines
ggcaaaccaaggttttaatataattaaaacaattaaataatctttaaataaaaattatagaagtatttaaatatgaacttgagctgctggattcatcctcaaatttgcttagccaagtttaaaagggaaaatttggtgccaattcggccattgaatgggtgcagaaaaatgcgattgccattttgtgcaacgaagcatttgaattaaatatggatgaaaaaaatatgcaaaagcttttctgtgactcattgaaaaatggaaatattacaaatgacaaaaattgagaagaaaacatttgacaaaagccaaattgaaaaagccttagcaaaagaccaaattctcaatgccaacaacaagacaatgtttaaagtattccagcaaaattcttgaaattaaagaaaatttaagtgaaggtaaactatttgaaatttattaatttctgtaagtttaacgacatttctttcgtaaaatctgcatttaaattaaaaacctaataaaaaaaacgttgtttcaaaaaaatgtgagcaaaaatgatttttccttgtatttaaaaaagtgattttaaaaaaaaattttaaagattttattttagtctgcacatacttaggttttttataagcgtaataaaacggaaataaataatgtttttattacataaaaaatcagcaaaagaaagcaaccataacattcataaagaaaaaagttttattttggataagattcccatcttttatgcaatttcagcacattgaccaatcattgccctttttcgtgcatttttttggcacattgatcaatcatcttgcctgttgaatgcctgatctactttaagtgccataattattaattattaaccctacacaaatttatttttcaactcaattcctgggtttattttaggatggtgtccagtcttccggtgtccaattttctggtgtccaatttaacccggtcctccttgaaatgttcgtcgacgtaaaagtcaaatcggtggctaatcagcgaaattccgagtccaagctgacgaggcggcagaaaaatcgaacacagaaagccaactcggcggagataaagctgaaaaaagaaaaaaagaatttaaaattggcatttttggcgctagttgcaaagctactgttttgaaaatttttttcactttttttggtctaaaattttttttgtttattttgatacagaatgatgaacattaagcattaacagcacaattatggcgaataaaagtatattcacgagtttttatcaaagaaaattttgcaaaacaaaagggtcccccctttgccatacttttgttcactgtctgtatgttttatgtgtattgtcatcagccaccaattattgtatatacatatgatgtatcgggcaataaactttgaaattgtcttgctctttctaattatggattttggtgtcacccccccccccccaatttccgaagaattcgaacaaccaagacagaaaaattcgttttttagcgctacaaaatcggacccgaaatgggtagactttttgctcgtctaatcgcattaattcggattcccccgtgccgaaaatcgttcaaatcatatgtttattgacttgaaaatccaaatggaagtaactttttataaatcaaatgaaaaacaatcaaaaatacgaaaaactgtaattcgtgccccccccccccccctaaagcggaacacagaaaatgcaactgaatttctctcccttaaaggtggccatattacatccgatcagtggtggccgaaaattcacaaattttgatgaccaattaaatgctttatcccctctcccccattcaattgtcttttaaacatcctcactttcttggaccataattttcattttcatcgttttttcgaattgataccaaaatctgttctttttcgagcatcaaaaaaggttatggtccaagaatctgaggatgttcacagttgattggaatcataaaatgtaggaaaaataaaacaattttcgattgtattgttttcttggaagtgcattcgagcgccgcagagttctgaaattctcggaaacattttcaaatttttgcctacatctgcccttgtcccggtttaagttggcatctctctcagcagcagccgatgacgggacaacgataaaatttgccaaaatttgttgtctgtccctttacaaatcccgcaaataacacgtcatcgtcatcctgctaaatttgacttaattaaattacccaaatcattaaatgctttcttctcacccaaatcaatgagtcatcaaattttgatctccaaattattttatgtgcgtcttcacttatttcatttgcactccatggaccgttttctttggccctttgttccgcctttttaaacattttctttaaatttcgatcaaaaattattcggttaataatttcttccacaatttcatccgattggccatcattcgctgtgtaaattgccaactttaaaatgggttcgttaattggcatttcttcctgctcattatcattaccaaatgcgttcaacaattttggttcaaattcattaataaaatgtttgttactgaacaaattgtttaatttgtattgataaagattgctaataaatggatttaaataaaagcgcaaaactttggccaacgaatgcaaaacgtaaataattgatggttcttccatttcaaattggtatcttttaagcatgaattttggcttcactgtgttgtgaccggcgaattctctaaacaaatattcgtacaaaatccccaaatatttgcgatatttttggcattctgtccgttcatattgttcaaatctcttccctattttggcacattgcaaattctttcccataaaatacacagtgccaaggtaagcttcatatttttgcgtggaatatttactaatttgtgtttgttgatgacatttcataaaagcaattaacatattgtcgtccatctaattaaaatagaccaattaattaaataccctaacatttggtcgacaagtaaaaactcaccgatggatttgcatgtgaaattggaataaagaa

SEQ ID NO: 13526 - DNA, 1054 bp, Heterodera glycines
tttttcgatgaccccaaacagcaaaagttcaattttttcgtttttgttatttgacagaattcaatccatgtcggatttttaaaacattttcaattgggaacaaaatccttttttaccaagctgtgcaatgcgcttttgctccccaatgcttttcagctgttgatcactgactgacggcgaattgacagtgtccattttacgcacaaaaattgcagacaattgttttaaacaacaacaaaaatgaaaaaacaaaacaagtaaacaaagaaacaaacaaatgaagtaaatgttgtttaatgaaacagaattaagcaagcaacggaacaaaacaaacggcgccaaatattttttatcattgatttttatgatggtaaaaacaaatcaaatgaaattttggaaattttgtcaaaccaaaaaatggaaatagtgtgacgtgcgattgattgattgattatttgacaaaataaatgataatgatgagccgtcaaaaaaagagagagaaaaataggggtaaagagaggattcaacaaaaataaataacatattttaggaaaattggagggggagggggcggctttataagatttccaagccaaaattcatccttttcgaccatcatcaatcaccacaaccacaacaacaacactcatcgtcggcgaccaccgttattgtaacgctggtgatggtcgtcgtcccggctacggcggtggcgatcaccgcccccacgtggcggcggcgacggtgaggcagagcgacggcgacgtgaccgcgagcgggtgcgacgtcgacgcggagagcgggaacggtcacggccacgtgacgagcgacgcggtgagcgggaacggtcacgcgatgagcgacgcgtacgggacggcgtacggcgacgtcttaaatggccaaattaagtattaattgggacacaatttgtgtcaactacgctccacaaccccgctacataggtaagtaatttagaacatgatgccgtcaaagtaaaaatcagaaatttcctccggtggcggtcccccccccccctccccattttccccgaattttt

SEQ ID NO: 13527 - DNA, 934 bp, Heterodera glycines
accgatcacgactcagctgtggctcaccaccgtcggagatgacgtttcgcaagagtctcggccccacgtggcggcggtgaaggtgagacagagcgacggcgacgcgaccgggcacgactcagctgcgtctcaaccgccgtctgaggtggcgattgcgcaagaggttcggcactaagtggcggcggcgagggcgagacagagcgacgcgaccgcgagcgggcacgactcagctgcggctccaccaccgtcgtaagtgccggttgcgcaagaagttcggccccgcgtggcggcggcgatggcgagacacggcgatgcgaccgcgagcggctgcgacgtcgacgcggagagcgggaacggtcccgggacatgcgacgcggagagcggtcacgtgacgagcgacgagtacgggacggtgtgcggcgacgtctaaaagagcggcgaattgaattatgtcaattacggtaagcaaaaattatacattagggattttaaatggttttatgggattggaatttaactgtgattcagcattttatttttgtaataaaattttgggtaggtgaaaggaggcaatcaaaataaggcgcccagtgaagctgtatgtgcgtcgccagcaatagatgaactttttgatattgttccctaatttattttttttaggggggggggataacaattcgtttttgacccccatttcattttacacggggattcgttttcactgatgctactagtcatacacacctgcccggagaacgtgaccgatccgtggcgcccctcttgcgcggcggcgatctgctcctgccacggtgctcccgtcgatggtgatgatccaccgccatcgactgatgttgctgctcttcacgaccacgaccaccattttctactgcagtcgtcgttgtttttgaatgctgatgatgtttactgtacgatt

SEQ ID NO: 13528 - DNA, 3531 bp, Heterodera glycines
  unsure (1)..(3531): unsure at all n locations
tacacccctaaggatcgactttttgggaatttaaaaaataaataattaaaaatcgaaaaattttgagcatgttataagaacttttggaaaaaatttgtttatgtaaagatttaattttattttagcatataataaaaattttaaaaattcgaattgcaaaaaataatttagaaaaaaattttttgaaatatccaaaaacgctgctttagcaattgtttaatgtttttaaagtcaattctgattttcaacccaacttttgacattttttgaagggtaaaagccattttttgcagtttttaagttgtagatttgggcatttttcgaaattttaaggcatatttaggatattttaatgctaatttatgcgcatatttgacaacttataacccgaataattaataaaaaatatttccagaaaaatagagaaaatgaacattcattcggcccaggaacccgccaatggatttgatttttttacggattgacatttcggtttttggactgaaaataataaaagcaaaattcagaaaaaccttaagaaaattaatttttctatctaattcttgaagaaattaataattatttagcgaagatatgaacccataaatattgtaaaaaacccaatttgaaatagaagtcaacactttttaaatgtttagtcatttcttgccgcagcccttttttgccatgtcaaaagctttttgccaacatttggtcatgcccaattatgcattggtaaatttcccgcaaaaattcataatcgcgcattatgcggaaatacaacaaattaaatgcctaaaaaaaatgtattttcgattcgcgtttcggtcttgcactaaaccttttttttcttgaaaattttgacttttaatttttttaaccgtaatgcaaattaataggcagctaattatcgcaggcattgaaaaaatatgcttttacttatatactcatttaattcttcgttaattatgaccggaaactacatggacaaatcacaccaacttctatttacgacaatgaaaatacaaaaaaaaggatacggtagacggcgggggccggcgctgcggataggcgccgccggaaaattttgaaaatttgattgtgatttgttaacagattttcaccaaaaaaagacaaaatttttgcgattttggtcaatttgttaagaaaaattgtgcgttattttttggggttgggcggtgccattggcgctgccgggagaaaaattataacttttgacccttttaaacagattttcattgaaaattgtctatttctaggttaaatttagtaaaaattaatgattgttttgacaaaaggccaaaaaatttaatttttttttcataaaatctacatttttacttcatacgcaaaaatgcgattccaagtacaatcttggaaaaaagtacagttaaacttttccaagcacaaaagccgaaatccaagtatgtacttggcattcaagtacgaatccgagccctgaactattataatgcgaaaaatactaatattttaataataaatttaataaatcagatttaagcaattgtttaattcatattcattcattatggattcataatcactgattatttttaatcattttttggcaatttattaattaaagaattggccatccagaaacaaaaagtcacaaaatgaacatttattcggcccaaacttattacaacaacacatcgccagcagaagtgaaaaaggcaatccaaatggaattggattttgttcatcgccttttgctcggcatacaaaatgacaatttgtgggcaatcgaagcgaggcgaattcaaaattttgtaatttttgtgaaagcgccatattatccagttgcaaaaaagttattgccagatatgcacaaaaaagcgactttggaaaacttttacggacaagtttaatcttgattttcagtttggaaagagagaacatttagtggtatcgaatatatcaagattttcaaattgggttggttatgaaaaaatagacactgttaaagtcaaaatgggtcaaaatatgaagctaattttaaagcagaagtcaatcgaatcaatggaaaattggcagcagaacagaactcattatacggagataattgacgaaagctcagagcaacagaacaataattatggacaagggcgatcaaaacgccaattggcaaattgtaaaatatgcggacgacaatgtcagtacattttctacggtgtcaaaagctgtgaaagtgagcagatttgtttcaaaaatgagaaaatgcaataaaatttttaattaatttttttattgttatattaatttaccagattaaatattaattaaattggaattgtcggatattgtaaaatattctttttgaaattgcaggttgtaagcaattctttcgtcgtgtcgtcacaaaacaaattttgttcacttgtccaagacgaaatggagttggaagttgggacaattaatttttgccaaaatcaattaaaatattctgaggctaattagctaataccgctggtactgcaaatcacaataatttttgttttatggaaaaaagcggaacggatttttttttacttttactataaaaatcagttaattatatttatttgaatttattgcctatttcactttttacgaagaattttttccaaaaaataaccgtatagcgggcggtggccttgtccagcttggtatggaggcccaattctgtaattagaaatcgggcactcggcgccaagctcgtcgagtacatgcaatagttaagtccggttggtggcgactcgccccgatgtttgtccccggccgttccggcatgctttgcaccgcgacactgcggcgccgttcgttgtcttgtttcccgcttagatgacccagtcgtcattggctccggaattacgcactggtattgctgaacctgctgcacaaggtccacacagatttgaagaagttgtttggtgatcgaatcggcacagttgttgaccatttgttgggaaatcgcctcaagttggtcattgagaatggtgtagtgatagtctgaagtgggcttctttgaggcgttgtctgatagggtagaaagatgtgtagaaggacgttttccaaactccatgagaatttttgaataataataattttttgaataaatacaatttttgaattatgacaaatattactgccatttttgaccatcatttattgtgtgcaactaattccaacacaactttgctatgcatcttccaatttgtttgttcatcaaaatatgtaacacaaaatctttgaactaattggtttaacgcaatttacatgcatggtcaacaattccatcacattaaattatatggccgaaattctgcataaaatacacgtgaataagcaataaaaattgtcaaatggaaaaaatgaataaaaatttanattttgaaattntaatnncgttgtctanatcactgacaantctgcagggcattaagaaataatggcgcgagttnaaatcgacagattttgatttttataaaaactaaggggagccttttt

SEQ ID NO: 13529 - DNA, 897 bp, Heterodera glycines
  unsure (1)..(897): unsure at all n locations
cactaactatttttgaataaatntaatccgtaagaatttatccattatgtcatgtgataaaacgcaatttntaaattaatttaacaggaatcgcttcatcattaaattatttcattaaccgctccaattgacagtggtgctggtgtcatcgtttttccatttctaagattaataaatttgaaaaattaaatgaaatcgcagtttttttaatcaaagttttattacataataagcattttaaaacatacatttgtcctccatttccgttctaaaaaatttaattttttatatcatatgtttgcaaaatattaataataacttaatatatgattataataaaaaaaacattttgagcacaaaattagacacatctctgtttagaaaattcaataacaaactagagcgtgaaaattttttctggtattaatgaaaatggcaattataaaaagcagaaaaatctttatgaaattgaacgatggttcaaagcaagggcgtagacagacccgtggcttcaggggggcgggggggggggggtggctgaattcaaaaaattcgatttttaggggtgtatttttcttttttcttcaagaatgccattcttgggtgtgtattttttcagagattcagaattaattgtttcaaaaaatttgccattttttctttaaaaaattttattttttgctaagtagggcccgggaattgccatccgcttcacaaaataaatttcgcactaaattttgggctgaattttgtggtgaacacattttttggctacatcatctaaattttggggaacttttataacacattttttcagggattactgtctgacctattatacttggtcgcatactgttttttaattaatgtatattttatagttttacaaantttggt

SEQ ID NO: 13530 - DNA, 2075 bp, Heterodera glycines
ttggaagtggcgggcaatttgtccgataccatccccacttaatgccatttaagggattgatgactgggtttaatgggtgggaaaatggcattgaattcaattaacaaaattatgattgatttcatcaaatttgatgtattcaaatgccattttcccttttgccgagtgatttacgaatgagtgccaatgacaaaagtgacgtcactccaagactgacctaaactcaaataatttaatcaactgacaattctttctggcatgccttctccgtattttctccagtggtcgaatggggcgtgaaaaagccgaccaccgtaatggtggtgatcagtgccgacggcatgatcagcgtgaacaggtagtaggaagggtttcgtttgatggagaagtaatagcaaatgtccgggtaagggttggggcaacaatcgtaccatctcaaaacgtggcaattccaatcaaaatgataagatttgtaaaattttcaaaccttctgaacgctttaatgtccccttttataggtttaacacaaaatataaattaggcaaaaaatttattccctttgcggggagggctacaaaattgtggaatcaacttgataaagaaatcattaaaataaattctttaaatcaatttaaaactaaaattaaactccttaacgatactcgaggtcgacttaatctatgacatgtccgcagagtaagtggattactcccttttgtggacttttttcttttttttgcataaataaattatcgctaactaattaagcatcgattgctcttttttgcctgacttgaggttggaccgtgtccggaagtcgatcagagtccattccatgttcggaatgtaatgggtcagtgaggtgctttgcatgaatgacggtcgccttgtgctttttggtccgccggcgggggaagaagcgcgctgcactttgttgaacttccgctcgaccaccgatgtgttcatgctgctccgattgaggcccatccaaaggcccgggtcctcctccgccgggcggagcatcacctgcgagtgatcagttttcgctattcccctcctttgatttgggttaccgatcaatttgactttaaattgttaaaatatttgttttaattttcctaggctttccaatgaaacacttttactcaaaaacccattttcaatgttaataaattcccaattgcataactttttatgctgatcaaaaaagacatttcatcaacctggacaggtctacttcaaaaaatgatcatgaaatcgggaaaaattttgacaaaaatttgaaggggcctggaaatttcgtgtgaataaaagaaattttaaagattttgtcataacgaactgattattttggcataatactaaatttatctatcggtgtcttttatattccatggtgtccatgaccaattttgcggcggggtcctgtcaccccctgcccattccccccccccccccctccacctgagagccgtcgtaactccacgaggccagcatcagatggcagatctgctgatcaaatggaaaccgatgcttaaggacagatgggtttgtttgtccggaccatatggcggtgattgacccagaccaagttcaggtggcaagtgatgtcggtgataatggcacggaaaagcgacacgcggccgtcgtgctgcaccagcgcattggtcatcatctcactctcgcgcacgttcatgttggcactttgtgcaagtgagaattacaattcaaaaaaaccaaaatgcgagtaatcaccaaggtaagtgggcaattagtctatgaattagattggactcggattgaaccgggtccctatggaaggtgattagttaatgggctaatctggtcagtcgtcggtctgaattgatgccgatccgactgagcaattttataaagacccaattaacaatcaaccaatgaaaggggaagctgaacttgttgtatacgagcagatcgggccgccagatcatttcggcgggaacgtgaagctggcggatgtcgccgaattttgacggttcccagcgaaggaattcgtcttgccaatacttcaatttttgcgtaagcaaattaaaatt

SEQ ID NO: 13531 - DNA, 1479 bp, Heterodera glycines
ttttaattaaaaaatatatgcttataaattactggtttataaaatatcttaatttagcggggtttaagaaggcattttagtttattgcactgcatttttggagttctcatgaatggttttcttatcaataacaaataatttatttgtttgacctccgtttctcgaccggcccaaaaaagagtgaccatgccagtcatacctattactgaaaatatttttgaattgctgtgaaaaatgtcttctggttctaccccctccccgccctccaccgtctgttctgtgtccccctcccttttttgtgtgccgtccgccactttctcacaacggtgccaaaaatgtcatggcacactcaaactattggcatttttaaataattaataaaagaaaacttgttaatggatttgaaaaaatgccatttccgagttggcgaactggggggggggggggggggaactgcttaactctgcggttggcaagcaaataaatatgaaaattaaaaacgtgccaatgagtttggcttcgcgagactgaccaatgctatgcaaaccatactttagccatgttttctggttttcttctgaaaaagtcaatcgaacttccactcaaaagggaaggaataaataatagaactatttttctttgttttttccgatttttacaatttgattgtgacactgtatgaacagacgaaatgagcaataatctttttgtctcgaacatgatcagaatttctcttattaagtgacgtttcctgttaacgattgctttgtctcccctctgactctgtgctctcccggtctgtcaacgcgtcgtccgccggcggcattttcagagggacaagtcgacggtagaagaacaaccaaaggacgatcatcaacacaatttcgcccatttccaccagccaaatgacacgagggccattgttagtgtacataaagctgaaagtattagaaatgggattgagaattcaatggcgcgttaaagcatttatttatccgactcaaaactgatcaatgtaatcagattcaagactctcgactaccccccgccctccccgtccaacccgatgagtagcgggcccaacattcgtccaaaaccgccgaacatctccagcattccctgctgcttggattgcattcggggcccaatgatatgcgagaaaagtgtgttcatcgttatgttgatgtttgagaaggctattcctatgcaagagctgatggcaatctgtctagggaaaggaattttcttaattttttttctaaatattccaatttctgaaaattatgcacattaattttgtgtcaagttttttcggattattatcttctaaacttacgtaataaatccagatattgacgcgggtcatatctgcacaccaattcaattggctgatatcgcaacccttcgaggaattaactgaaatcgaaaaattacgggtataattaaaaccttctaatggccccaaatgatgctaaccta

SEQ ID NO: 13532 - DNA, 1770 bp, Heterodera glycines
ttgccgggccgggtttgaatcatgttacatctttttcgccacccacacaaaacggagacaaagccggtatttcaaacgaaatttctataaaattatttattacttaattttcgtagaaatttttttcaataattttctagaagtatgtgggatgtttggcagtgtgaaccaaatttttttttgtagaattcgtaagaaaatttgaactatacaaaatgaaatgatccataataaaaaaatgtttagcatgggtgttttttcaaaaaaatgaacgcggatccgacttgtcctccacaaaaatataataaaaattaagcctcagacaaaaactatacatttaatgcacttgggagtgcgtggtgggttgaccgacgaaaaatgcaaatttggcgaccgacgaaaaatgcaaatttggcgaccgacgaaaagtgcaaaatttgctaaaattttgactaaatcaactcataactttgcatagacgcattttggtatcgtacgatagccttgaattgcgctattagcttgcaaatttaaaaaatttttatcatgtttttcaaaagttatgacaatttttccggttttttgactttaacctaagcttttgcggacctttcacccaatttgtaaaatggtcggaaggaacgaatcagtgaattgaattggagaagcagcaattttataacgcccaacggcagcagcaaagggcgcatcaacagcaaatacccagcaaaaagtgatggtactgaattcaggagtctttttgtgtcggaattccgtgaattttttggcttacgggatttcagacaaattggaaaattttggggaaagtatgaaattttcccaaaaaaaaattggctcaatttgctgttccaaaattataagtacagaattatttaagacatttttttgtgcacttgataaaatttgaaattcatgctatgtaatacaactttcaatgctgattaaaaagtaaattgcatcatcctgatcagaacactacctccggagcaatcggtgtgattaaaatgttagcatgcccagcggagttgggtctgctctagcaactttctaacatactaaagcggtttacctcagttgggccggcacggttgggcacaacatatatttttccactgtaactttctctaacttttttctttgacatacaaatccaacatagttggtatcattcgaaagcttaatctatttagaaacattttctgaagagctttcgaattcattttgtgagattctgagcatgaaaaatcgaagttgatttttttgcggcactttttccaaaaaactttgggaattgggggggggggggcggggcggcggagccgataggaaactgttggacggatgagtttgccgcctttggccgtgaagtaatacttggccatcttctgcgagctttggttgtacgacggtaccaattcgagcgctttgctgaaagccgagccgccgacgccggccatcagcgaagtgatcaggtcggggggcaccgcgtttttgtccagcaaagcatcgatcacatccttctgcaatgtcgaattactacccgatcgctctatgatttgtctctgttttccatttcgtccccaatttcggcaccttcagagtgctcagtcgctcggttatcgtctgcggaagttccacgcccattgcggaagaacagtccgtcatcgactgaaggagccagcgtcggaatgttcggctgaaaacaaatgaccgcgctcattttcctacggtgactaactactatctctc

SEQ ID NO: 13533 - DNA, 2181 bp, Heterodera glycines
  unsure (1)..(2181): unsure at all n locations
attgacctatcaaaaagccacaaaattaggatacatcctcagatctgtctaccttgattttgacccctgttgcttttgctgctcccacagcactttcagctcccacaactatttttgacagccattacatgcaggctggaagaattcttcgcagtaatattcctgttttaatttgcttatattaaaaaaagtccaaaaaaccaaatcataattaatgagaaaagcataaaaaaccataaaatgatcaatcagctttaatgaatttcttcatcagagagttgtcaaatcgaatttgaaattgggcccaaagtttgcctcaatttggtcattagacgagcacaaagaaacgaatggatgtaaagaatcatcagcaaaagatgaaacaacgaaaaatttggagaaatctgtgaaaaagttaatgacaattgaataaattactatttatttatttatttgcccacccaaacgaagtccatttttggtgaaaaagatttgccgattggacgaattgaagccaattcctacggtatcaccagcaccgtatgaatattgggcatttctttcctttacttcttcgttaatccaaatatcgccataacagtcatatgcataataagtgccctttttaatcatcaattccaattttgtctgctgtttgacggcgaatccaaagacgacccaactgaaaaataaataataaaggaataattattaaaataataattatatttttaaattttactgaaaaagtttaaaaatcttacaatttcttatttttaattgaaatttcatagtaaaaaatgtcggacgaattattgttgaggaaaatcggatatttagcgaagacggaacaacaaccttttaaagagaaatataatattaagtaaattataaaaaaataccatattcatttcccttatgatggacagtcaaatttttttcgccaatgattttgagattaccataacaaacattggtagcccaataattttgtcggaaatttaaaagtgccttaaaaaattcaaacaaaattattttgattaaatgcataaatacccaattaatgaaaatataaaaataaatatatttttaccccttaatttactttctctaattcattgacgttttccaatcgagtcatttgatcaatttgcaccattgataattggtccaaagttgctaaattaattttaaaatttaaaaggataatttaattaaataaaaattcactactataataatatcctctaaaaaattctttaaaattgaaatttcttcgtcgttacattcactcacctttgttgttcatgtttttgttctactgctgtttttgcttcttctcaaattcacttattttttccaacatttttgacaattgattcttagtagcttaaaaatcgaatcaatttttaaatttaaatataattatttaatattgacaaattttattttcgttttaatttctcctcgccttttgactgttctttttgctttttttccaattcattgactttttccaaaagtttcttctgatcattttgtaattgtgagaatcgttcctcagcagcagcttaaaaagtcaaattatttattttaaatgaatgactctcgaggaactaacaaataagcatgaaaaaatagttttccagttggtatcattcgaaagtttgtgcttagttgccccaaatttttgtcagggtttgatgcttaccttcgtttgttggcatttcactttcttctttcttttgcccacattcgtcgtccagatgaaactcattatcatctgatcctgaaaatattttaaaatattaagtttttgacattctttaaaaagttcaccccaaaggtttttcttggtaaaaatttttggttaaaaatttttcttattcgaaaactttaaaatatttaactaatttcgttacaattgaaatatttaagttttacatgttttttttttacctaaaaagcgttaataaaaattttatgctttatttaaaaatatttatgactatttaacagtataattttgatactgtatccttcaatttcctaccgtttccgtcttgtccaaacaaatcagcagaacttgcgattgatggttcaattgtgttagctcgattcagctcagcaattctggcaattagaacactcatttcctccganagtgctcagatttgngaa

SEQ ID NO: 13534 - DNA, 3113 bp, Heterodera glycines
  unsure (1)..(3113): unsure at all n locations
gtgcagtttacgtatgatcacntcgtcggttgtgaacatgtgaagatttaattaatatgtaatttatttctacatataaatttttgcaatatttccccttttttcatatgactttaacattgtaaaaccaaaaaatttcaataaaaataagatgtttaattatttattcttggttaacctccaattcacacgcagctgttcttcacatggattatattttaattagtttttgaatttagaaatgaattttaatttgtaataaatatattaagatttaaaatatatatttttatattttcttcttttagacatataaatttaaatttattttcattttattattattttttgttcttctgacgatttttatattgctgaaatcttaaaaagtttatttattttttctcatatatttaaattattaaaaattcgaaatattactcaatttttttatataatcctgggcaggattatttaaattttctcatttcgtttaattataataaaaaggaacaccaaaacattttttagataaaattatttaattaataaattttccttcatcaaatacatgctataataatataatttttttgttcaaaatataagaaattttattttacatctgaaactgtcatttcctaactatattttaaagtttacgtatataattatttttaattttctaacaattaattttaaatgtttatgatccttttgattaactttttactattttgttctaaggccataaatattatttttaagtaggaaatatgtaactaaaagcgcgagttattaaaattttaatttctcaattttcgtaattatatgtaaatatgaattcatttttgtataaaaaatttaataactttaaaaaaataaaatattttttttattatttcatttctttttttaatagatattaattatatcatattttcattatatctttgattaatggttgaaaataaattgtatttatttattatttaatcaattttattttccatttcgaaatatacatattttaattttgagtaaagaattatttcatttaattttcttgtaaaaatttattctcataaatgcatttttattcaagtaggtaattagtttataatttgttgctttatcgtgacgtctttctaaataataattttgctcaattttaatctattactacttaagataaaaaattatagtattcgatttttgaaacattgtttttttattttattatgtaattaacttcataaaaaagtgaatatttttattttttagattataatgaattcgtttaacacaacgatttttattaatgataatgtaaatttatttattgctaaaacattcagctccaaatattttatgataaataaattcctaatatcagaaccatgcaaattttttcttaaaccatttagtttccaaaatgcattttgttttttatcttcaaaaaaccgtggtaaggaggtggcacttttcattgatttaatatatttttattttgtttttttctctcaatattttcttttaactataaattattattttcattttattattttttctttctagtttaaagatttgatgaataattttgagggttaaattattttaattgttagatatgacgagactttttttaatggttaggaaaatagattttggtagtttttggcacatatcttggagatttttaagaaaattttttaaagattggccataaacgatcataaattttcctaaattctttcaattcggattaatcataaaagaaagtagttagagactccattttcaccggattacggtagccccccataggtgtgggaggggtgcatggccaactgagcgccagccatttgagcgccgccaagtgagcgcgggccatttgagcgccagacttttcagtactgaagccaaaacctattgcgcgacttttttttgaaacccaaacctattgcgcgacttttttcttgcaaacccaaacctattgcaggggggtgcgcgacttttttttggtgcgcgactttatgcaaattattttaattaaatttatttaattttaaattattttaaacgtcttaaaggtcaaagacgttgaatttaaattcatttaaaattctccaaaaattccccgcaccaagcggatccgaaccccaggggggcggccagactgacgcactaaccactcggccacattggcaatggataataaacattaatttgctctcataaagggaaaaattacgtcaccagcggcgggagggggcgagagaagcaacaagcagatgagagtggctgtaattaagaacaagagagacacgctgtgaaactggcgagggctaatgtcatgcgaaaggccgttggcaagaggtcaaaaaaaaaaaaaaaattaaatgaccaaatttcgaatttaaaaaaaaaatgttccaaaatgaggggtttattataaattaatatttttaaataatcaaaaaaaaaaaaaaaagatttatataaatattataaattcttgacatttaaatttaatctaatcgagttttttcatttaagcatatatgctgttttttaaatgtattacatttttttaatacttttaaaaatatgttatttaaaaaaaaatcaaaaaaaaaatccaattcttttttattcttttttgtctcaacggtcaccagacaccaaagggccatctgtcacaacttttgaccaaaaagtgagaagggatggcctaaaataaacacttttgaccaaaaagtgagaagggttggcctaaaataaacacttttttaaggggaaagggtatccgaatgtgtattttgcttttttcgccatttacatccaatccaaacaattaaccctttaatattaaaaaaacattttttaaggaaaaacccaccaaaaaaaatttttgtttacagtatggacagcgataacaaggaccgccgggcagtcgttggggttgtataaatagtcaaatatttccattaataataaaattaaataatgtgattaatgaatttacagatgtcatcacattaagtagcgatgaaggcgaaagacataaggaggaagaggtggagctggtcacgctgagcacccgacgc

SEQ ID NO: 13535 - DNA, 1288 bp, Heterodera glycines
aaaagaagaggacaaaaaagcggacgaaaaaggagaagaagggtcggtggatgaggtgaaatacgaagtaccagccaagaagaaaaaaaagtgaaatttgttatgacatttggcatgaaaaaaatgctttgttgtgaaaaataaattgttaagaaaaggaaattgtctgttttatttgtgaaaacatatatatatatatatatatatacatatatatatatatatatatatatatatatatatatatatatataacattgaacaaaattgaaaaaaaaaattttttcagaaatataaatcagtaattttattatattttaattaatgattaatctgtttatcaaagattattatcagggctgtcaaaatttacaaattaagtcgtaaaatatgcacacaaaaaaaacttgaaaattaggggtgcaaaataattaaaaaattttattcctcataaattttatcggttatttttgcaatttcaaatcaaaaatttgtcaagattttcggcaatgatgcacactgttgacacacacgcgcaaccattccgatttgtatttatttttagacataatcattttttccaaagggattttcaaatcggaaaattttgacgaaaaagggcaaaatatgcaaaaaacctgaaaatattggtaaaatatgcatgaaatatgcagaaaaaaacatgcataaacccaaaaataggcaaataaaagtcccgatttttatgcgcaaataccaaaaagatgtttttcctattaaataccctacggagaacccaggagaaaaaatgcatttgcatattttgacagccttgatgattatattattttgaattttgcaaaaaaaaaaattaaacacaatcgaagtacaaagtttcaggtctttgcggcggcctttgcagggggctccgatagttttgcttaaaaaagtgctttttattgaagggcctattaaatatatttcatttgtacatacattgaaggcaattattggggcactaatgtttggtcgggctctttgcatggcgggcattgtttgactgtgttggcgtcggtggattctcttctgaatataatagtagcttttaaccataataaacttttaataagtaagtaaaaattaaccataagtaaagatacggcaccaatgatggtgaaagtgcaaatcttgcaaaaaatttttttatttgttacagttataaatattaacattaccatcagaataattgtgataaaaattgataataataataataatgatgatgatgatgatgatgatgatgatgata

SEQ ID NO: 13536 - DNA, 1818 bp, Heterodera glycines
  unsure (1)..(1818): unsure at all n locations
tgtgctcgattatgcattcgaaaattcgggaaagtatggcgcaattcaaaaataactaatgttaattaattaattaattaattttaaatgtattttagtccanccaccgcttttgtggccgaatctttgctgggccccgttggttataaattcttcgccggcacattcattatttcattttgtagcacttgctgttatgtgtcaatttttgtgatcattcgatgcaaaaatggcggtaaattttggcattcatttgtttggcattttattttgtgccaaaattcaattcaaaatatttttacagtaatccaacagacgaacacacgagttttacggtcaatggtcataattttgtcgattaacattggcggatatctgaccaatttggccatatatcagttgctgtatgcatttggctcacttttggggtattttaaattaattttaattttaaatttttcaaagttcttaaggcccccaattcgagcttggcaagttggttttatttctggcattctgttaaacgctgctgcgggatcaaatgcgattgttctttattttaacaggtcattatcattatcggattattatttttttttcatttaattaattttaatttattactttattaataattaacttttagcactgaatatcgccgcgtgttcaaaaaagaatttcgcattttattcaatcgtttttgcaacacaaatggtcatttttaataaataaaattttataaaaatattaatctatttgtatttaacttttaattttagcacttgttgttctactatcaaaaaatattgaatacaatttttttaaacaaatatttaaaatttgtttttagctgttcaaactattggcacaaatcaagtgcgaagtgccaacccaaacaataaaatgaacaaaatccgatcaagccaacagagaaatgttcatacgatcaatctgaatcgctaatgatacggaattttcgttgatatttttaacattttttatttaattgaaaaaataatggaatttgattggaattttgtattatgcaagataataattttgtaaaactagaaaaatttattttaaattaaattttaaaataattatttgttttaaaaatgcctcataaacattgctataaactgaaaaaagttaaaataatttgtattatgtttcaaaaaatttatggtcaaaaaggtttcaaaactcaactttttgtgagtacttttgaacataactttttttttgaaagttaattaattttttgaagaaaaaatgcatgccaatacaaagaacatttagcactaatgtagaaaagcctttcaaaaaataaatataatatcctaaaattttgaaatttcgattttcaatttttttattaattttttttattaccacccctcggtggatttatggaattttctaccaccttaatttgcattgcattttttctcggctttgttgacacagttgcgagaatggcgtcggactgccggaagtcaaaattggcacgacctttaattagccttgggcaataatgtttagctaattaaaaaaaaatcataagataaaaatgattttaaattgagtgtgaaataatgaaatttgatttttgtgagaaaattttaaaatagcggatttagtaaatttactaccaccttaattgcattgcagtttcttggcttttgaaattttggcattttcccatgngaatttgctaaagatttctgtgtccgttaatgaaatttttaagatgattgtcccacttttgtaattaggcgaatttataaactatattttgcactttttttatttttt

SEQ ID NO: 13537 - DNA, 2280 bp, Heterodera glycines
  unsure (1)..(2280): unsure at all n locations
tgctcaaatatgccgcctaaaagaaaaacagtcattatcatcgaatgcgtttggaaagccgccaacacgggccgatttgcccattttcagcatggaggaagtgcgacgccatgggaaagacgctgacagaatttgggtcattttccaccaggtagaacaaatatcaattacaaaaaaagtagacacaaaaattatgtatagcaaattttttagggggtttacgatgtaacagaattcattgcaaatcatcccggtggcgacagaattctgctggcggcggggggctcaattgtaattcccatttgcgtatttaatccggnattagcattccggaaccttttttggacagtttatccctcacctaaaaagggacaaagggatgggaaattttgggagggaaatggcaaatttgaatcgtttaaagctttaaaaattccccaggaaatttgaacccccacaaaaaaggttcccccccatttcaatttcccaataaaaaaaaattttttaaggggggcccccccggggggggatcctttttttggtgcggcccccccccaaaaaaatccccccctttttggccccccacacggggaaaaaaccctttttttggcgggaaaaacccccccccccccgtgttgttttaaaaaaaaaatttttttttaacaccccccaaaaaaaaattttttttttttccaaaaaaaaaacacggggggggggcccccccgggggggagaaaattttttattggttgggggaaagggggggggggaaaaaaaaaaaaaaaaaattgggggggttccctccccccaaaaaaaaaaaaaaacccgcggtattgtttttttttttttttttttttttaaaaaaaaaaaaaaaaaaaaaaaaaacccccccccccccccccccccccccggggggggggggggggggggggggggggaaaaaaaaaaaaaatattttttttttttttttttttttttcttccccccccccccggggggggggggggggtttttgtggccgccccgtgtttaaatttttgggggcgcccccccctttttttagtggggggggcccccccggggttttttttttctttttttttttttcccccaagaaaaaaaaggggggaggatttttttccccctcttttttttttgtgattttttttgtggggcccaaaaattctttctaaaaaatattttttacagtaacccaacagacgaacacacgagttttacggtcattgatcatcattttgtccattaacattggcggatatctgaccaatttggccatatatcagttgctgtatgcatttggctcaattttggggtattttaaattaattttaattttaaatttttcaaatttcttaaggcccccaattcgagcttggcaagttggttttatttctggcattctgttaaacgctgctgcgggatcaaatgcgattgttctttattttaacaggtcattatctttatcggattattatttttttttcatttaattaattttaatttattactttattaataattaacttttagcactgaatatcgccgcgtgttcaaaaaagaatttcgcattttattcaatcgtttttgcaacacaaatggtcatttttaataaataaaattttataaaaatattaatctatttgtatttaacttttggaaaataaaacagtttttaaatatttttaaacaaattttaaattaaaaattttttagctgtccaaactattgacacaatccaagtgcgaagtgccaacacaaacaacaacatgaacaacatccgattaagccaacagatgaatgtgcattcgatcaatttgaatcgctattgaaatggacttatatatttttttattttcttttatagtttttttcttaaaaaaataaaattttttattacgatttggcattatgaaaaaattaataaatttgtttgctagctgtttaatgatgtcaagaatttggcacagtttctattttgttccaaatttggcgttgacagtttctcatttcattttagtttttttcattttcttttttgtatagtttttccaattatttttccattttccaatgaaaatgaaaataaattcctttctgcatgattctgcagaatgttagatgatgcagaccaatgaattccgactttaattagtcattagcagaatttataaatcaaatgattcggtaaattcaaagaaacttaaaaaatttttaattccaaattgtgccaataattaataaagcctataatctgtttgcc

SEQ ID NO: 13538 - DNA, 3480 bp, Heterodera glycines
  unsure (1)..(3480): unsure at all n locations
agtgagtaaaaatgccacaatagtgaagaaatagtgacaaaaagtccgaaatagtgacgaatagtgacatattttcagccaaaaattaagcaaaaataatttttattcactgattgcattgcaaatgagtagggctgggattcttaagggcaaaaaaacaaaataggtacataaaaaataatttttaaaattaaaattcttgccacgaaaatacctttttgagaaaatttttttcatttcttaggagtgcttttaaaatttttttttgtcgattcttaggggtgtactttttgaaaaaaatgtttaggtatatatttataaaaaaattacatcaaccgtaaaataatctaataaaagttcgccaaaaataatcaaaattgattagccgctacagatgatgataactattttaattaaaaagaaaataaaaaattatatgaacaaacgaaaatatagatttttacattcagcataatagaaaagaaaaattgaagaatcactattttgattaaatatttaaacagattatattccttaagtataaagtgtttcaaatttatttgattttaaaataaagaaaagtaaaaaataattgaaacaataaataaaaaatttgttaaataaattttgaatgtctcggaacagttgaaagcactaaaagacactacaaaacatgatcaacaagagaatgtccaatttaagtcattattaactgtgaaaaatatattatattatttattttattaatttttattttgcatagtttttatcagacgattggttaatggcgatgtgctcaaaaaaataatattgtatcaatttgaaacttaattcaataaaaaaaagaaataaaataattatttaaataaatacaaattagtgaataagaaatggagttataaagactgtactacatttcaataaacaaagatatgattaaaatattaaaaatatccaaatatataggtacgtttaatacatcgaactctttctacgctaggagttatcacatttcaacaatttcaatttgccattatattatgaatacagaagcaatagtgcaattaaataattactatgacaatgaaagtcatcatttttaaagcgatgtatacgacatcaaaaccaaaagaaaaactaaatgaatttttattttaatataacgatttactaatttcttctaattttatttaatggtatcaaaagctaaacttttatttattcagacaaattaataaaagctgtttattattcaagaccggaggcatgaagtgtcattgttgaataatcaaatacaataattacttgcttcatattaaagaaaaaaataatacaacaatttttgttttaaattaataaaacaaaaattctatcaatgggtctaacttggactatgaattcaacgttgttacgatcgatacgtgactatttataaagaagtggggaagattcaaaagtgaaaaaatttgtgaattattatatcaaaatgaatcaacggatattgatcgtaaataacaatctataagcttattatattttataaaaaatgaaagaaaagaaaaaaatatatgttattgttaaacaatgatatttcttaaaaaaataaaaacctatttaatatgcaataggtaatattaatggaaaaatattatttggatactaaacaaagaaaatatggcatgcacatgtcttaaataattatcttatttcaataaaaagtaaacatctgtaaactaataaaacaatattaatttaaatatttaatttagacataaaacaatatctaaaaaatctaacaaaaaaatttatacacaaaatttttctctaattgaaaacctaaacactaaaataatcaatcgatgtaattaaattaaaatatatggaataaaaaaaaatatttataaaaaattacattaaaattaactattagtaaaaatattttaaaatttattaaataaaaatttattttttatttatactttgaagggtcgaaatcggcaaaatccagattgtgaagttttgctcgaggaaaaaacatttaaaaattaattacaaaacgctaagttatatatatgttatattgacaaggcaactcatctcaaaaactaatttgagaagaacgggaatagctggggggctgaaattttgcacacaggggtaactcgagacggcgcatccgggaaaaatacggattttttggtccggtggccaactgagtcccagcggctggaaaactgactttgccgccagtctcagtgttacgaaattttttgcttttgctttcagagcttagtggaccccaaaagcgaaatgccccaactatggcctacaactttgccagcaaaaaatttttgatcagatcaaaggcctgacctgtaggttaggcaacgtaagtatcactttttttggacacttcagtaccaggcgaatagctcgtaagggtttgctcggagcagggggtcgccagcggacttattgtagagctcaatgagctcgatttttccaaattttaaaatttcgaaaattttcaaaatttttcgagttaggcctaaaattcggtttttcggtttttgaattttatgattttttaacgatttttccagggaaaacgaagaccacttccaaaacatcgttttttgagctctatcgattagtgatgtttttagaaaattttcgattttttccaggaaatagaaaaattttttggcctaagcgggacatttgagtcccgggcccataactcgtcgggggttggttctagccaaaaattgccttagagcaaaattgtagagcttttaaaatgctatcgaatggtgtactacatgttcgaaaattttcaaaaattttcgagctaggccccctagaaatttttgaaaattttttttgggttgaaaatgggggtgaaaaatttttttctgtggtattttgaaatgctgattacgaatatgacctttgtttttcgtttcataatttttagaattttttaaaaattcgaaatttttttcattttttttgaccctcgggattttggggtaaatttgaaaattcataactaacctcagggtaagtcaattttcatacaacaaagctttaaaaatagcaaaaaatcaggagaattttatgggttttatttagattttctatcatgaaactaaaaaaagttattccagaagttctggaaaaattcgaattttcagtaaaaaattcataactcggttctgaaaagatattttggaaaagtaaaataatataaaaatccgcaattttttgctctattttataaaatttatttggtatttttatcacttctttaaaaaaagatataaaaataaaagtgattttgtgcttcgggtccaaaggggggtgaccaggnattttngagtgaaaaatttttttaaccaaaaatctttcaaaaacatgtcattagggctattttatgacgctgatcacgaatacgtgatcagatttacttttgacatc

SEQ ID NO: 13539 - DNA, 3396 bp, Heterodera glycines
tgggtagccttttaataaaaatagaaaaaaatattcactgtataagagataatttaacacgcccccaaccccggtcttattttacttcataaaatttttctacccaatttgctttggttttggtttcggctttttaagcctactcacggtacccgcgtcgagaacgcaccaaagctcagagtaccaaaggagcagaggagttctgtgatggttaaagggattacttaatcccgccccaccacacgccacaccctcctcattaatgtggcgattaacttaccttaattgctccttttaaacttacaaaaaatttaaaatttcaacttgttttaataaaaatgtttcaatttgaacaaaaatttatttaaaaaagttttatgagtttcatacgcttatcatttttttttcatttgcataaagtatttcaaactaaaattaacataacatttacaatgcttctacccaaacaatatttttaatctttttttctatgttttcttttgcaaatttaattttaattctttcccaatttcgtgttctcgataatgccacatataattgtccatgtgaaaaaacttctcttgtcaaatcaatgcctattttttcaaatgtctgcccttgagctccattaattgtcatacaaaatgctagttttaaaggaaattgatgtcttttaaggacataaggaaattttttttcttcaatcaatgtaattctcggaataaaatcaatttctccttttctatctcctgttaaaatcattactcttaaaacattttttccaatgtcaagtatttgtagacgtgttccgttgcataaacccaaactaacatttatatttctgattaattttgttatacaattaatttttaatttaagttcatggtttggaaggctgggtgtttcaagtttattgagtaattctggaagaattggtgctcctttgctttctgcttcatcaatgctattaaaagtataataacttcccggaaatttagataaaatttgttcattatataaatcgatttccctattatatggtgctaaaatacaatgattacaaagttttgaaaattcttttttgctaattatttcaccaaaaatttcgtcaactaaattgttttcttggatatcacaaatttttggaagggttatatacattttatcaccatttcctatttccaaaagttgttgagaaaaaattttggcctctggatcagatcgcatattttgtgttaaatgaaaaattttaaaatttgaccacagttcacttttttgtaatgtcaaatcaattatttcttctttagttgctttgttttttataggtaaacactgtcggaagtctccacttaggattaagattttgccaccgaatataatattatttttatggatttctctcaatttcctatctattatttcaatagcatattttggagccattggtgcctcatcaaatataaaaatatcagtatctcgtatttctattccttctttagatgaattttcaattgatgaagaagaattgctgtttagatctaaaggtaatttaaaacgattatgaaccgttcgcccattttttaataatgtggctgcgatgccagaaaatgccatattcgtaactctttttccgaaaccccttgctaaatgaaataaagcagattgaagaaaagattttcctgtacctcctggaccatcaatgtaaaaacaattttttttattttctccaggatgttcaattgtatcttttatatagtcaaaaatatttttttgttcctcattcataattgaatatttatttaaagtcaaattaagctcttctttaggattgattatatgatcctctgaaaaattattatagttttcatttattttaggcatatcgctaaaagactccaagcttttttcttgttttaatagattttgatttaaaagagataaagctatttggtaagctatattttctggatataatttcttaagatcattacttaaagcatctttatacttctcccataataaacttggatatttgggttcgcaattaataagaatatttgcaaaaagtgctcgtaatccctttggaaatttaaattgacttgcttcgtttaaacacttatcccattccatatcatctcgtgttaaacccatagctaaacatgcttcagcataagttttaaatttaataccatttacagtttttaaatcctcaaaacttgttgcatgtttatgcaataacatgtaccgaagataatataattctttattttttgggtttactgtataaattcttccaattactttatgtgttccttttctcggccatttccattttctattcttattgtcaaatgtacagtaagttggcatttctacgtatttaaatttaggcgcatttggacagtctttaaaaaagtcaaaatatgcaattaatttgcttcttttttgcattgcttcttctaaattatcatcgttagcattttcatcaaaataaattacttgttcattttccaaatgaacatcaagacgttcaattttatgcgactttccttgtaattcatacttaaataatcgataacacgcttcaaccggactcaaatatcttgcttcaagatattgtccaacttcatcatattttaaaagaatttgttcgccatttggcccctcttttacacattggacaattgcagcatcatagcctttataaatatatttatatatatattttaccgcattaatttcagaacaaacttctacattaatatgcgattgaaatcttaataacaaatatggattataaggtgcaatattttgatttgttaatttaattcctttaacgtattcaaaatctccattatttgctcgtttatacaatgcataaccgtcttctcctaattgagtttcttctctaaattttttcgggtatttaaacctacattttccatttcgcatacacggagcatttttatttaaatctgaacatggcccatgcatcataaattttttcactgctgatcgtaaaattggttcttttttactatctggtagttcggcgcgtattaatttgtcaatatcatttatattttttaatttatcttttggatgtaatgtaactaaaaaatgcaaatgcggcagtccccttttttgaaattcaactacccaacagtaggcaataacagttccaaagatttctccacttacaacttcttcaattaatttgtccgcttttaatttaaaaactcgtgcaactatgtctggtctatcctcggtcttttgacctttcaataaacattttttaatatcgatatcttctgggtttattgtataggtaataaataaatctggttttccattttccccaacaattgccatagaatcaataaaattttggtcttt

SEQ ID NO: 13540 - DNA, 2020 bp, Heterodera glycines
  unsure (1)..(2020): unsure at all n locations
ttcaaatanaggggattgaaaaataaaattaaaatctggctttctagcaattttgaaatatttttatttcgctaaaactaattggttttaaattacttttttatgttacttttttgctatttttccatttgtgccatccctctttccctccaattgttcccattgtgtcgtcctctatttttccccttcggggggtttaattacccaagtttgagcctaatgataaattggattatttctgcgcactgctccttgggtctttatttcaacaacttgctctgaatactctgatatcctctcgccccgacccccaacaaaaaaccatttagtaataggtaaaatctttcctaaactgttaagcttttaaatgatataatatgcgaaaaaaatatatttatttttacaattttagcaaaaaaaattctctaaaatggctaatttcttcatcattccccgtcgaaaaacaattcaacttttattgtttattattttatttaaaataacgcttcaacaaggtgattaattttttgtttttggcattatcatttttatcatacgacattctgtaaaattctttcaaataaaacgccaaatttttgcttaaactttgacgaaatttttttaaataattttattgaaaataaaaaaaatccaaagaaaactaaagaaaaaaataaaatggtttttttaaagacaaattttcttttatttcaaaagtttatttgatttctattttagactcgctcattgaaactaaacaattggtagatcaagcaaaaagtttgtttaaccaaataaaaaagggaaactttggtgccaattcggccattgaatggatacagaaaaatgcgattggcattttgtgtaatagcgaatttgaatcaaaaatggatgaaagtttgaacaaattgcaaaacaaattctgtgattcattggaaaatggcaattatcaaaatttgaaagaaatgttacaaacgacaaaaattgaggaaaaaacatttgacaaaagccaaatggacaaagccatagcaaaagatcaaattaacaagggcaaaaacaagcaaatgtttaaacaactatttaacaattctagcaatctttttgaaattagtgaaaaaattttatgattttgctttctaatcagaggggtgaaaaaatcaaaaaaaaaatttctataactaaataaaacaaaatataaaaattttaaaaagaataaaatttttgtcttgggaaacgattgttgcaaaaaaaaagaaaccaaggaacggggaccgcgctttacgaacggggaaatttggatgagaaatcccgaatgaaataaattatcccaaaattaaaccattaatggagatgactttttatatatgtttctattttacttaagctctaagtttcgattttcgcattaataaatttttaattacctggtgatttcttattattgttttcattaatttggcaatttcgattttagcgttcataaattaaattattttggccattttcattaatttagtttttgctaattgatttggctacccgacatttgaggatttgacatttgaggacccgacatttgaggacccgacctttgaggatatacacaatttaaaaaaaataaatgaaattttattttatatcatttgggccagagatgtgttgtccaaatgttgtcactgttggaataaatatttattgagaaagaaattgggaagcggcagaataaatggagagatgataaattgaggagaactgcagaagaagataaaaatataaaaactgaacgaacttgaatgagaaaaggaatgatgaaaagagggatggattttgggactgaattgggaaattgacaaaataaatgatcgcggtaatacaaaatgtttaaattggatcgttgtccgttggtatgacatcaccgtgctccgaccagctgagctcatgcgaatcgttcatacgtttgtcctccctccgcaacgaaccatggaggcctcctggccgacgatgttgttgaacagtggcg

SEQ ID NO: 13541 - DNA, 1216 bp, Heterodera glycines
  unsure (1)..(1216): unsure at all n locations
tgatgccgattcgtccatgaaatggatacagaaaaatgcgattggcattttgtgtaatagcgaattgaaatcaaaaatggatgaaagtttgaaaaaattgcaaaacaaattctgtgattcattggaaaatggcaattatcaaaatttgaaagaaatgttacaaacgacaaaaaatgaggagaaagcatttgacaaaaggcaaatggacaaagccatagcaaaagatcaaatgctcaatgacaacaataagcggatgtttaaaaaactatttaacaattctagcaacattcttgaaattcatgaagatttaattgaaggtaaataataattaaaattttaaatataaaaaaaatccaatttatcgtactcaattgtttcgtaaatcaaaattcgttgaatatttggcacaaagtgtcaattataagttaaaatttgaaaaattcaaatattacgcttaggtaaaatggctaaaaaattcaaagatgttcaaatttttcgttttcagcagaaaggcttgccgtgcgccaacaacaaatgccaaacggttttatgggcagaagaaaaaagcgtgcccgcgacagtgcaattaagggctgtgtcactgcagtgcttttaacattaatctctgctccatatttgggttattattctaacaaatatgccaacgagggcaatgtcatggttcaagtcaatagatgtaaaaagaggtttaatgtccgacattgttaccaagtccagcagtcggttgtcacgcagatttttgagtggacaattctattagccattggactaatctgtgcactgatattttgttcttgtgtccgttgatcatctaattattgtatgattacaattacggtacatatgactttggtgctgctttctgttcagtctcatcacaaattttctgttataaaaagtcgtgaaaacacgttttatagggtttttaggggtcgctgatcacaaatctgacatgcattttgaccaatttcaaaacccggacccgaattggaacaaaaagtcgaaaattcaaaattcacttttatgttcgtaccccatgaccattttttaatgttgcaatggtttttaactaaatttagcttatttagatcaatttaggaacaaaagtgtgaattttgaaaattttgaattttcgactttttgttcgaactttaatgatggattcgaaattggccaaaatgaatgtcangattcg

SEQ ID NO: 13542 - DNA, 4586 bp, Heterodera glycines
  unsure (1)..(4586): unsure at all n locations
agaaaagaggagggagagaagaggagagagatagaaaagaggagagagagagagaaagaaagaggagggagagaagaagagagagatagaaaagagaaggaagagagagagagagaaaaagaggagaggagaaaagaaagagaggtgagagagagagaaagaaaagaggaggaagagagagagagagaaaaagaggagagggagaaagaaagagaaaagaggagagagatagaaaagaggaggaagagagagagagagaaaaagaggagagggagaaagaaagagaggtgagagagagagagaaagagaaaagaggagagagatagaaaagaggaggaagagagagagagagaaaaagaggagagggagaaagaaagagaggtgagagagagagaaagaaaagaggagggagagaagaggagagagatagaaaagaggagggagagaaagaaagagaggagagaagggagagaaaagaggagggagagaagaggagggagagaaagaaagagaggagagaagggagagaaaagaggagggagagaagaggagagagatagaaaagaggagagagagagagaaagaaagaggagggagagaagaggagagagatagaaaagaggaggaagagagagagagagaaaaagaggagagggagaaagaaagagaggtgagagagagagagaagataataaattttttcaaagctcggctagcgcgaggtgcgcgagcgaagcgagcgcgcctgcgctagtaaataattaaaaaaagaaaagaattgttttaaaattggcgtaaatgtccgacctttttgaaaatattccttcaccatttccaaattttcatgaataatttatgctcgaattcccattcttaccaatgcaaattttaccaggttaataccactaccggtggcactagaaaaccgccactggtacttcttattttgaaatccataaaactaaatattgctaatgagtggcctttgttccaatatcaattgatcgttaaaatttccatcattaattaccattttattatttaaattaattaagaattatcattttttacaaattaaactataatccttttaataaaataaaatgaatataaatgacgcttttctatcgcaatattataattatcagcagaacatcaccataattttacgctttcatcgcacagaatggcgaagccaatagaagtgaatcatcaaaaaaagagcgtttgcatagaatcgctttatgtaccagtcaaaaattcattcattaataaataacattcatttttttaactgaaaattatctaaatatattattaaataacttatttatgttttgattcaattagataaaataatataattgctttttgtcttcaaaattgacattcattaaaatggcaaatttattggctgttattttgtttaccatcatccgatttgaagtaggagattcaaatgatcagataaccgcagacaaaaatggtacatttcacaaaacaattttgataaaaaatttccaaaattttgttttaatttagcatttaatgccgaggaattgtgtcgtcccatcgatggcactcactttcacgagcagtgccttcagtcgtcagttgtcaaacagaagggcttcatcccacggaatttgcatccgccatggctcagctcgtcgctgtttgaggacaacgaactgaacgaagaaaaagccaaaaatgacggatgttatgggtgttataaggggacaaaagggagcaatggcatggcaccgggggaagaatactgtgcatgtacggtatgttaacctaataaaattcatggttaatgggcgggataaaaaggtgaaaagttagataaattgacaaaaactttcaaaatattttcaaagcataaaaaataaaaacagaatttttgtcaggaaaaaaattgagggaattctttgataaaagcttatatcttaggatatgtttatgaaaaatttgaaagatcttatatttttgagcgcttttttttgttaaaatatttttcaaaaattcaaaattaaatacaaaaagcaccaaatgtcaaaagaagcataaaagataaatgttaaaactaatttaagcaaattaagcaagaaaaacttgcgaaattgtttgagggccgtgtgatcgtcccaacttcgcttcgcagtcgaatcctaaaggcattgcacatcgcacatccaggcattgtgcgcatgaaagcacttgctcgtcgccacgtgtattggccgggaatggactcagagattgaaaaagttgtgagcacatgcgaagagtgtcaactgggccagaaaaagccaacaaaagcacctctttcaccatggccaacgacagacaaagtctttcagcgtgtccacgtcgatttcgcaggcccctgctcagacggtcaccaatatttgattttgatcgattcattttcaaagtggccagaagtttaccgaatgaacacaatttctgcctatgccaccgtatttgtgctccgatcaatcatttttcggctcggaatcccagaagaaattgtttccgacaatgggacccaatttcgatctgccgaattcgctacattttgtaaagaatttggtattaagcacactttcactccgccatttcacccacaatcgaatggccaagtggaacgtttcgttgacaccttcaaacgttcgatgaggaaaatgtcaaaaggcgaaaaagattggatcgaaagaatgctgttcgcctacagaaccactccccacgtcgccttgaatggtttttcacccgatcagttatttttcggcagaaaattacgaaccaaactagcgctcgtccatccaaaaggggaaaaagacgaaaattttgatcaaaattcattcaaaaagggacagatgaaatacaccgacaaaatggctcaaaattttgatcggaagcatggatcaaaactgatcaatttctttccaaatgatcatgttcttctgatcaattatcggaacaacaagacggaatggctccaagggaaaattgttgagaggctccataaatcgcccacatatcgtgtttatgtgcctgttctgcgtcgcgttgttcatcggcacgcaaatcagctaaggcgacgacatcttttggaagacgaagccgaaaaagaggcacctcaagtcaaacagccgccgccggttgtcgaatcgcctcgtcagccccaacaaattcagccagccaattccccgttgaaagtccgccgatcgagccgaatcaagaaacccacacaattttactctccatcgagatgaaaaattcaggcttaaaccttcgggtttcgaatttaagaggggaggtgttagagaaggaagtaattattgattaggtgtatgaccccacgccacttcgccatcttccccctcccattcccctcattcagttggttatttgtgcctaccaattttgacctcccaatttattctctgcatttatttattattttattttcttcggcaaataaacttatttaatttgttatcttcggacataacagaaatataatttgaaatacaaaaaattgtaaaaattaacctagtggattctaacggcaccgccagataacctagtaaatttcactatgtttttttacctgctgggaaaatcccggttttgcgttttccataattctcgattctctcagcccaattatcattttaaattttgtctattttagattgatgacaacatatttcttagcttcttgaaggaagagaagagaagcaattttgaaaaattttgtagcaaattgagagcagaaaatttgccgaaagttaatgctttaaaagcgaatgttagaataagaaacgcacagacaaaagtgcctgatccaatgcaacgtttgattcatgaatatgtcatatattttgccattttttatctgatgagagagaaatggcaatgtgcaaaagtcgagcgctaccaaaatgagtgttcaaagtttcgcaactatttcaattttatgtacgaatatttcttcagagcatataatcaaggtttgaaaactctaattgtttacattaaaatcagggttatcaaagatccagattttcaaagcaggtttgaattttataggggtaaaaaagattttaaatattcgcattttgggcacaaaatatatttcaaatatttggtccagaatttgaagcaaaaaataggaaaacatataaagctaaaaaaaattaagcgaaccattggggagtggcaccacaatttgcggcagtgaggccgaattttaaatttggagaagaaaagattgaatctttgcttgacgttgtggagcgactgggcacaattgcggcattcattttcgatccaacttacgcaaaagaatttgacaacaaattggacgctttgtttaaacaatggccggagccaaaattaattaatgagacggaagtgagtggcggagaaacacttagccaaaaaatcattggaagtgttctacaaataggaaaaagcccaacaaaaaagggcaaagaanaggttaatgaagagagttcatcagcagtagaacaagaagcattcgccttggatcgtgcnaattntgaaaattt

SEQ ID NO: 13543 - DNA, 2794 bp, Heterodera glycines
aaaaattagcaatttttgtacaatttatgctatataaattgcatagaaattttcaattttttttccgacggcacctatcggcaccgccggactcaaaaaaaaacttaattttcttgaaaatttgctcaaaatcgctaaattttccattttttggacaaaatttgttaacaatttacattaaaaattacaaaatttttcccggcggcgcatatcggcaccgccggacccttccttctccacagtttctcaaattctctttggataaagcgcgccgcaaaaaaagggtgtaactttcccaaaaaaaaaatccaaaataatgtaaaattacttaaaatattttgatctttttaaaaaatatagaaataaactaaaaacagtttgaaattaccttttacatggttaaaaatttagcctattaaatattttttaaaaaatttattatatatttttttgaaaaattccgagttccgacttccgacatttttggggtcggaattccgacttccgaattccgaaaatttttggggcatcggaattccgacttccggaaatttttagtgcctcggaactccatccctgctccacaaccgacactattaaaaccattgttcattcattaaaaacatttgcatttttaactcgaactcttgctcatttggcaaaaattaaaaacattttttcttaaaaaaaaaccagggattctctacccaccaataaaatttcattcggaaatcccacggacacctgctgctggagaccttcctttgtaagcattactaggcacgagagaatgaatggcattaacttaattaattattttttgcggtggatgctagccaattgtaactccttatttatttcttgcatttattttgaggacataatgtacatatttatttcataagtataaaagggaaatctacatcatttggtggttcattaattcaccgagaccgaatgtgactgatcgtccacaggtccgatttgttttgatatgccgactctaaccgactatgtattaacaaaaaaaaaggagaggaaaatagagtgtttgatgaaagactgccatcactgatcattccaaagcgatcggacggtcaaagcgctgtgtgtcgtgcctcgcgttgctcggtctgccattgtccgccgtccggcactcattccgtctccctccctcaggcgacccccgccaatttggcacttcccgtcgacctccgtctgatccttttctcttccccctttcgctcttgcttttcctccctttcccttctttcctctcccaatgggcggtggttttctttgctttcgtctccacttccgttgtcttccgtcgatgtccgttcttcgtccgatgtgctcaaagatgagtccaaactaccggcgccaatttgccaagcggccgttctaaacgtttcaattgtttcaatttctctttttatgctcaatttgttcttcacctgtacactttggtgtgaattacgttgttcagcttccgtaaattgaatctctgctcaaatatcatccgataccaaaactcctccttcgtttgcggtgtttggagtgggaaaagcattgtccgatttgcgaagtttgtgtcccaaaagcggaaatggccaaatgatttgaacggttaacttttaccccaatgagtccttctgcgtgctttcccagaagttcgccaagatcaacctgaagaaacatcggttaaacagcacgggactcttcggatagcattaacaccttccccaatgcttcactaaagccttctttgcttctccaaagcacttcccccggcaaaaggttttgaaaggcattgcgcagaagaaacttctcagttttgcccgggatgagcttgaaactgaaatttaagggcaaatgaaggacaaattgatggaaaaaccttggcggaagttgggcaacaaaagaaacgaattttttgtcgaggaaagggacccgaatttcaagcccatggcaggaagtgcaactgaatgacaaattagcaaagggaaagcggaacaaacgaagcaccgatcacagcgaaggacgtcgtattggtggagcagtcggagacgacggacgatctcacgctggagaaggggcgcggacggcgcccgctgcatgtaagcgtaagagccgaacagttcgtccgccccttcgcctggaaaagcgatgaagcgaactttgggagagttaagcgtacctgagagaagcactttcacttcactgctggcggcgatgtgcttacagagcagaaaatgggcaactccacagcgcacgacgagcggatcgaatgtctctaaggaaaagacgacttctgaacggaaggggggggataaagcggacagagcaaaaagcggaccggggatagcctcgacacactctcgagcactgatcaccaacactctgtggcaaatgcccaaatactcggccactttacgagcattcacaaggtcgggagagtcctcaaagccaactgaaaatgcgatcggagaagcgcaaaagtcattcgagtggaggaagcgagttgccaacgctgaagggaacggaagttgaagaagcggacaaatggcacaattaccggcgattagcgacgagtccaaccccccggagagcataaagccaaattggcgattgcccattagcctcttttcgaccgcctcaaccaacaatttgcggataattgcctaaacatcgtgaaacctttcttataatgctaaatttgctgacttttgcatcaaaagcactgatggaataattgacaattgaagggatttgaaagaattgtgaaatgcga

SEQ ID NO: 13544 - DNA, 939 bp, Heterodera glycines
aaaattggctcgaacaacagggggggggggggagaggacagtccgaacggacgaattgtccagcagagaattgtccttcagcgtccgatggttgtaaatttcgccgttgcacaccaccgaaagaccgtccgcacaaatgggctgttcgcttggagagtcgccgggctatccgcggaaaatgaggagaattgggaccagggctgggcgtaattacggattacggatttccgtaattggaaatccagttacgcccagccctggattggactcacctggacaatggccaaacggtggaagcccagccaaactttggaagacactcggctgataatggtcaagtcgggacccctcccgacaatttgcaggaattctctttgatgtttggtcggcacatattcggcgcccaaaataacctgggaaatgaaagtgaacgaacgatgggacgagcaaagggacggaggacggacactcacccaaatgccgcacatttaattcactgagccaaacctaaatggattaagagagagagagagatttcgacagaggattaagggttgaattgagttcaaaattcattttcttgttgatccgtccgttctttgggatttgtgggggggggggggcacggccattcgtctggcgacaatcgattggagtggacaaccgacagaaggagaacgactgactgatcgggtcaattcgcctcgttttgcggatttgtcggttctcccggccaaacctcccccgcctgctcctctgctgatgagtactgccgcatctgctcggatgagtctcttccgttgtccctttccgatcggccaattctgtcccccccccacctctgacaacaacaaaaaaagcatttgcccgcctttgccagtccatcaacaacaatctgtccgaccgacttctgactccgactggttcctcctcctcccc

SEQ ID NO: 13545 - DNA, 2188 bp, Heterodera glycines
aaatttcggtatttcaaagggattatctttgtattttttaaatatttaaaaatagattgttttccctttgaaatagccgttttttcaatttgtgaatggaatttatttgtttgtatttttatgtgtaaactaatgctatcataaagtgttttttttgttgggtcaattttactttgtttatataattttgctttttctttaatggatgccaataaatgcctaggatatttatggaccaaatcatttttggtcaatcgttttattggaatacactcatctaaagtttctaacaatgcattgttaaaggagacatatttttcatttacgctaaaaagtttaaatgataaagctctaagccttgaggcaataactacattgaaaagtgacaaataaattaaaattaaatgatgaaagaataattttataattattaaaataaaaatattttcgatagaaaatcaaataatatttttaaaaatccaaaagacagaaattttaaaattaaagcttcttttacaaattacttgatttttatttattttatttatttgtcacaaagaaaaataatccacgaaagggaaaaatccacttacttcggggacatatgaaaacataaaatagtgcacaagcaaatggataataaaataataaaaaatcatcgtcaaaggaaacaataaataaggtcaatacaatttgtaaaaacgatcaaatcacaatcataagcattactcaagaatttttaattttatttttgaataagttaaaagagtttgttttaatgagctctttatcgagttgattccacaatttggttgccctcccagcaaagggaatgaattttttgcctaatttatattttgtattaaatcggtagaaaggaatattgaatcgtgttgatggtctaaaaatggagaaaagtttcagatctgttcggccataaacaattttatgtgccatgaacagatcgaataagtttcgcctattctcaagtgttggcagctgaaggtactctaatcgattttggtatggaattggtggaaggttgcatttaaaaaaaactcttttagtgaaatatttttgacacttctcaatttttttaatatttttttgaagagacggattccaaacttccggagcgtattccaataaaggtctaatataagttttatataatgtaatccaaattttagaagatttagatttaattattctaaacaaggaacgcatacgtaaatacgcattccttgttatttgatttacatgatcggaaaattgtagtttgttatcaatgtttactcctaagtccctaattgtatccacagcatttattgtattcccatcaaatttataagtttcttttgggttttttgaacccaaatataatacaaaagttttttgaattgaaacttttatttgccatttatttgcccattcgaataaattatgcaatgttttatgcataatttctgtatcagctcttgctttatagcatatatatattttaacatcatcagcatataatttaatattcactcctgatggtataacatcaggaaggtcatttatataaattaagaataaaagagggcctaggacagagccctgggggacgccagagccaacttttttaacagaggatagagtatcccctattttaacacgaaaagttctgttacttaaaaatgattttatccaatttaataatttaccctgtataccaatttttttcaatttatccaaaagcaaattatgaggtaccgaatcaaatgctttttgaaagtcaatataaatacaatcaacattttttccgttaataattgcttcgtaccaatcttcgacaactgttattaattgatttgtcgttgacctatttcttacaaaaccaaattgggattctgaaattttattgttatatattctttaaaagtaacattgcccaagtgtgcaaatggcctaatggctagtctccttgactttcccttcttctttcccctagttcaatccctctacagaaattaaattattttgaattttctttttgtatactcgtgggtttcctatagagaaaatatgattactcatagttttaatcaacacatattttatcattttttaaatgaaaatccatacaaattgagcctactaatcccaaaaaccaacctttttttgttgaaaatctgtaacaaat

SEQ ID NO: 13546 - DNA, 888 bp, Heterodera glycines
  unsure (1)..(888): unsure at all n locations
ttanaattaaatattttcatgaaatgaaaaaagaggacatttaaacattaattcttgaaaatttcttatggaaatttgtcaaaattttatttttatcaaaaattctttaaaaatttaatcggcgcaatgaaagtgaattattattatataaaagcaaggggggaatgagcccacgaaatgtttgttaaaagcttctcttcttccgacccttcggacgatgccaaaacatttctatgagacaaaaaatatattgaaatttaattattactaccagggcatacgtacaataataaatggatataataaaatcatatttatttatttatggccataaattgtgtaaaaatgggcataattttcttcaaattcattgcatttgactgaaaatatgatggcatcatcttacaattagaagaaaacaacataaaatttaaatattattttcgcaaaaaaccctaatgatttttcgaaaagaaaaatttaatattatacaaaatacggacaaaaaagtcaatccaaaaagcttcaaaaaggcattagtaaaaaggattaaaatggaattcttattttttcatttctaaatttgtcaaaattggaagaatgctcaaaaacaacaggtaatttgatcattttttatctcattttactcaaaagggccaaaattataacacaaaataataaaacaaaaattgctttgacttttaaatttcattccgccaattttcgtccgttctgttcagctgtccatgaatgtcttctgcgtttgctcgtcctgttccaacgctttgtctttgttgtaaaatgggaggtgcaaattttggcctaaattgagaaaaaaccaatagaatatttaaatattcgttaaatgatcggttggaatgaaagaat

SEQ ID NO: 13547 - DNA, 2918 bp, Heterodera glycines
acatcggtcatgaacccagccgcaacagttttggctcttggaaagcgcacccttcgggggcgcatcagagttaggtgcggtgcccctccaaataatgctgcacatccctcttccgtaaatttttcaacttttttcgcgcctctttccacagcgctgtaacacctgcgaacgccgctggggaggatgggtcgttgtacagcttgtcaagcgtggagttgatcaactccactttttcgggcgaaattccttcttgattttcggtgccgtcctggtggttgtgctctgtgctgttttctttggaggagccgtccatgaatacaaaattggatcttgcctaagcctctcttcaaatatggccgctccaggtggcttaatggtagggcggcccgctctcctgtcaattatatacctgatggccattcgcaaattgctatgcgccaacggtttgccgtttgcggtgttaattgtattgccacggacacccatacgatccgcataacggttgcatttgatgtacagtcgttcaacccgctgattcatggtcagctgatttgacgggatggtaaacagttctcgatgttgttgttgttcatcactttgtgcagatgttgatggacccggctcgggtgagtactgtactcgcaccctcctcgcttgcctcacgcgttttcttatgcgcacctcaccatcattctcaccatttacggggtggcggcgtttggtccccctcctaggcggaggaacaggaggcatttcttcgacgacagcagcaggaagtggttgctgttgcctctgtggcgtttcttcaacaattttgggttctcttttcgggatacggtatggcacgggtctctttgtcggctcatgttttggtacaattttgggtgccggaggaggaatgtatccggcttgcctggatgtggatggccgtgggtcaagcgggaattcaggctcttttttcgaccgaggcgcgacttttgatgtcgatggtcgtgaatcgggttcaaattttggctcaatttttggtggttttagttccaacttttttggcttctgttgctctctctttgtggtcggttggcgtggtggtggttttggtttcgctcgagatggggaagggagccgtggaggtgaacgctgataaatcctgtattttttgtgatgcaaagcatcatcatcatcattatcttctgcttcatccttttttaattttcttctggttgcaatcctgcgctgtgcggtgtccatctcctcaatttcgtccgcgttgtctggtagcacaggcaaatcgccatagtattgtgatggcgctggcagcgcgaacccgctctccaacatatactcatcatctgtatcactttcgggtaaaggagcggcagctgcttcagcaagaaggtcccgcacaaccggtcgccgtcgatgtatatcgtatcgccttttctcccattgctctagacgaccacctctccgagaagctctactcggtctgggaggacgttcaggacgaggcggaggactccctggtggagaagggggagcgggaggaatgggtgggggccgaggacgtctcccgggcggcggaggtggagggggaggacttggtccacgccaagcgcgtctttcaggcggcgggggtggtggagcgggaggccgcggtggtgtgtccacaacttcaccatcttcatcttcaccacctctcctcatcagtacactgattcctttggtgagctcaactttggccggtctgtccgcgagctcccttctcattttcaaatagcgcctaagctgttggttgtagtggacattctttgcagatggatgtgttcgttcggcccgggcacggttcaaatcgtgccgaacagcatccaaattgatgtcacccgtctccgacatggaggtgagaccacgataaatttcttgtgggacaagtaaaaatttattcgccataaaatgaatggtgaatgcatgaaaaaacaacaatggtgtgtggtatttatgcatttttggtggacacaacagattttgccacttcaattagaatgggtgttaaaagggcagcgaacaatccgccaaatcctgcgcctttctgaacaaacacgcgcctggcgccccgctcacttctcgctctgctcacccgacgtacagtgtccgcatggggcatcaatcgtctcttctgacgagctgacaaacggaagcgggaagcaactatgttcaaacaaatttccactagcgctagcagttgctcagtgtttgcttttcgtagcattttcttgcatttgttcgctgagcgagttctggccaatgcacagagccaatccgcattctcttttatcagttcgccaacctttacttgctgctgctgcttatgccgctccatttttaggaatgaacacaactgtcccttcatcttcctcctgctcatccttaaatatgttggttcgcagcctcaatgatgggtccgacgatgcatgcatatcaatcaacaaatagccatagggacgggcggtcgcttttcgataggcgtcaagaaagaagtcaagctgacgcggaaaaagttgaacgccaatgttacggatggacagcagtgaatttggggcccgcatcagtaccaggtactgggcggacagacgggccactttgatcttgcgctcaaacaaattttgagtgacaaacacaacagcaaactggtgatggtgagcctttttggtgaacagatctgacaagtatcgctcgtcgacggacagcatcagatcatcgagtatcagcaataggggcttgggaagacgcttgattaattcttcagatggcactcccgcatacacatcgactcccgcatgttgaagcacaggcaccgctgcattcatttcaccaaaagtgaaagagcatggacacaggctttggtgtgattaattggcccg

SEQ ID NO: 13548 - DNA, 3512 bp, Heterodera glycines
tgggttgacctttgaaaaaacaaataatgctttaagcttttgcgtttttggcatttctaccgtaggctttgccctccgcccaccgttgctacgctcgcatttttccacccatttgcgctggccaaatctttggtttctctccgctgccgaaaactcttccgaaggatttgttgccaatttttgatccttaaattaggagaattattttaattagtgtgtgtttgtctgactgacttattttttgtgcaatttttaactgtcctcgtcggtgtcggcgtatttattttgtctaaatttctcgccgaatttgtgccattttcatacgcaattgaattgttgttggtgttgcctaaagaaaaacaaaaaatttttatttttccaaattcaattatttttttgtatcgttaattattttatacagtggtggaaaaaagtcttgactcaagatgattaatttgtagaattttaaaattcgactggaattttagctgattactttttgtttatgtatatttatttaccccaatacatgggcctttcatacaccacaaaataatcacaatccgctttatcattctcgtgaatgaataagtcgcctgatcagattttgctcaaaaaaggggcggaaaaaagtcttgactcaaacttgaaaaactatttcatgtttacccaaaaatctgaaaaaattccaatttacattatttttgatactgatcaaaaaagtctcttacaccaacttggtcagatcactccttcatagtgatcgggacaccacaaaatagatagaaactcggggaattttcgaaaaaaaatttctaggcggttggttccctgaaatttcgactttttccaccactgtatttattttatttatttgtgtgtactttcaacttcaactgtcaacacgtcaattcgaataccgcctttcaaagtgccaattacatttgcatatctggacaaacattatgaaataagctaaaactgaattggtttttcgagaattcttcaacttacagaacagtcattgtaacgagcggaatgacaagcagcacaaaagtcatataaatctgaaaaatgtgccaaaaaaattttaaaaaatggaaaggaattgaattaaaatgccacctgatacccaaaatggacgattggctcaaattttggtgcacaattcagcccgtttcggttgtaagtgcgctcctcatacataaacagcatgaacacattggcaatgacggagacaagccttaattagacggacattttcattgtgctatcctaatgagaagtgcgacgtttaaactgttccccggcaagagcttctgatggactaaaaaaaaactcccgatcagagggccagaaaaaaatggaattacctaagtttaatcctaatacccctatgtccccttttcgtgatttacataaatccatttatatatgtagagtagaacgggaacgagacctggtactgaaaaagacgggacaactgaatacctaagtcccggttttggccggaccgggactagtcccggtttaccagccaaaaattcccggtttttcaacccgaaaaggtcccggttttgcccaaaattcccggtcccgctctactctaatataaagtgtaaaaataattattataaaatgctaataaagaaaaacttaccaaaccaaactgatgacgaacatggcatgggtgggcgtgtgccaaacacgtgaatgcaacggcttacaaatggcgtaatagcgttccaaggcaattgctgccaatgtgtaagctgaagcggttacgacgacagctaaataacaatatatttaatatatatttatttaagctaatttttaaaaaggatttttattttttatataaaataaaaaagcgaacgttgcaaataagcgagcaatttgcataacaaatcgccaaaaacccagcagtaaacgagcgaactgaccaaagttgggggcatgccttaaaagaaaaattaaataaattttaaaataaaatttaattaaattgtctaaaataattttaaaaaattgacaacatacaaacaacgctcagcaacaggtcactgagtgccaaattaagcaaatataaatttgtcacggagcgcattgaacgttgctaaaggataaaatagggagatgaaatacaaaatttaataatgataaataattaactaattaattaattacctgtaaaatgacgaccacaacaattgaatttcctacaaccgaaagacagaagatcacacagaaagcaaagatcatcaaataattgtcaaaggttggccgaaacacgcagtcctgaaaagacggattatttggataaatttactaattatggtaattagtcaatcaaaattttggcgaggattccaaattttggatcttaaaaaatagagcttggtaaaaaatattacgggaacggcggaagcaagaaatttgctgggagcaggaccgggaatctcgtaaaaatctcgcgggagtcccgatcccgccgggctcaattaaaaactgctaaaaattttatgataaaggagtttgggcaaaatgccaaaataagaaagcaaactttggaaatcccgacgaatttcccgccccccccctccaatttttgccctttttcaagtacattgatcattccgaattgttccagcaaatgctgtccaattccgctgctcaaatttttgctgccattgttggaatggatttgcgttacattttggccaatttcaaagcccattttgtcgctgttattatcgagtgccattgtctcggttccattcgaaggcatttctgctgaaaacaaatttaacaaaaattaaataaaaagtaaattaaaatttgaaaattaaattttatttatgaaaaagagaagaggaggaaggaagtattcttagattcatttatcccccccaccgtcaattgcactttaaatttaaaaacaaatgaaattgttgctctgatcaatcgacaaaaaagtgaaccgattggagagggaaattcaatcagacggaaattaatggaaataataataaaaaatcatatttttgtttaaaaaaagaaacaaaaattgaaaataataattaatatttatccaacaaatggaaaaaatgggaaggaatgagagagttaaacggtcataaaagctactttcgcatttttgtctgatgctttttttaacgcacttcctcgttttaaaccccggaaatgttaaatttaaaatttaattattttaattgaagaaattaaacattaaaaacatgctatgatgctattaaaatgaaaaccaaagcccacgcaaatttacggcaacaaaaaaagtaaatcaaatcaaatttaattccaaaatctataaatataattttgaataataaatatttaaaatgtgagtaggaatcatttaaaaaataataatataattttttgtttcttttcattaaaaattattaaaatattcgtcgcaacgcttaaatataagtaaaaaaattgagcattgaagaggggatttatca

SEQ ID NO: 13549 - DNA, 1582 bp, Heterodera glycines
ttatacttcaaaatctattttttttttctttggcattctgatttgtttttgtatatatatttttttaaaattttctcacccatggaatggacacagcggcttcatgaacacaatttggccccgttgtccgtacaggcatgtacagggcaggtcctctcccggtgccaaatagcgtccgccacctgtgctacgctttggcgaccggctgctgctgctgctgctgctgctgctactgttgttttgctcttcctcatctgtctcctcctgaaaaacaaagcaaaaatgccattcgctagtagtccattaagcaaaagcaaaaatgccacaagaaagcaccgagaggaattcgtgccgatatatataatccatggaaaagataatcgaacccggcagagacacattatcggcatttattttccaagcatctcttatgctatagaagtgccaaaaattctttccccattaaggcacgaaaattaccgggtttctctagcgtggtacccattcgttaatctcaaatcctggcaccgtccaaggccacactcccagtaaagaccccgatcctccgatcataccactttttaccattctcggtttcaatctctcggctacaaagtgcctgcccgagggtggactaatgtaaagccccccccccccccctcaaaatgaatttttacgtggaaaattgtaagtttaagtcaccgtccctgcgcgggtgacaactgctccgcccaaaaaaatcacctgaatgaccaccgccaccggtggcacgactgtgccgtcgccctgcacagaggcggctttcattgacgattttgtcgatttccgggaccgtactgaacccttatggacagaggaagataccgatgaagtggtggaccgcttcttttgaatggatgccacatgttggagctgttgctgctttcttaagcgaagcattgggtaaattgtctgttggccctcgaactgatcgggaatttctcttgtacttcaagaaggtttcccgatctcaaaattttgactaatcctcatcggagtcttaataaatctttgccattgagaccctcaaaaattaccggcgtttcaaaaagtaccaaaatcctaatcaactgtttcaaagtacgtgcgaaggcgccagattttgatcacatatgattggtaatcagggtgccattcctagagttttggcctaaaggcctagactcccgtggccaatgtggtccatttattccaattctcggcactacactctccccaaacttttatttgccacccactttttgttccggtggtaatccgtgcagaaccagatcagctggaacacctctaaaacgctgaccaccgaaataccaatccaaaggccggtcagaccgccaaggtcggcaaacagacttgtcagactgtacgccacgctctctgacagtgtctcgtagttcagctcctcatagaacacttgtaccagcgctaaacaaacgcaatggatcactattgattgatcactctcgatcactgaatcacaccctatcatactgactggattagtctgtctcgatcattgaacgcatcagtccttgatcactca

SEQ ID NO: 13550 - DNA, 2602 bp, Heterodera glycines
  unsure (1)..(2602): unsure at all n locations
attagcagttttgatccattgatcacgccctnaattgtgtgtctctgatcatttttgatcattccaaattccttacccgcattggtccggtatttttccatgcacatgttgtcaccgctttcgcactccatcagttttgttgtcccacttggccaacgggcagccgaatatgtcacttcataggctgtttctctatttttaaaggaatgaatttaaaaatttttccggcaagcgccgcctgacggcaccactaaactccctaaaaacttttgtgccaaaaaactcccaaattttttgccactggccacacctgcacggttggtggcatttgcagttgcgcaatgctccagttgcgatcagatcgccaagcattcgcgaggtgtttttgatgcaatcgcgtgccactggatcactcacttaaattgcttgccatacaaaaagctcacaaaaatctgatcacattggaagtctaaatataattattcgagagtctaaagtcgagaatttcgtatatttttgtgattttggatctcggtctcaaaaagatttaatgttcgagcattcctctaatacagtacagtacagcaaccaacctttacatgatcgtgcattttccggcaccgggtagagcgggtcggcacacccacaaatcctgatcacctttagaaggggacagaagggagattatttaccattctccaattgatcaatttatgttgatcacttacctcattttgggtgcaactccgatggcagccttcgattgagtagctataccccttgtagatgtacgactcggagttctcgcccccctcgctgcagtgcccatacggtggctcgaggcgaaaaaattttttctacggcaaaaaattccttttttgttttagcgtgtcaaaaaataatgtgaaaataacatttagctaaaaattggaaatttcctagaaatccacatattttacacagtaagagctgcaggttcccaccaagaaattcaaaaagtttttttttaaatttttaaaaaagcaattttcacaattataaagattttttcaaaaagtcaattccaattttttggaaaaaattttcgatgaaaatgttgggtgaatcaaacgcaccccttaccattcgcactccaaatgaagaccttaaagccaaaaataaaatttttccacgaaaattttaatgcttacatgaaccccgtcggtgcattgtagccaaatgcatccgcaaatggcactgtccacttgtcgtgcacagttatccggaagccaactgcttccgaggttggcaaatactctgacacgttggcatatagcatcactcgtaagcctgaaaaggattttccgattgacattaaatgaagggatttaatagggccattaataccatcagaagggaaaattttccttgattctctctctatgctctaaatagtaagaaaaacattttgtttttgggattttttgaaaaatttttctcaaaaaagagatgttaaaaattaatttttaaaaaatattaaacattattttaagctacttatatttaggcctttttttatagccttgttcattcaaattcacttttttctaagaattttttgtccaaaaactcacattataatattttggtacaaatgggtattgtgcatatttcttatgatcccccgaatagaacggctatagattacttccccttctccattataatcaacaaaattgatcactttttcccatcctgatcactatgtgattgattacatcccagtgcactccaatagacaatatttgtctactatagattattctgatcacttcaatctgcccgattattgcttctctaacactactgatcggcgattgcttagcttaattttccgatcagtctcacagtaaatatctatttattattatcatacttttatcataaatttttcttaaattttccctgatcattaatgatgattatgatccctcttcctcaaccgtgctcaccatagttggcaccggcgcgatgtgccgtcaccatagcatcccggtcccagttgaatgtgtagcaattgccatacgtcgggtcgtaatacagtttaaaatccctgtcaaataggtggatacagataccgtactattggtactacggttgatcatcatttacttttgtatgtcacagtcatactgattgaaggagcacttgaggattagctcgtccttttgctgggacagctttatccgttcctccttcggcttttcctccacggcgaacatcagattttcacgcgctctcgacttgatcgcaatttcgtctttcagttcctgaaaatgtgcgcaattttaatttatctggcacactcggtgatcactgatcaaaatatgggcattttatgctcccctctcccctattactttttcacattttgtccctccccctcagctttttggcattntgtccttcctccgcagctttttgcatttttgtcctcccccccccaattttttgacattttgctctctcccccaactttttgcggttttgtccctccccccactntttgaaattttcccctccccattaacccaattttgcccccccccccccccaacttttt

SEQ ID NO: 13551 - DNA, 853 bp, Heterodera glycines
  unsure (1)..(853): unsure at all n locations
tttgctcattgatttgaagaaaggagctcaaaaaacgcatttccgcataaaaatttttcgattctgatgtcattatcggtcactagaaatcactattttggcgacttcgtcactaaaatagttaaaaatcactattttggcgttttgtcactattttttcactattttgtcatttttgggcaaaattccttaacaaaaatgcaataaaaccaaaaaatacacccctaagaatcgagctaaaatttttcaaaaaaatacacccctaagaatcgagctaaaatttttcaaaatatactcctatgaaatcaaaaaaaaaatttctcaaaaatttactttcttggcaaaaatttttaatttaaaaaatttttttggcagattgtaaaaactgaaaaaaacttctttttttaacaaataaaatctgttatatattatacctatgtgtataaaagaaatgtatgcagcccaaaattgcaattattggagcaaaaatttttttttaagtaatctcttcttcaaaactgttttttacccaaaatccatcgtaaggccacccgaaaaatttctcacaaagttgctttttttggctaagtttgataaatatcgtttaaaattctgaggaatttcttaaaaagcagcaccgcaaagacgatgtgcggagaagcgctcgctcgagagtcttggaaaattttctgtctcaagcagcactagtgcgagtaaggacgggcgaatctgggcttagcactcgaagccgaaggcgaagcccaatttttttcgaagcacgatgttcgaagcccaaaaacccgaagttttcgtagctcgacgtttcgcccacccctggtgcggnggcctcgaa

SEQ ID NO: 13552 - DNA, 2180 bp, Heterodera glycines
ccccccccccacctcggccaattgtatgtcgtacgggaatactgctggtagaccccttacacacttgtggtcataatcagggctcccaactaaaaattagcattttaccaacaataaacagcaattggggtcaaagagcagcttataccccttgaaaacggcaaaatgttgataaatcagcagagttgagagccctttgaccataatgaattacgttgcaaaaaaacaaatttcagaaataagcacatttgaaagttaaaattagaaatgagaagtaaactaatctctcttatttcagagaagtgattcctttcaaatctcacaatcaaggcaattataacttttatcaaatttatttttttatttttggctaacaattgttttatttattaaagaattttttgtagtatttaaagcaatgtgccaaactttggttaaaaatttttctcagtgacgaaatgatcagtgacgaactgaacagtgacgaaacgatcagtgacgaaatgatcggccaccagtatttcatgtcttcgtgatttcatgttttcttgcttgaatattttattttatttttcataatgccattaattttgtaatttgttaatcaactatccatccatttttaggtatactgatcattactttctctcggcacttctttattccattttccttggaccttttgcggttgatcgcgtctatttttcttcgaagcttcacttcaaaatattggtggaatatttcggtgggaacgaaatcggaggaagcggatggaaacggcagcgcattaagcgcattttgattttattaagtattatcggcacttctacggccgctttcaagttgggtggtgggagtggatctgtggtgagttaaatatcattattaaaataaaattcaacaaaaaatatttattggcactttttcgtacaatcagccgtccgagcgtccgggagatgaaaacccccgccgccggcacgataatcgcctccgttagagcgcacaaaagaagtgatcactaaaggaacggctgtccgcaaaaagatgaataccttttaggttgttttgtatgtattagtgtgtgtatttattgtattgtgcgtgtaatatgttttgatagattatatacatatgaatatgtaactgttcgtcttaaatatatgagtaagaaatgtattgttccattttttgaatttgccttcgtatttggggcacgactttttcgactatctagttttataactgattattagggacgtgaattttaggttttaactattttttttgctcaattgatttgaagaaaggagctcaaaaaacgcatttccgcataaaaatttttcgattctgatgtcattatcggtcactagaaatcactattttggcgacttcgtcactaaaatagttaaaaatcactattttggcgttttgtcactattttttcactattttgtcatttttgggcaaaattccttaacaaaaatgcaataaaaccaaaaaatacacccctaagaatcgagctaaaatttttcaaaaaaatacacccctaagaatcgagctaaaatttttcaaaatatactcctatgaaatcaaaaaaaaattttctcaaaaatttactttcttggcaaaaatttttaatttaaaaaatttttttaggtaactattttgggttttttggtcttaaaaatcccagtccaactcatttgcaactgcaaatagtgaataaaaattagttttgctcaatttttggctgaaaattatgtcactattcgtcactatttcggactttttgtcactatttcttcactatttcggcatttttactcactattttagttaactatttcggcatttttcttcactaaaattcacgtccctactgattatgctattgaaatcaaatttactactactgtgtgtatgtatttttaaaaattagattattattattgaaaattttggtctttcaattaatttgtttgatgacagtatttcatgtcttcgtgataaatcgtgccggatctctcatatatgattgggagaataggaggtttctctattttacataaaaatcattcaaattgtttgacagacatggattttcagatctgttgatccacaaattgctcctttgaccactaatgagaagattgttttggcccagtgtttttccacgacct

SEQ ID NO: 13553 - DNA, 4669 bp, Heterodera glycines
agttgtccgtgttttggtcccggttccgaccaaccctaaacaaaatgatttgaatgggtcaatggagaaaaacaaatgtgtgtgggactgaactggacattacgcaagatgccaaaataataattttcttaatttttaactctcttttcaccttaattaattgtgcactttcttcacccggaagagagagcagcgtatggagaatatatttgctaaataattttaagcctttaaggtttttgggtaaatattaaaaaaatgtttgtttaatgttaagctggttttgttcacttaattcaaaatgtttataaaaattttagaatttttcctatccaaatgaagatttttgaagattttctgcgtttcaatgaggatttataaaattttaagaccaaagctccggttacgattatttaacaaggaggcactggtgaatgattttaaaatttaattataaaatgtttattaattcacaagaaaatccgccgtaaaaaatatgctttttattttattcaaaattttttatatttttttttctaaataatttgtagatagatttattatatggacagtcggaaatcataacaatgatggttcgttactaagaaaaattatttacaatagaagcaaattcagcgtatccaattgagaaaaataaacggattatatgccagttattttgacaatggttcgataaaatataagaattaatcagtttttatgtcgtaaataattttcttgtttgaaaatttatttaaatcctccaaaatctctcctccaagctgtttcttccattttgaaatggtcgttctatcaatttgcaatatttttgcagtttctttgtcactcatttttggattttcactttttattttccaatattttttcattttttccattttttctttctccgttattctacagcgaatgccaaattttttcttccatttaccaattgcgaattggcttactccgattttcttgcaaatttcggcataattttgtttccattcttttaacgaatattttcttttttgtttatattcatttgtcattttaatgaatttttgaataatttcaattttttcttcatcagtttttgatttatgacatttatttttttgaacaccaaattctttaatccatttttgaatataattactatttgtccccaattttttcgctattttctgatcaattttatgccattctttttttggatattttcttcctttttgcttaattttttcttttattttataatattttctgattatttctctttttttctgctcatttcgttgtttttcttctttttcttcccatttttctccaaatatttcatcaaatgacttttgttgcagctttttctcttctgatccaacttttgcaatttcaacaattaaaaacataaataaaaataaaaatagacacaatttcatatttcaatgataatgcttgacaaaattataaattcacaaaaaaaaattactaatttaataatttaacgaaataaattttatagaattaatattttttcgattaataggaaatgttttccaacgctaataattacgtattaaaaaattaaaagccttggatttattaccaaatctgcaggacaaaaatatgtaaaataggacagtttatgattaaatattacaaagattttcatttccttaggacaaacataaataacacaacacacatttaagaaaaattagttatctttttaatatgttaatttttttacaaaatttaatcgaataaaaatatttcgtcatcagtgccgtctgatcattgctgatccggaagctgaaatcaatgccaatttgacgtgccaaatttcgcggcacttttgtgcaggctgctgcgattggtggtgaaacggacacgggacagccagtcaatttttggggaaaagataaatgtgagcactaattgcggtcgagaatccctaaagtatcgagccaaaatacctgctggactcggtttttgcccaactacatgggcccctccccttcaaccctagatgaaaccaagatgaaaaattttcgctattagttttatttattggtcgatttatgaaatcattggcttcataatataaataaattaaataattaattgctataaaagtataaattccacttattggagaatgttatttagtttttgaattttactcaatttcaattaaatttcactttctgtccgaaaacccctggtgatcaaagggaggggtgatcaccgggttctatgccctcgttctcggcttggtcgacccctttcgaattgaggcccaaggggggccgagaaaggagaagagggagggcgggacaaagagggaaggaaagaaacggcaccaccactcaaaggaggagtgagtggactccaaactgcgaccgtcgggattgacccgactcgttcaccggtgggaagggaagaagtgaacctcggatcatccgatcccgttcgacagttgcagttttcgagaacggaccacggggcagaggaaggccccaattgtacgatttgctgttggcaattccgaagggagggaagggaatttgccgcgaccaaaggagcggtcaacaaacacaatttatttgccgtaggataaacaacaatcggagagagcaaagtggggagcgaaaaagataaggaaaaaggggagcgaaaaaaatggatcagtcaagaaaaacagaagcaaggaaaagaaaaaaggagccggggggttaaataggccccgggcagggagacaaaaaatgcaaaacatgtgaatgggtcggcacctgcgataggcgatgagaaggcgaagggaaagcacaaatttgaaaagattggtgatggcgaagaaatacgatgaataggacaaagagggggcaaaaaatgggaatctgagaaaagagccccaatcgggtggacaaagaacatttgaattttagtgaaatagcgataaacaaatgcaaattaagcgatggaaataaaaaaggaagagaaagagaaaatgggaaagggtacgaaatttaaaagtgagagaaaaataaaatgggaagaagtgtccaacacattccgatcggatcaaaaattcgcctccctggtcccggagagtccgcagggaaatccccgatcattcaacggcgcatccagcggcgcctccaattctttttcttttggctgggacggcggcttggtggcggaggatggtcccgagcgcctcccccaaaacggtcttcatcatccgacgacagttctcgaggagtcccgtcgttggcgttgaacaccaaaaagcccttgcccgtgattcccggccctctgtggagggcgctcactcctttctttcctctgtcattctcgtcgctaatttttttgcgacagggacggccttcgaagaatccctccctccctcccgaggccccccgcacccgaaattttttaaggaaaaaagtttttccttgctggtacccccccccccccagacctagcctcacccaaattttccaaaacttttgctaaattttcaaaaaaccgacaattttttgatgaaaatctgctaaaaatggctcaaaagcgcgaaatttgtcacttttttggacaaaattcgttaacaaatcaaataaaaaaatgcaaaaaatttccccggcggcgcctataggcaccgccggactccctgtcccccaaaaattttttggaaaaaccgccgcaaaaaaagtaatgttaaaaacaaaaaaacgcccgggcgggtgtacccccaccccctccccccaagccaaaatcctgggaccgtccctgacttaagaccgtgactttttttacaccccctcattaattaatagctttttgtaagcttgattaatctgtttttagcactttatgcttccgggtttctcccattgtggcctagtgggtttctcttggttctgtttcttatttttgcgttggctcagttcccctccgtgtagtttttttcttctaatttttcaaaaaaaattttctttttgattccaaaaaaaaatttaatattctgttgattttcaatttaattcaagcatcaaatatttacacaaacatattttaaataaatctttaattagtgccagaatttttcttctggtgacgcctaaaagccctaaatttttcttaaaaataagataaaaattgcaaaaaattacatattaaatcaaaatcaaaaaacgaccaaaagtgattaagacaagattcaaaaaaggttttcaaaggtttttaaaggaataagaaatttttgaaaaaagtctcgggtatcgcgtttttgggtctcggtctctgggtcgagtctcggggttctcgggatcgagtctctgtcgtgggaaattttcggtctcgagcatcacttgtagggagggagctaccgaatgatacgaagaattaaaatttggtttctctgagtaaagttttaatattaacagatttttttttgtgaaaagtggctcggttttggccaattgacgaaactcactcaaatttattaattgtaagtaattttacctcaatttttaagcctttcccatttccccattcgaataaatcccgataaacagctttaatcgcttccattgctgagctcagttggagttcgccctgctccacaagaaagcgtggcttcacacacaaacatctcactaaattt

SEQ ID NO: 13554 - DNA, 3467 bp, Heterodera glycines
tcatctccaggcgactttatgccgaccaccgacgtcacttcacagttcaatccgatcatgcagagccaatgtcactcatcgaaattgcatgctgttcacgtccgagtatggcaacaccggatgtacgaaagtggacctctccaatactttacgcatgacgctgtattgatcacttggctttgccggcagtgcaatggccgtttctttcatacctttgagttctccacgtccggcaaatcagatcggtgagttttgatttatttttagaaaaaataaacaagccaaatatttttttagttggggccgttatcggctttatcaatcaaaggaaagacgattcgacatcaacgtgacttaccaggacataggccgggtgtacgatcagatgccgggcgcgggagagtaccacataatataccaaaactgcaaacattgggcggacaaatttgttccccttggtgagtttattcaaatataattaaattattaattaaaataaataaatcatttgtgaataaattcagttaaggccaaatctcgggtcgattatgttacttgtgcgtgtgacaatggtcactaggattgaaggtaatcattaaatttataaataaggaaaattgggttttttcaaaaaaaaaattaaaattttatgcaaaatttacagtgtccatgaatggcgaagagtgggtgatcttggtgcgatatatctgcgacaattgccgccggtttccgaatatgatggtcagcgtactttttggagaatttggaaaagtcatgaggtaagtattttccgaaatttaggtaccaaaccccctccttacccctccttgggtcatggcaactcgtacaaaaggcaactcgtacaaaggcaactcgttcaaaaaaaagtctaagaattttcaaataaaacttagaattttttcattaaaaaaattaaatggatgttctagaaactttttaaaacacttaaattttcaaaaaatttaagaaaattaaaaaaatcagctgaaaaattagtaaaaaactttaaagaattttttaaaggtttttctaggctagaaaatccatttaaattttttttttatctaaattgtaaattttagttgaaaattctagaaatttttttgtacgaattgcctttgtacgagttgcatattcgctttctctttcctcgcctccactctctctcccgctctcttcctctcgctctcacatctctgcgaaatttaccatcaccttctaacgatgacgatgatgatgacgataacggtctctggtttggctcgatgcccacacaaaacagtgttgcggaaacaccaccttgcaaacctgctacttcttttactaaactatgcattgttgtacataaaatttgcaacttgtcacgcattcattattttaaattttaatcttccatttgttatttatgcattttaaaaaagtgcagttccgtataatcatgcctttataaagccaaaatcatgtacaatagcattcatccccacaaccctcttagttacaataggacgataacgtttcgacaactttacagaaataaccgtcccgtccttaatgttgggcctcaggaaattggggtactcaatcaaaattgaacaaatgtcgtcatcatcatcatcttcgttgacacacaaatggatacttagaatatgcgtcaacaactataaaaaaattcgtcccccaaattggacccgcgaggtctgcgtggacccgttcgaatggatatttggcctcaggccatttatattcggggtccacacgcggttcatttgacgcatttcgttgacaaatgtgacactcttccacataattttcaacttcttcagaccaattatgccaccacacgaaatctctggctcgggctttgcatctcacaatgccaaaatgtgcccgatgaatcatttttaaaaccctttttctcatttcctgcggaattattatttgtctccccaactttttccgaattattttcccatcgaggtataatttatctctctctctaaagtacggcatcaactcatcatcatcgatcggttccacccagcttgcctttatctgtgacagtactcgggacagtatactatcttcaaatgtctctttttctatagtttttcgatgtaaacctatttcatcatcaactgtcaataaaaaaggaatgtcctctctgctgtttccttctatttgttcccatttaattgcaactctcgataatgcatctgccactaaataattggtctgaaattttgtacggcatgtactattgccgctaattccccgtgtgtgggcggaagtttgattctgtggtagacaaagttcgggaccaataaccgacagagtataaatcattgccattttggctctgcataagcgctcacgcataggcaatagcagacgcatcggtgaaaagataaaaaggcaattcgtaattcggcgcccttaggcattgggcattcagtaaattattttttaatttctcaaatgcctctttttcgcgatttccccatacaaattcagggatttttcccctcgttaactgttgtaacggatttgcaatttccgcaaaattttggataaatttacggaagaaagacatcatacccaaaaatctttttacttccctagcatttttcggctctgggaatccttcaatcacttcctgattattcaatgagggccgatagcccttcccatttaaaatatggcccaaatatgtgcattcatttttcaaaaattcgcatttctctctttttaattttaatccgaattcattcaatcggcaaaatactctttccaaagtctccaaatgctcctcttccgtatttgtatggaccaaaatgtcatcaatgtatacggttacattccgaataccctccaaagctttgtccatggtcctctgaaaaatgcttggcgcatttctcagtccgaatggcaattttaccatttgataaagtccccaaggggtaacaatgccacatttataagaactttcggaatccaatggaatctgccaaaatccggaggccaaatccaaggttgaataaaatgtttgaccagcgacccgtaaaattgtcttatccattctcggtattggatatgggtcgggaatcgtgattttgtttaatggtcgaaaatcaacgcaaggacgtaattggccatttgatttttttaccaaaacaacattatgggcccaaggggtaaagctttcagttataacgcccgctttcagcattttttcgatctgtgattttaattctcgttcatatttctctggcactgggtacggtttcgttttagcaggtacatcagaggtggtcaagataggaggtgcttttcctttacaatccccgaggtcataatggtgggtcgaaaatacatttttgtgtttctcgatgacatttttcaattcccgtttttgctttttgaccttcgtgtcccatttcgttttcact

SEQ ID NO: 13555 - DNA, 941 bp, Heterodera glycines
  unsure (1)..(941): unsure at all n locations
ttctcacgcaaaacatgtccgctgcgtcctnttcgtcggttttgttgacatttccacacaactccgcactgtttgcatttcttgaattgtcgacacacattgctcgacaaatgatgactgaagcagtcttggctcgtgaaatccttgccgcatgctgtgcattctctgtaataactggcgctgttgtcatccgctcggcacggtcgtcccactcctatccgaccacaatttatgcactttgctttacattgcagtgaatgatcattagcattatcataggggcattcacacgaaaaacagtagtagtcacgtccaaacaccgctttgcccaccccgcatcgaattccgtcgaaatggccgttgtgatggtagagcgggatttcgatgttgtaattgtccggcccatatttaaattttggccgatagctgcctgtgacgccaaaaatgaacaccttaaatcgctggtttgctgtggcgtatttccgattccaatagtccacgacaatcggcacatagacaaccgcatcatattctctcagatgtattatttgtgcattttgaataaaatgattaatccgtatgtgtgtgtgtgtgtgtgtggcgcgtgccaattttagtctgcctcggggaaagcgcataagggatgattgattattttattataccacggcgcacgttgcgcgcgctgttggtgcctgccgcatatatacaatgaattgacgcgggaaaggctcacttttttcgcaaaaatcaattatcaaaataaaataataatgtccttggaagaccacaattattgcggcgagttaggcggcaacgaaacgcccacaaagagaagaaggagaaatgacgatgatgatggggagggagagccgaaatttcaaaaaaactgcattcgcacactgagcgccgacaaacagtacaaccaaaagttcaaagtg

SEQ ID NO: 13556 - DNA, 2518 bp, Heterodera glycines
  unsure (1)..(2518): unsure at all n locations
tttcctttnaatcatttataataagcattcataattatgttttttgagttgtgataattcttttcttgcctttgcctttttcatttttaaatgcctttaccctttttttgtgtctttataaaattccattccatttctttttttctcggaacctattaagttaacatgagttcctttcaaagtgtctgcgatagttttatttttctcaaatgattaatctcaacttcaagcagttcatatgagctgttgtgcttcgacaggccgacatcaacagaatgacgcacaaaatgcggttgacccgtgtgctcacgtggtccacgtgctcatgtgctaccaaatggttagaaaattgcgaattaaattcgggaaagtttttatggcattttgcattgccatttaaggcggggaggacgaagaatttgtgcgcaaggcaatcgaaagtttggtgaagaaattgaaggtggtcgagaacggcgctttgttggtttcaaggttttgacctctcgttttaaggatcgtcgtgagcaattgtccgttcgtttttcattcccctcctattttttgtgtccatttcggtccctcccaattttttagggaatcgcttatttccgcggtcacttccggcggcaaacaatcaaccagttgtgttacaattccggtcactaattgcctcaatcacattaattgtcccatttcttttctcagcgttcattggatggccgactgcaagtggccggcagaaaagggctgccccacgttgtctacgcgcgcatttggcggtggccaaatgtcagtaattggccattcgtttgcccatttttccggtgcctttgactcccatccgtccttttctgcttcctcttctcaccatttgccttccgtcccaattgaccaccaaagtgccaattccaatgctttcgatgcgccattccctcccattccgtcgttcgttccccaaccacaacaaaatcagcagcggtgtccactgatcgttcactgtttaggcgagggacaacaacagcaaatcgggccgtttcagcagcaggtaaagtttcaatggcatggctttttaaatgctctttctaaattaatttgtccatcttttttcagatgtgtccccaaaatacgactgaccaaagtcaaacgcatcggttcactcattgtattttctgaccaatgattcctttgccgttaaacaattctttcattgaagacaatttcgaactgcttcaactcccttcagttcggagtatcttttaattgtgcctttgagaacatttcactgtcaacggatggttctttttcagaattgcccgaccattggtgttccatcgcttattttgagttagatactcagtcgggcgagctgttcaaagtgccatggcaaatcaaagaggtgccattgcataaatgttaatttgtttcatcggacaatatttaattctttcaatttcaggttgcaattgacggcggaatggacccttccggcgctttgtccgctcgcttttgtttgggcgcacttgcgaatgttcaccggaggttttaccactttgtaatgaaagaaaatggcactttaagtgaagcatcggaacgggcacgaatgcacattggcaaaggggtgggcacacaaagggacagaaaaggggcaaattggcactgccaacgactgatcagttggattttggggaatgaatgacctaaaagtgatcaaaatccgttgacaattggatcaaaggaggaaagatttgtacaacagttaaatcttatcttacaatgatttacactttcataatttataggtttcgttgaaatttgctgacaattgcgaggccgtttttctcaagtccgtcgggtcaaaattaaaaaatgtactgaatttgttttctgttctctttttctcagatgtctctcccaaaaaagcgttttcgtacgaaggtttatgaattttgtagttattggtcaaattttggtaaactttcagccattttatggactttgagtttggcggaggatccggcgggtatgcctttttttaattgtcataaatacgaccacatgtttgcattacatacctcaatgcttttgtaactataaaaaacctcaagcttccaaaaaccaaaaaattttaagattttttatcggaatttttttaaagaaattagaaagtaaaaaattaaaaaaatcggggaaacgatggggggagggaaatagtgtaccatcagagacttgtatacctttttccccttttagaggcgactcgattgttcacaaaatttgtcccggcgtcgagcgaaaagtgttcgaccttcgctgggcgtacgtcgaaatgtgccgtcgacgtgaaaatgcccaactctccggtcagttttggcatgaagttgtcatgcagatatttatagtcaaattcagatccgtttttttttcctttttatgcttaggcatcattgcttttccctttctttatagccattgcccatagcgtacgctcgttgccggctttccctcccaaatgccctcg

SEQ ID NO: 13557 - DNA, 1936 bp, Heterodera glycines
atagtcaatacaatccgttttttcctttttatgcttggtatcattgcttttccctttagctattgcccatgcgtacgccgtcgccggctttccctcgcaaatgccctcgtcttcgctgtgcagtgaacgcagtgccgaaacgggggtcgaccatctgcgaagggtccggtcaaaacagtggcaattgttgttgtgcatttgttactttgcttctgttcagatgtgctgcaccgtttcgcttagttttgtcaaaggatggggcgaagggtacggacggaggacaatcaaagagacgccatgttggattgaggtgggggggggacggagaatggacggacggagaaagacaagcgaaggggaaggacggaaaaacccaatagcaaactttgaacagcccaaaaacaacgagttcaaaaccgcaaagccatgcccaggggacgaaaagcccctatagagagaggcccaaattagagggaggaaaatggcactgtctttctctctgttgctcatcccacttaattaagttttgagtgcaatttgtttttctcgcaggtgcaacttcaccgacctcttcaacttctcaatgaactgcttcaaaaacccgaggtgattagttgctcattccagatggatttgtttgtttcttggcctgatcagtgatcacttcccttccctcctcaaaatgccaatttttccatttcctcccttttttcattatgcccttctctccctcttttcccctaatgctcatttgtgccatttctctgttgtgctttagatttattcattccaacaatgtccatgcacatttcccatttcattcatttcgatagcccgccaaataaacattcattcggttttctttatgcccccccccctccgaattcattgctccgtcgaccttgggatggatggccactcatccgatgaacgacagtccgaccgaccatctgtccgccgttttctgctgtacaaacattgccattgttggtcatcccccgttgggaacattcacttgttcaatgataaaatgcatacggcgatggtttctgctgattgaccaactttttgtccaggacaattgccgaactttgtcactttaattttgaaaatcaaattgactttggcgaggcttcgcctttttcttcattcgatgcgcttctttttccctccccttttgttgttccccaattttgtggtgtttcccttcccaacttatgcaatttgattggtccgattggattgcccccccccaattccatgcaaaaccaaagcaatgaattgggggggggggggggggaagaaaagattcgtttccttttgtgtctttgaatttgcttttgtgtttccttcccttttgctggtaaataaatttaattacacaaaaataggcatttaattggtaaaaaaagaatcttttttttgtctttcattaaaatgttatttcgttaattgccaacaaaaacaaattaattgccatcttttgaaaggtcagtcgattttggcactttcgctcgccctttgcttctcccaattcccttcccggcgtcacttcagtcggtcatttgtccgtttgttattttttggcaattgtttctgggaagaaatattgcgagacaattaccaaaccaacaacagcaggtgggaggatggaaatgggagaatgaatggcaaaaatggcatggaaaaggcgcggggggaaggggaaatgggcatttgggaggggggaggtcactcactccgccgtcacccgtccattcatccgttcattcattcgcttttccttggccatgcttttccggccaccaccaccaattattattattaggccaatgtacgtttctccctccaaacagtgactgtttcattcttccgcggtgaacagaaacatttgaatgcttttgcttttcccgtcctccgatgcttttccttcccc

SEQ ID NO: 13558 - DNA, 2811 bp, Heterodera glycines
tttttattattattcaattaagaactttttgataaaactttaaatagtgacgaaaatttcgcattaatttttttgcggcgccttttttaaaaacttatggaacaagagggtatcgataggtgccgccgggggaaaaaagggaattttgacagatttgggtattggtgaaaatctgttaacaaatcacactcaaattttcaaaatttccccggcggcgcctatcggcaccgccggacctcctggtctccaaaaattttttggaaaaagcgcaccgcaaaaaactgttttgaaaagcaaaaaaaaaagtccgctaggcaaatatttgaaaaaatggtcgatcgtaatggaaatgggctctgacccccccccatggggggccaaagtcgatcgtaagacccattcactgaccccccccccccttgttcaggtatgttttgcgcgcccttttattaattaaaatttttgatgtggcctcaaaacaggaaagtaaaaaaaatcaattattttttatatcaacttatttaaaaagcacttattttttgttgcaatttttactttccccccctcccctccctggctacgcccttgacccgtattgacggggtatccaagcatcgtattttctatgccacaattactagtacatccatccctgtccacaatcctcagtgtgcaaaaacttcatggtggtaaatttgctttaacgcaggaattgagcaaattgttggagattgccgactacggcatgcagtacagggcggtcagccacgtgggcgccgttctcggctcttcacgcgacacgggcaccaaatcggccgaccccaatgacccaaccgtgccgaaggagcaggtgccaccacgatggttggagaattggcggaatcgacgggcaaaagcggcacagaaaagggaaagcaatgagaaagggaaagagagcgaagtgattttggacggaaatcgggacaattaaattcttttatttttatttttgaaattcactgaatttattacgcctttttctcaacataaaatttcaaaagatttcttccattcctttttcccctcattttattctctttggtttctcattcgttcagcaaatccatcttcacatatcggttttggcctcgtcccccatttcctccgttcatcgcattaaattgttcgtcgatgtttcggaatcggctccccgttatttcttccggtgcgttcacatacggactgattgtgccgtcttttctgtgccattgcctttccctttcattcgcttttccatcgtttcgtccgtccattttaatgcgcgtcccttccggcggtggattaatgtctgcaattgttttaagcattttttgccttccattccatgctttttatgctctttccgtttgtcccattttacccgtgtcttcccttccatttgtctgttcgttttctctgtcgatggcttttaatgggccataatatcctggaattgttttttactttctctctcgctttgttactcttcttaacttcgtccgtttgtcttcgtgaactgttttccccagtcttctttgtattcgttcgtttgtcccgcatatttcgcctgaggccccatccgttcgccgtcaacggccggtcggatgtcttcgtgtaggaattcggacaaagggatgggttcgttttctgaccattggatttaattttatgaaaatttatttcattccccccccccccctcccccacctttcaatgttaaattattcgacttttgtccatttgggaggtcaggcaatttggcaatccgttcattcgtcaaaattaatgtctttggccgttcgattccattggctaataatttttgagagatttttattgatattttccacaaaactgctcgagagtctcgtgctttagcaacctccgtaatttccctcttttggcttttcctccgttcgttcgtcagttttcttttgttttgttcgcttctcttcccatggatttgcatagccatcgttgcgaattctttctacaaaaattggcgggagtacaattcaggttgttggcggcggctggggctgaggcaaagcgcgacaaattggtgacgaaattcggggagggcgcccctcgcggggccgtcggtgggaaaacgattggaccgtaacaattgggcggacgggtcgagaaagtgtctaaagggggaggggtggacatactcgtctaaaggggggagtgacaaagtgtctaatcgaggggggggggggggagcgtggacaaaatgtctaaggggagggggggggggagtgaccgcgattcattggcaattatcctcactttttcttttattacctgctgctgctgctgctgctgctgttggctgatcatttgttgatgtaattgcctttgtttttctaccatttgtccaattgtccatcgtccgttgatcgtttgtctcggtttccccgtcccaaactgattgtcggcatttgccatcacattttccagcatgtcccggtcactcaattggtcatttcgtaatttccatttgttttctctttttctctaccaacccttctctctccgaatattttcccattgtaattgcggcggaatttatccgtcgttgggccattgactcaaaatcatttgggctaatggcgaagaacatttgaggaatggaaacgatgaaaaacaaaaagaatgtgaacatttgcattataattgactatatttgaagttttttaaaattaaatctgccgaaaggaataattgaaattagtaaatgctttggtttccctgctattaaaatccattgattgattcattgtgatt

SEQ ID NO: 13559 - DNA, 1131 bp, Heterodera glycines
  unsure (1)..(1131): unsure at all n locations
tcaaatggttatcataaaataaaataaaataaatatctgaataatgagatgttagatcgaataattctttgaagaaaaatcaaaataaactcatcatctgtcgagcggatccgaaccaaataagtgaatttttgctggtttttttatttgatcacttttttttttgttgatcagtttgaggctcataagaagtgtgtgtgtttttttgggatttttaattcaaaacaatgacaattttgggcaaaattcactaacgaatttcaaccaaaatttcaatttttaaaataaaaaaaaactaacaaaaaatagttttatttaatgcaaatatttaaataaattaaacatctggcattggtcttttgcaacaaatatattaaaatgatgagattaaaacggtgattgttcgtaaaaatattaattaaattatatttatttatttgttgccatnctctgactttttctgcttgcgtgtttttccatgcgaggggagaaaagagaggggcaaaaggatactgatcaaacaccaccaaaggccgaaatcacatcagagaatttgaagagcctaccacactcactctcattcattcactcaattgtcattagccaacgaaaacgacaatttatgcaacataataatcggtgcttttcaattccaagaaaatacaaaattaaaatttggcacttttctctctttttgccactaaagttctccgtccggcacgcaatcgtccgcttcctcctaaactcacggattcatttcggcaattagtaataaactgacaaatgtccgctcaatttgcccccttcctaagtcacttccgtcgtccgcgttcattttccggaaagtcattttgtccgtgccgatgtccaacacggcaaaagaacattcgttctgaagagtgacatccctaaaattcatttttatattttttcttttatacatttcgcccattttctcacgatcgatcgatacccaccacattgtgccgatcgtcgtactgaacgttattcgggcgagcttcgcgtccggcgtttcctctttttcttggccgaaaatgcgaagacgtttcgaaaaatggacgaaaaaagggcttgaatatgggggaagccgaacgaaaggaaaaagcgacc

SEQ ID NO: 13560 - DNA, 1394 bp, Heterodera glycines
aatttttcactcagacccctattcttcaccagtgatcgtttttcccggttcccggtcgccctaccgggaccgtgacccgagctctctcaaaattcgggaccgggacctccgatgaccgggaattcccggcccggtcccggtcccagtcccgtggcactctaaaattaaccaatgccggttttaatttaagccgcaaaaattttcgattgtaataaaattgaacgactctgtggcattcgcctgagtctattaaaaagcccagtttgagacttctagttatcatttgattttgacacttaattttgacatttttgtgcttattgtgcataattaaatgtttttaaaaaatttattaaacaaaaatgcattaaaaaaatatatcctttaatatgattttttttaccaaaaactttccccaatgtttttttcttatccaaaacataatttttttattttcaaaagacagaaatttattatcaaaaaaattcggattttctctgtgattctcacaaaaaggacaccaaatcgaaaaaattttatgcttaattttctatcttttgctaatttagcatttttatgttttcacctgctcatcatacaattttgatgctttatttaagtgattaattttaaaaattcgctcctctctactaatgaaaaagggaggtcataatcactaactactaccaattaaaattcagttaaaaaacaacaatcattaccgcaagtgattgtcgcacccacttttccttggcggaatgttgtcacaccgttcatgcgcacctcggcattttgcacgacggcaccaggatgcttgatggtgtaaatcaatgcaccgaatccgtcactggtcagaaaggcacgccagtcaggctcaacctgcacgaaaaatggattacctataacatatatataaccagttaatttttgtcaaattaaggattaaagggatgatttcatcaaaattaaattttgttttgccaaatgattttgtaaaagaactttttttttaattcatttttttttgctcttttataaaggtgcattttttgtattttatttaaagcgcttatgtattcatcgatttaaaaagttttaattttatcattaaaagaagaaataaatataaaaatctaacgctattcgccctagtgcttagaaaaacaaatattttataaccaaatttcaaagtataattaattttagttaattttccaatttaaaaacattttttttagttttattttatttttgcctttctgtagacgccgccgctcttttcggcaaccgaaacaaaattggccattggcacgccaccactgcgcaacaacggtcgtatgtattggtcacgcacgcagtcgtaacggagttcaaaactcccgtggccaattctt

SEQ ID NO: 13561 - DNA, 3439 bp, Heterodera glycines
  unsure (1)..(3439): unsure at all n locations
tatgatcgggtcagagctaaagggaatttttcgcaaaagattatgagcgcgcaaaaaaaatgtntaaaaaattaataacgatntaaaaaattcatatagaaattgtgaaaaattttggcgaattgataaatgggatgggattatatatcattattaagtatgtgaaaagaacaaatgagaaatttggtgtaaacaaagagagcagaaatgaaatggagtaaacaacaaataggtatgttagtaaaataaagttcatcgggggatgggattgaatggagaagaatcaaagaggaatgataaacaataagtgattaaaaaccaagataaattttctaataattttgatatgttttgtttgcaaatgccaacatttagagtgccattgctttggttaaaaacctatttaaaaactatggaattttcaatactaaaaattcctccttctaattatgataatatgaaactaaacatacatagctttaagctgaatggaattaattactgtttaatttttcaaaaaaagccatttataaaataaaaaatttgaaattatttaagataaataaaaagttttgatataaatatgtatatcaaaaatgaatggtgggaaacggccaaacatttttttgttgtgcattagtttaaacttctaaaaaataaataatttggcgttggtggtgaaaatggcggcggatcggcggggcaaaaaacgaggagagggcggggggggggaattaatggcggaacgcggaacaattaatgaaatttaggagagggcaaaaaatctgcccatttaatggcagaggaggggaaagggacgatttgtggctaaaaaatagcccggcccatcccatcgatcgtcgtttccttcttttccgcagtttttctgagccaaaactttacatgcgaagaaataaacaataacaaaaaacaaatttattaatctttgatctctaaacgggcaacttttaagttttaatataggtacatattttttcaaaaagctgaacaattatataaaattattaacaatttatgcaaatataatgttaaggtaaaattgtttttattttttgaaacattttcgaatttggactaaagcaatattgttttaaattaaatacgaaatattaaattaaataagtttattagatctttgatctctataattggcaggttttggaattttaaaaatacgcaaaattattaaaaatttgtgtaaaagagaatgctaaaataaaattgtttgatattgaatttttgataaaaacaattaacattaattaattaaatatgaaattattaaaattaatagcaggtttaaatatgtatataagtagttttttcagccgaattattataaaaaatattttaattttaaatcacttaacattttttaccctgctttgtttcaaaatttaattaaagaaagtaaaaattgtttctcttaattacatagcatgttagttaataacatttaataggctcccaaaaatgcggaaaacttgttgaactgcaattaaaaaggtaaacgcaacaacaacgaccttgattttatgagtaaccaaatgaagaaaaataattaaattgaaacttgtaattggataatttgcaattttaccaaacttaaaatcaatatttttgaaaggaatttatttattttattttttaatataaaaaattacatgtaacgtaagtgtaaaatgcataatttgatcaaatattcatattctttattatgtgttcagttgttttttaccatcctatgcatttcacttcgccatgtgttccgttggcaatccatgcgcaatcaatcggagtgtattgagctaaatgaataataaatgttttttgtcaattgatgctaattattctaatttttaaaaagaagaggaaaacccgaacgccgaaaattaatcgagcgttggagagaaaagaagaattaaaaaaagaaatgtatattaatttctagagcccggacgggactggagccgtcgcgattttgccgggacttccagccccggtcccgttttttggacaaaccaccgagaccgggagtcccggaaaaacgggagtcccattcctgggatcccgacccgctttattttccaagtcccggccccggtcccggcaatttcaaaattttgggctctatagtcgctttttgattacctatatgtgtctccccgcaaattattccaaaatcccaatcacatggaaccctacaattaaatgatgctaaaaacaaaatttttatagatataaaaaaagacattgacgattgttttttgtaaaaataaatacaattatttttaaatgcatttaccaaagagttcttcggtgcttgttgggtctttggaattgcagctcgttttggttgcgacgcccaattggatccaattgtttgtgccaattttcagcatcaatggactaccgctatcaccctacagtaaaaaaatattaaataattcatattacctaattatttttattttctatgcattttcccctactaattgtatacagtaagtttgtacagtattaattctaccgtaccggttcgccaatgctcggatcgggcaccacacaaaatgttgtgtccaacccgtatgtttcaaattcatttagcatcgattcaatttcagcgtcatcgctagcagaccattgaaacgctaaattcaataatttaaaattaaaaatgaagtaaatctaacaatttacaattttttttttcattggccatttctcggcatttttgtgtcgaaatcattcgcattttgccataattcaattgatcatttcgagtcttattttggtccttcgcgcactgtggccgagtcattccccaaccggcaataataaatttggtagtttctgattttgaatttctcatcagaaattttgcgcgcgttgaatcttaaagttttgttttttcattgaaaaccaaatattattaaaaatcattttgtaaaaatattacaaaaatatattaacatcaattaaacatttttttttacaaaaactaacaaaatatttttttttttaaatataaaattattttgggagtttattgtgttaagacttattgggtaaaaaatattaatttaattgaattaaacttattaaaaattaccaccaataccaaataaacaaattggtcgaacatttgatgtaaatttaattgggtttttaatctaaataaatttgaatgattaatttattcataaatatttaattaatcaattactttaattattgcaatgtcatgcaaaattaaatctgcccttgatgtttcatcgccaaaattatcataaattcgataatatttcgcatttggatacaattgtatggaaacaactgcagatttatacggttggcttgaaacatattcattcccgtatgaaattcggagtttttctgttaaaaatttaattcggca

SEQ ID NO: 13562 - DNA, 1277 bp, Heterodera glycines
attttcgaaggtttcctaaggaattgctttcatttgagccattataataaaaacggcgcggaaaaccaaatcaaaaaaaaaaatcaaaattatttattttatgtgtaaaaattaacattcatgtttctctgaacaaagtacatcataaatttttcctgttcatccatttccaattcttcctccgagttcccatcattcgtttcgcctttcttcaacaaattgctcagcaagataccacaaaaaatcacagtgcctaaccattgatttgcaagaaacttttgccaacaatcacttggatcatcaacatgtaaagtgcccaattgccaagccaaatgagacccagaagctgaaaagaattgagataagtgactcaaaaaggacaaaccgaataaagaaagaaaatagggccataactgctctgaaacaaatcccagaaatagcaaattgctaagcattccaagtgaggcaaaagtaagccacaaattgctatggtcaccaaattggacagcggtggacccaatgccaatcaaaagatcgtcttttttatccttaatcaggttaaatgcgtatttgattggcgtttaatggatttgcctgttgagcataaatcgtgtcgtaaatgatcgtccaacaaacgcaagccaagtaaagcggcacacacacagcggaagagaatgtgccggttacagccgtaaatccgagtagagcaccccaattgaaagtgatacctttagcataagaagggggaagtttattaacagattttgaattaaatggtcaatttaattattatttattaggcaaaaatcttcgaattatcatttttattattttttacaaaaaaccgaaaagtaaaatcttttctatatgtatacttattcagtaccaaagatattttgccatcccagtcccgggtttttaacttttgatagagtagttgtcgaaaaattatttcggattcctattttacagaccgaggtagtcgactgatgctataaaaacactttttctaatttgtttggaagtgacgattttgaataccaagaatgagttgtggccaattggtgtaacgcttagccaacgggtagagagcaacgaaaaaaaccgaagacgaaccaagaacaatgcttaaatagcaaattgtggaaagcataaataggaaattgcctgagccaattgaattgcatcaaaatggccagagagacagtgagaagaccggaaaggacaaagaatgcttccttctcagtcacttcaccactgacaagaggtcttgattt

SEQ ID NO: 13563 - DNA, 1492 bp, Heterodera glycines
cctccatcacatatgcttgtgcctaattgtaatgcattgttttgaataccgatgatgaaaaagcagaataattgacgagatttgaatccagatgaagaaaatcgaagagaattgtcagatttgagtttcagtaatgaaaatgccgataattcattggaattgtttaagtttagtgatgcgaataagaaaaaaagggcttcagattctcatcccttacgagtatttctggttacggacttgctgaagctataggatgataaacctataccaatttggttgctcgaatagctacttacccgtttatcgatgtcttggtcccaaagatcgttaagaatgcatccggcacttctcatcaaaaatgctccgcctccgaagagagccaaaaaatatggacttggaagacaacccggaggagcagcgaatgcaattgaccaggcacatggccaatagagtagccaagtacctaaacttggaagaagtggtaattaatatattacagatgcaaattttttaaattgattgatccctaggaaattgaaccgaccaatcggcttgtctgcacgtatcaatttcaaataagaatgaatacgcgacccattgaacagagggaccacggaataactgcggtcactctcgaatctgcgtgaaaattgaagcaaattccacaccggacttggttagcacccacctcggttcatacaaatcatctggttttggcgcattagcagaggaacggagagttgggtagtgccgacaagacgggagattttcataaccgacaaagaaccgattgaataaatttttgcttagaattcgattcatactaaagaaataatgacaacaaaaaaattgaattagtaataattggttaaacatggttaatgattgttaataattggacattataaaacgtttatttgtcggggcaaaaaattgatagaaaataataagtgcgtgtccaagtaatctccggttgaaccgttctcctaactcatataagaatgccgaaaattggctgggctcgtataagcctggccaaggacaggatacattgaggctgccaccccttgagacgaatactgagtttgagtggtcattccaagtgcagaaggagacgggtgctgcggttggtattggcattgttggcgaagcaattcggcaagcttttcggcctttagccttctgaaaatatttacctctttataatttgttttttttatttttctatagcttattttatttttaatcatatatttattaacttaattttataaaaataaaacatagatgagcagacctcacgggaaaagcaaactcctttcggaaaaatgtttacctcgtatggccaataacgcgtttttccgtgaatttctttatgaaatcatctatttccatagcccctttgtaaaaagttcggccgctgtctgacaaaataatatgtgctttggtaaagaatccatgtgaattaaaattcagggaaatggtgcaaaaa

SEQ ID NO: 13564 - DNA, 653 bp, Heterodera glycines
gggattcgaaattggtcaaaatgcgtgtcagatccgtgttcagcgactccgaaaacccttagaaacatattttcagtgacttttaaagttaattatttttttcaaaaaaggggtcctaccatcggtagtattaccccttcatccaccatcaaaaatttataagcctacttaaactccataaaaaccaattttcaaccaaataacaaagacactagccaaaccatatataatatcattaaacttctcatgttataaatggctgcgcccaaataaaggtttaaactctaccgaatccaatttcgccttcatctcattcacttcccccttcgttctcacggcattggcatgcgtttcgcgcaaatgactaagagccttattcagttgtggctcaatggacagattgtactcggccaaggatttgctctgggccaatttgatctctttgtcattaggaagagacgaaacctagaaattatgaacttaaatgaccgttgacttcataactaattcacctgcggcatactatccaccatcgcattcaatcttgactcatcctgtaacaaattctgcaattggtcctctgtgtaatttcgaagcttcgacattagggtagaaacacgagatgtccatcaacgctttcatagtcacgtgaa

SEQ ID NO: 13565 - DNA, 1141 bp, Heterodera glycines
gagggcatcttttgggtcatcaagtggctaacactgtcttcccctgggcacatgcgatagatattccccatcccagccagaaaatccaaatatgggagtatggtacccaattttactggtccgtaaataactcaactccctagaggggcatcctttgggtcatcaagtggctaacactgtcttcccttggcacatgcgatagatattccgcatcccagccagaaatccaaatatgggagtatggtacccaattttactggtccgtaataactcaacaccctagagggcatcctttgggtcatcaagtggctaacactttcttcccttggaacatgcgatagatattccgcatcccagccagaaattcaaatatgggagtatgctacccaattttactggtccgtaataactcaactccctagagggcatcctttgggtcatcaagtggctaacactgtcttcccttggcacatgcgatagatattccgcatcccagccagaaatccaaatatgggagtatggtacccaattttactggtccgtaataactcaactccctagagggcatcctttgggtcatcaagtggctaacactgtcttcccttggcacatgcgatagatattccgcatcccagccagaaatccaaatatgggagtatggtacccaattttactggtccgtaataactcaacaccctagagggcatcctttgggtcatcaagtggctaacactgtcttcccttggcacatgcgatagatattccgcatcccagccagaaatccaaatatgggagtatggtacccaattttactggtccgtaataactcaactccctagagggcatcctttgggtcatcaagtggctaacactgtcttcccttggcacatgcgatagatattccgcatcccagccagaaatccaaatatgggagtatggtacccaattttactggtccgtaataactcaactccctagagggcatcctttgggtcatcaagtggctaacactgtcttcccttggcacatgcgatagatattccgcatcccagccagaaatccaaatatggggagtatggtacccaattttactgggtccgtaataaactcacatcctagagggcatcctttgggtcatcaa

SEQ ID NO: 13566 - DNA, 902 bp, Heterodera glycines
cattttctgcaatttggtataacccaaaagaatatcattcgtttttcattaaagataatataatatcctttctctttctttagacgtaaataatttgaatattctttagccatcttaaaaaaattctccaaatttgtcgctaatcctttgacaaattccgaaaatagagcatcatcaatctaaattttgaatttatttaatttacattgaacgttaagtcttacccatttccattgatcatcaaattccgaatacgcaattatcagatgcttgtcatcatttatttcattggcaccccaaggaccgtattcttttgtccttttttccgcttttttgaacattttctctaactttttgtcaaatttatctccacaattttgtcgaattattccgtctaaactttcatttgtttgccattcattcgctgtgtcaattgccaattgcaaaatcatttcattaattgacaatttttgttcataatccaatctcttctcattattcaataattttggttcataattataattaaataatctgtttaatttatattcattaaactcactctcttccgaattaaaataaaattgaaaaattgtggccaaacaattcaccgcataaattattggtccttcaatttcaattttatttttaagcacaaattttggcttctttgtgtgaatcccaacgtattctctgcacaaatattcgtgcaaaatgtccaaatatttgcgatatttttggcattctgtccgttcatattcttcaaactccaccgcaattttgtcacattgccaattcattctcataaaatgcatgatgccaaggtgtgcttcatatttttgtcttgaatactcactgaattgaatttcttggtgacctttcataaatgcaattagcatatt

SEQ ID NO: 13567 - DNA, 3442 bp, Heterodera glycines
atgaagtatgtaaaaaatagggattgatcatcagtaggattgtccaaatccatattttacttaatataatttatttattatattaaataataatgaagtatgtaaaaaatagggattgattgtccaaatctatattttacttaatataatttatttattatattaaataataatgaagtatgtaaaaaatagggattgatcatcagtaggattgtccaaatctatattttacttaatataatttatttattatattaaataataatgaagtatgtaaaaaatagggattgattgtccaaatctatattttacttaatataatttatttattatattaaataataatgaagtatgtaaaaaatagggattgatcatcagtaggattgtccaaatccatattttacttattatattaaataataatgaagtatgtaaaaaatagggattgatcatcagtaggattgtccaaatctatattttacttaatataatttatttattatattaaataataatgaagtatgtaaaaaatagggattgatcatcagtaggattatccaaatctatattttacttaatataatttatttattatattaaataataatgaagtatgtaaaaaatagggattgatcatcagtaggattgtccaaatctatattttacttaatataatgtgtttttatattaaatgatgaagcaatatttaaaaaaattgggattaatcataagtgtgccaattttggcggatgtttttgttaagtaataaattttttattgaaaaacaaaaactatgacttacaataataaaaagcaatgtaaagattttatttgtcgaccaattcaattaaaaaattaatatgccgataacttatttaaaaattttaacaattatgaattaattaatacatcaaatagtaaaaaattaatgtagaatacgacccattattaatcagaatcccctattttcggttttaataataaataaaaatatattttaaataattttaaatttagaaaatttaaaaaataaaatgcaattgctcttcacattcccaattctgttggtcattctgtttgcaaacattgaccagaactaacattttgctgatgccagttgttgctgctgttggtaagaggaaattttttaaattctctgaaatttttttatattttttaattattacagtaagccttgctgttgtggctgtacctgtgtcgggccgtgccaatgttgtaacccaccactgctgatcaaattgccaaggtccaggcaatcgatgttttgaaaattttttcctaatttttcccgaattttcaggacttgcccctgctgttgcaaatgctgtggctgttgctgttgcaggccatgtaaaatccaaaaagtttttaattttttaaccaaaaaagttttaggctgttgctgctgcggttgcggcggcggtggcggacgtaagaagcgctcaattgtcctccgctcggccattgaagcggccaaaaccggaaaacgtgagaattttcaaaatatattaccgtattttccaaaaaatatacacggcatttcaaaaaacgcatacatgataccttaaaaattcgccggtgaatttagtaatttaaggcctttatttttgatctccctcaagtatgggaattaatgttaataaatatttttaaaaaaaattagggacttacggtgctttattttaggaacactaaatagggtaatcaggacgacatataggttgaagtaatacggtacttgtttttttttgtcacggtacaccaaccccaagcctaattccaattttgacggtaccaacctgctcttactcagaaaatttaaaaaaaatttaatttttagctgctccaccagccaccaaaatgccaatgtcatcacagccatgcccaccagcagaagatataaactgcaaacccacaacagcgcgcagcggcgccactgagtgccaaaagtgtggagctgcagcaattagtgccaataaaagtcgcgcaagacgaatggcatttggcgccacatttttattcgcttgatttttcaaaatttgtcattattatatttatttttgtgagctcttttttgggggtttattttatttatacaaatgctggcggtggtggtggaataaaattggattttgccattcaaaatttgtccgattttaagcaaaatttaaaattaatcaaaattatttgtcttttaatttcgcaaatttatttaaaatacctgcaaattattttaattttcagcaattaattttaaatttctttgttttttatttaaaaattactacgcactgcctcagaagtatctatgagaatgtttaattgtgtcaacaaattaattgtcttcagaaattaattttgtcatcattggccgtcgtaattgggcaattattactaattaaaatttgaagtggagccaagcggaatcgaaccagcaaaagaaagaagaaagcagaacacactacccacttgactttatgcacaaacactctcgccttgttaaaagtaaaaatgaaaacaaaaaatttaattaataaattaatttaataaaaataaacgaaaatttccaatgtctttttgcttggctttcttgagttttccttattaggttctatttttatttaaataaagtaaattactcctattatttaatgaaatacttactagattattttttattatatatttattttattaagaatttttataaaaaatgtctgaaaatttaataatcaatcaatagctaaagatgaatttaaaatgaagagaaaagtcaacattaaatataaatttcagtaaagggttcaaaaaaacgaaatttacccaaatccctaaaaaaatttatcttaattttttggggggcacagaatccaaattgtcagccatatcgaatcctgaatccgaatttaaacaaataaattttaaaaaccttaatatatttgcgataatttttggtattttttctttaaacttttttccaattttatcacaataatgccaattctttctcataaaatacaaagtgccaagagaagcatgcgcagtgaaaaatgttcatttaaatagcataggaaaattaattataaattgaattttatcaaaatcgaaaaaaataatctttgaattttaattaaatgtttgtcagcttaactcccaatgcgatttaaatgccaaaaataaacaaatgatcttttaaaaagcccgaatttgttgacaccgaaaaatttttatgaaaatggcgacgaattgaaagtgtcaaatttgtcattgtattcatttttcagatctcttttttcttcactatttgccgcattttccattgctttttccaattttgccttttcttccttggcattttgtttagtattttcatacattttttccattttttgctcaaattcttgccgaagattgtcttcaa

SEQ ID NO: 13568 - DNA, 2438 bp, Heterodera glycines
ggatttttatgtttttacatattttttctgcggcttaaattattacgagagaagcccaaaaatcgtattttctccgaacaattttcgatttagagcgtcttataaaaacacatattttgacgttttggcacataaaaaacatatcgtacatatttcggggtttgtacatattttggtatttttgagaaaaatttgtatgaaaaacagaaaaaaattgaaaaatacacccctaaaaatcaacttattttcaaaatttatttatttatttcaaatgccgtaaatcgaattcttaatttgtcattggattataatttataaaaaaaaatttatcggaaaaaagatcaattttactttcgaacaccttgaaatgtatgtgttttgcaattgtgcgggcgaaaatgataaagaatgagatttttggaatttttatgcaaaaatacccttggtttttccaatttttaacacatattttagcacatatttcagctttttttagaacatattttattacatatttcatgattttagcacataaaaatcctagctctagtaataacaatgtttaaatgatgctgaaagacaaataatttatttgataaaggaatttttaatgaaaattaattcttccacaaatgaattttgattttgtcattcccgtaaatccttcatcccgggtaaaaatcgtgatcccgatcaccctgacttttctattcccgatcattccgatctcacattctcgtgcaacttttattacaaaacaaggctgacacctgaaaaatacttttgattcgctttaaattagtcaacattaattcctattaatgatgcaacttttagtgacgaaaaatctcgaaatagttaactaaaatagtgagtaaaaatgccaaaatagtgaccaaatagtggcaaaaagtccgaaatagtgacaaatagtgacctaattttcagccaaaaattaagcaaaaataatttttattcactggttgcagttgcaaatgagctacatttcctttataaaattctcttagcaaataatgatattttttaaatcaaaaattttgtcaagaaaaaaaattttgggggagaatttttgaaaaaattttccaattcttagtggtgtatttaaaaaaaaattttggtcgattcttaggagtgtattttttgaaatttttttagatcgattcttaggggtgtattttttgattttattgcatttttgctaataaaatctctgaaaaatgtcgaaatagttaaaaaatagtgataaaacgccaaaatagtgaattttcactattttagtgacgaagcgtgaaaatagtgatttctagtgatcgatagtgagatccaaatcgaaaaatttcaacgcagaaatgcgttttttgagctcctttcttcaaaacaatcgagcaaaaaaaaaatagttaaatcactaaaagttgcatccctacctattaatataataattagctaattatttatttgttttttttaaatatttttagacaaaattaatcttcaacaaaattataaatgcatttggtaatttgtttttatttttagcatctcctcaacatcatttcgctgcattttccatgggcggtggaaatgggttaataattataccataaatttttttagttaaagatttaatcaactattttgtttaagcaatgttagtgcatcggccgatgacgagggctacgatgagcatacagtatacgccactactgtacacgggggagatgatcaagaacagcgccgaattgtgcgtacagtaaccacgagggtgcgcgatccggtgcacacgcgagtacgatttgtggacacacaggtgggcaaatttgaataaaatgcataaaaagcctatcaacactagagcccggaaatttcaaatttgcggatcccgctgcgggattggtactgaaaattctttgcgggacgggatcccgcgggattaatcccgcaaatcccgcaaatcccgcatttaaaatttgcgggatcccgcgcgggattgcgggattttggaaaattcgaaaaaatttcaattaaattcaaaaaatttccaaaaatcaaaaaatgctgaaaaataaatttttaggggctggcgggatgcattaaaaggggttgatgggtcgactaagatttttcgattggatccgacggtaaaaagttgatcggaaatcaaattattaacggttcataaattgactatttttttcttttcaaacccacttttttgcggtgcaatttttcaaaaaactaggaacagagggtccggcggtccctatcagggatggcattccgaggccccaaaaattttcggaagtcggaaatcggaattccgaccccaaaaacgtcggaaatcggaaatttttcaaaaaatatacaatataataaaaatttctaaatattttaataggctaaattttttaattctt

SEQ ID NO: 13569 - DNA, 998 bp, Heterodera glycines
  unsure (1)..(998): unsure at all n locations
ttgtccaaaaattacaaaaccaatcatttcgtcactggtcgtttcgtcactgagaaaagtttttaaaaaagtttggcacattgccctaaaaacaacaaaaaaaaaattctttaataaacaaaagtgttagcaaaaaagaaaagaaatttgataaaagtttaaagttgctcttattgtgagatttcttacttccaattgtgcttatttctaaaatttatttacgacgaactttgtgagagttttgcgaggcccctcgcactagtgctgtaagagaccgaaaatttcacgagactcgaaaccgagacttcaccccaatcgggaccgaaaaaacccgagatttttcttgagtcgagactcgagaccaagactctcgatcaactctatcccgcacatcgtctcttcgcggcgctgcttttctaaggaattttaacgattttatcacaaactttgtcaaaaataactttgtaagaatttttcgaatggccttacgatggattttgggtaaaaaaaacaactttgaagaagagaaaactttaaaattttttttgctacaataattgcaattattatgctttatccatttctttttgtactttttaatatcacagcttttgtttattaaaataaagtaatttattttttcagttttgacaatctgccaaacaaatttaaaaaaaattttctcggtgacggacttaacagtgacgaaacgatcagtaacgaaatgaatcagtgacgaaatgatagggagcctatcggcaccaccgtaccccattgtaccatattttttaaaatatccccctcgatcgccctntttgtcaaagtgtttggcccgcccgtgaaaaaaacnnnnnnntntnttcnnnttcccccctccncnnnccttttctccctccggccctgntgctctttagaggattccccgcccttttncnctcttttntttgccttttttaaggcttatccactttaatgcataatttaaacttttcacgcat

SEQ ID NO: 13570 - DNA, 2259 bp, Heterodera glycines
  unsure (1)..(2259): unsure at all n locations
tgaacgcgcattgatcgccttggtggcgtcttaggtctgatgaaaattacatcatcagcctgcgcaattggctcttgcgggatgcaagactccgacaccaaaccaagcgtgtcagcttggttttcaccggccacttgggcctgggtgagaatggcatcaactgcctgtccacttgtatgtggttcgatgatcattatatcatcatattcatcaacttccattagctcagcggccttggatgtcgactgcgcttcatccgtatgccgatagacaattgggcaaggagttggcaccccttcccttggatgatatggcacattatcagagccatacagctcgttaatgtgccataaaatgcgctttttttcataattgatggataaatcaggcagaacaaatgtgcgattgttcataagccatgactcagcatacaggcacacgaagtacccacaactattaccatcgtgttggaccgtcagattttcgacatcaacaatccctgtcaacactgctgacggcaaaatatccgaaatgatatttttaattttatccgtcagttgcggatccaacctgccatatgtggtaggcaaagaatcggcaaaatgagtgccaaattgcacatcatggacaatgagagtccaatgtccagggaaatgtactggcaaaagtataacttctgccggaacattagggtcgtacccaaatgtcatatttttgtaaggcatgactctgtccaggccattgctccataccattgggtcaacaacgaccacttttcgttgtgatatggttgccaagtatgccaagtatgtggcagcaaagccgtcattgagaaactgggtcatatcattccaacaggtctcaatgtatcttgggccagatcttggggcaatcggtgtttcgccatcacgttcgtaaaggccgattgctgcccatttccaaattttacaggcaaaatttcgcgatgtggcgaaattaatttgcacagagctgaaatcaattttttcaaacacaatgtgcgagggtgccggacttagagcgttttccacagtttggtccatttcagagcatttgctcatacactcgttggttttgcctcttcctttaccggcatgccctcccagttgcttaactggtcgccctccacgactttgagtcgaaagaggcgtcaaagcaatagcttcattggcaaacatgggttggccacactcggcgacctttcccctttttttgcacggcgaaccctggtcactttgagtgaccgcagttcgaggtgtgtcaatgagagacaccctttcttgggtagccaagattggcttcgctccggctttctggggtctaccccttcttttacttccagtggaagaagccggcgtgctcaattgcagagcactaatgtttggggtgttgaagcccctgggcgatgccgctccattcccatctgcactcccgtcagggacgggtgagcgaaccgggctgacagattgctccgtccgccgtcgatagcgctccagttccttcttccttttattttgttgctttgaaggcattctgaaataataaatcagaaagtgttacaaatgtggcacaaagtatgaggaaaataaccatatgatgcacagaaaataaaaatatttatttaaaattgcgcaaaaaggttattctgtcatcattcttcgccgtggagtgtagtcttcctgtgctgaaatccatcagtcagggctcacacatcccattaagaatgcagatgcaaaaatgtccggtccataacccaaaagggcaggaccagccactatttttggtgcgaaccacaatcccccgaaggggtaggtccagcgaccatttttggtgcgacaaatgccccgaaggacctgtcagcgaatcatattggtgcgacacatgccccgagggccagtcagcgaaccgcattggtgcgacacatgccccgagggccagtcagcgaaccgcattggtgcgacacatgccccgaggggccagtcagcgaaccgtattggcgacacatgcccccagggccagtcagcgaacccgtattggtgcgacacgtgccccgaggggccagtcagcgaacccgtattggtgcgaccgtgngccccgaagggcctgtctgcgaaccacattggtgcgacattgccccgaagggcctgtctgcgacccaattttattggccctttgtttgcgccnattcctaaatgaccagggggcagggaactccgaaacacagacgcgttgctgatgaac

SEQ ID NO: 13571 - DNA, 1571 bp, Heterodera glycines
  unsure (1)..(1571): unsure at all n locations
aggggcaggaaactcgaancaacagacgcgtgtnngatgacnagaggacaatcccaccgtagccacccttctgttggaaaaagggaacttcgaacaattagcactgctaattaatcaaaggacaatcctcttttacaaacagttagctgggatacaaggccagaaaatggcgttcccattaggcggcccagccacatgcatggcaaaggccagtgcaagtctgggcgttatttccatatcatggtcgcaaagcagaccgatatgggtgccctggtcgcaaagcagaccggcactgtgtcatggtcgcaaagcagaccgacacggttggctatggtcgcaaagcagaccagcctcgccatggtcgcaaagcagaccggcgtgtgcactacatatcatggtcgctaagctgaccgatatgttgccatggtcgcaaagcagaccggcacgtgcacaaatctcatcatggtcgcaaagcagaccgataagatttgaaaacaaataaaaatgtgagtctcaaaagggtcataaggacagaaatctttacaattgactgaataatatttttaaaaatttaagaacattttttttctgtcaagtgtaaagacttcttaattctattttggagcttatgcgtgacaaagtgtacgaaacttaattcctaactaacctcagatttgggttagtaaaactattggcttagtgtacaccttgccataatttttgtatatatgagcatctaaaaattttttcttattttattcatttcatggtcaaatcgatgaattttaaagatttaaaccggccaaacatagcaattgcttcagaacatttttttatttcacaacttatttacgggatggaattggtataagcccacaatgttgagcgattttggtttttcaaaaagttacaataattgattttcatatgctttaaaattacaatttttaagattttttcaacaaagaaaattgtttccgttttcaatttatgaattgccgaatgcaatcaaaaattttgagctcagaaacatttgaccggctatttcatatggttgaaaagtataaattttttaaaataagttttttcaacaaagaaaattttttccttttttcaatttttgaactgccgaatgcaatcacaattttagagcttattaaacatttgaccggttactttgagaaaaattgaaacttgccagcaatccgctttgccattgaaatgtttgtccaccagagcatttaaacggggcgaaagcaatgccaatttgggccgagttgaagatggtcagaaatgcccatccaaagtgttgcaaaaaatcagctgaaaaaaataaaaaataaagagagaattatctaaaatgtttgaaatatagattaaaattctatacaaaggaaaaaacttaataagcattggtagtttggtgttttttattatttaacaaaagggagggggggggggaatcaataacaaaatttatactgagaaatgaataataaaatataatcgatattcgtcgctgaaaaaagggtttttttttgcgctctaattatttaaaaaccggggaaaaa

SEQ ID NO: 13572 - DNA, 4477 bp, Heterodera glycines
aaaaaattaaaattttgaaaattacggattacgttttacggattacgggaaatcacgggattttttacccccgtcatgcggattacgtaatccgtaattgagaaaagcgccgtaattacggattatggatttacgtaattgaaaatccagttacgcccagccctagtatacatacaaacatgggacccatgttatgagctatttccatattatgagcaaaaatttctaacttttattcagcagttccataaaaatttgggctttttcaaaaattttttcataaatattcttttacttaattattttattattctttttaaaactcacaagattgggaatcatcgtactctgaacaatatctgagcatgtctgcccgtaaacttaggcaaaacacttttgcagaacgacgggaaaccgccaaaattacttcgatggtttgctttaatgttgttaaaaatatgaattttttcaatatataatattatattaaatttttcaatctgtttataggctatgctaaataagttattagattaatacttttcaaagaagttccattgttttcaaattgttaactttttaagcatgctatctttgaataattataattttacaaaagcataaaataaataatctatctataaaactcacatttgtttctgtgtacatggaaactaattcagtttggatcattgacatacactctttaattgcctaaattattatttgattgtgattgcttgaggcacatttttactgatttcgaaaaaaattcagcttcatcttgccgaaaagtgccatgtgcatttttcatgaactgtaaaaaaggatcacggttttataatctttaatcaacatatcaatgtcgggaccggtcataaaactctgccgaggtgatatagatatattattaacgtaatcagaaaacagcagtttagctaacaaaggaaggtctggaggtgtccgtggagtttcggaatgaaatttggtgggtgcatagagcacccatgggttcttaagaaaagtggttttattttctgcgaaatgagtacgagtgccgagatatgacgtgccaaacttttttctatcccaataaatcgaataaacatttgcatcgttttgtgttgttcggtggtgcggaggttgtgcgtttggcgtttgtttttgcccccacaggttcgaatccctcttatgcaaattaatttcccccatcttatttttgcttttatgcaattgaatggccaaaaaatcaatcccactcacacccaaaaatttatttttcgttccacaattttttattcgttttcgcacatatggtagtcattataaaaatgatggaaacagagatacatttcacaataggcgcaccgtaataaaataatattttcacaattaaataattgacacgtcatatctcggcactagtattcatttcgcagaaaataaaatcacttttcttaagaacccatgggtgctctatgcacccaccaaatttcattccgaaactccacggacacctcaagaccttcctttgtgtagcactttcgccttttgacttttcggcgtaaaccaccgcctattttcaaagcttgtcgtcgcttgagtcgtttagtggcccaattcaaagttttgttttctgcggtcggtgccattattattatggcaccaaatctgcccaaaataatctgttggtgatgctggagattttaatttagtgatgaaacaaaaatcatgaattattttcattgaatataaaacgcccgaagggaaatagaggcaaaagtgcgcaagtggctgcactggagaacattcactgggcggaaaaaggacgccaaaaaacggacggataaatcaatgagaaaatggcataggagaaacagacagagagaagagagacgaaaatgagagaacggcaaaatgttttgacaatttgtcaactgaaagcttgggccaaatttggcttccatttgatttgtttaaaaggcgctttatggatgagtaaaaagaagcaccaacgaatttagaaatgaacacattaaacggtcaaaatcaacaacggcaaaacattttctaatcactgacaaagaattttctgatcaccgtccctttcctctcacaattagcggtcactcaacaacttcaaaagctggttacgttctttcgaatcgcacaggtcatcggcaaatgcgagcgcggttctcccttaaattgttttttattggctaattaaatgccatcaaaaaactgaccttttgcatcagtctgacttttgtcggctccgttttgcaacaagaaacagacaacgtccaacttttcttcttgggttgcgaccataagcggagtaattccgtgctcgtcacagtgattcaaattcaaatggctcactgtgaaaggggaattagcaatataatttttaaaaaaatcacgcgaatggcaccgaaaaaagtgacaaattttcactaacaaaaaagatgaactcaaactgtgaaattcgttttgaaatgcaattttgccatatttcggaagtcactgacggatttccatgcggccttcctgacaggcgatgaccaacggcgagcgattgtcgttggcaaacaccaaacagttcgcgttttttccggttaacattttgacggattcaatctgattttcattgacagcatgtcccagggcggtcaaacctaaaatgatttatttatattatttaagcattgaaaaatatttttataaatttttaataattttataaggtacacacgaacaaaggaataaaaaactgaaaaaaatttgtaacctacttttggagaaaaatttaaaaaaaaatttttcaagctaaagccattttggttttctgggtctgcgaattcgatttttacacgcatttcgattcaattccgtaatgtgacgcgatttgaaacaaaaagtcgaaatttaaaattttcgagtttcgcattgaaatttttttcgaaaaaggggagctgccaccggtacaattaccgggtacttgaccattcttattttaaatggaatttggtcccaatttttctacataaaaatatgtccccaattaaaagcattgtctctccatctaaaaaagtgccggaggcctattgggcagataaatacggtaactgacccttgacatccttttgctcaattgtcgcgcccaactcgataagataggacacaatcctaatgtgaccgaagacacatgcccccatcaaaggggaaagaccgttttcatcggcaaagttcacattcgccccgcgctcaattagggatttgactaaaaaggaataaaaacaaaatgatttgtcactttaaagcatattaaaaatttattttgaattgccaattttaaccgaaatttcatgataaattcacaaacgaactgtgattcaaggccgcccctttttcgcatgcatccaacagttgtgcatttggattactggccattaataaggtatttgtcttgcttaaaaattgaagcttaatacaaaatgcctgggggtgatcgaacagagacaataaaacggctgaaccacgaaagaactttacgaaaatctttagaatttatggacgtacataaacactaaaagaaacagaacacaaatattttttaatgtttaagttccaaattttaatgtcacaaaaattagaataaaagatggttttaattagagatcggcatttttagaaaatacggatcaggattacggattaggcactcatacggattaaggataaaaatccgtagtccgtaaaaatccgtatacgactctggtccgtagacgatctctagagttaataggttttagattagccgaggaaatttttgtgttgcaagagtgtgaaaaataggatacgaatgcgaaaaaagaatacaactaaatttaaaaatgatttttatgtagctgtacacgagatggaaagaaaagtgttaatcggtggataattgccttttcaacgctcccattagtcacttctgtagcagattaaatcgggtgggaacaaaaaaaaaacagatcccataaatgagaatgtggaggggggggggggggagatggccaatctgatggaacatatactcattattataattttctagggtgatcgagatgtcttgatcgccccaacgtgagtgtatcattttttaatgacgtatttcctgcaattaaatcatgtaattagttgcgctaatattgattatgatgatttttaattaatgacataacacccaaatattaccataattctcaacaaaaagaagaataagcaacttactgatcctaaaaattcaaaggataaatttcagcatcaatttcctctgtcggagcactgatccagaaactacttcttttagttatgttgacgttgaaaaaaatattccaaggcccaaactgctcctggcagagcatgagtattgcaccaataaattctgtcgatcaaactcaaaagttgtcacaaaatatgaaaa

SEQ ID NO: 13573 - DNA, 1138 bp, Heterodera glycines
tggcaatacacctaataaaatttacaaatactgggccttttgttgatttgattaattgttacttatttcttataaatcctgttgggtctaataaacttaaaaaagcaaataagtagacgggcatttttagtgtcaaaaaatctcaaaataattaaataaaagtgcaaaaaatgccgaaatagagaagcaaatttaaagtgatttttgtttctttttttatcacattcaaaagagattcatagaatttatgcaactgaaacctataaaaatacaaatttctgggtatttagggatcaatttttgacatttcttcgaaggttcaactattcggggtgtattttatattttcattgcatcaaaaaaaaacccaaaataatggcaatattgttacaaaatgtcagaataatggcctaattttttagtggcaaaagtctaaaatagtgatccctagctacgaataagggcattaaaattagatttccgggacaaaaatgtataaacaaagccacagaaaaataatgaaaaaactagaaatagtcgctctatatatcaggaatcccgagaattgctttattttcgcctgttaaattgccgatcgaccgacccattcaaactcagcgtctccagcttgtccaggcgagggatgtcctccaaggcctgctcgtcaagctcgttctcgtccagaatcaaatgctcaatttcctcagagtgttcagtgagcaattcaatgggcaactgactgaaacattttggatcaaaaatcatacaaataaatttggcgctagttgagctaccgaataatttattaaaatttttgtttttcaaaaaggatactaaaactgggataaccccattcatagacaagtctaaaaaaaaaataataggcttggactaccatactaattagatattttagaatgtgtctgttaaatgcaaaactgttgtgaaaaatgttataactccattcagagaaaagatagaaaaaaaataaatataggtttagagagccctgtgaacagctgcatcggatgcaagtgccgccgttgctgtacgcctaacaagtggggagccatgaccgaaaattgcttaaaaaaaaaaccaaacaaactccttaattgttagttcccgttgacaaacc

SEQ ID NO: 13574 - DNA, 1423 bp, Heterodera glycines
cccgggtcggcttcttgggcggaaagccggaaattttaattcggaatttcaaaatctcaaccggttgcggccctggttataagtcatcttttatataaaaaaaaaacacaagagctcagaataaaagtcccctatagtttgggtcaatggcaattcgtacaaaaggcatttgtacaaaattttttttacaaagcctaagcataagcctaagctaggcccaagtaagcctaagcctagcctaaagattaggccttaagcctaagccattatatgagttgccttttgtatgtcatgaaagctatagttttaagatttaaagattaaatattttaaaaacacgcacccaaggctaaggttggagcagtcgagcacggtcaggtcgtccgtagatgaacgatggctggcggtggacgagtcggcgcctgcggacaccacagagccgtgaccattcagcgccgccagcaaggattccgtcgatgaacagcgacggcgactggtggcggtattgcagcgctgctggaagtcgcccagcccgcttagttgtgacagctttcggctcgctttgcgcaaaagcgcgtccgcgttgccgccacactcttccgctccgtccggcgcgttgctgtactgcttgcgtgagattttgcgcgcgcaatgggttgaagggtgtagcattcgatgggtaaagcggctttcaatcaaagggtatggctcttatagcagcttaattagcactcaagttaatggattaatagtttatgaaatgtatttattgttgaaatcaggatatatttgctaaaaaactatcaaatggcgagaaacccatcaaattttgccattttgtagccacaaaaatattgttgtaaaaattttctgttacatttttttgaatcttcataaaaatttacttcctgacgaaggtaatctccccgacattcttaaattctccagccatcactgacaaaatttatcttggaatttcctccccgttccccgacttttctctctccaagtttcggggcttaaccctagaagaaaacatataaaaatagggaaaaacatttcattcggaaaacaacattttctgttaccatgagttttgtcgggtttcataaatggcactgtttcaaaatattttttacagttttatttacgaaatttcattgatttaaaaaacatattttgtactttgcctcatgttttttcttgaaataatgaaaaattgattattatttttcctatgtgaacccaaactacatttgtatgtatcatattttttaaattaataacataaaacaatcacttaagtaaaacaaaatgaaatattttgaaatattaataataatatgtgtgcgaagacaatcactgcccacaaatatatgcccaacagcattagtggggagagaaattaaacagaaaatggaca

SEQ ID NO: 13575 - DNA, 1735 bp, Heterodera glycines
tattcgaattgggcataatttccataattcccccaatccacacacagtaaaataattagttgcattttcccatgacattctttcattcattccccccgttttcccccgtcatcatcttgtgctaatgccaaagtgggcctcccacggattcttccccccaatgttgcacatatttgtaaaatcatatagttccacgtcgaaattcagcctttatgtgtaattggatttcaaagatttcctccgttatgtgcttggcaatggcatgtctgtactttgaaagtttcttggcacgaaccaagcccagttctccaatatctacttaaggaatattagaaaccaaaaattctcatttcttaaaaatactcataaattttgaaacataatggctaggtttataaattatattcttttgcatattttttctattcatcgtctttttttttaatttcttggaaagaaagggaccagtggtgccgataggcgtcgtcgggaaaaattttcaaaattttggctgtgggttgttagcagatttttgtccaaaaagaccattttttgcgagtctggtctctttttttaaaatattttatgaaatctgttgcccagctgtccgacaggcgacgccggaaaaatttagcaaatgagtgcaatttatagaaagtcttaagtaaaaattttttctattagtataataaatgctcataaaatattaatctttttttaacttgaaaaacgaattaaacaattctattaaatgagaacaataaaaaggaagacgacaaaaattgcatgcataaaaaacattcgtggtgctaatcaatttatggcattttaaagctttttgataagctgtaacgatttatacctcttaattccaagctagcccatcttttaattttctaatcagtttgcgtctcaaattaaaaaattatgtttaaatttaattgcccacagaaatgcctttacaacttttatttgtggccgtgccgtttgtccttctgcttattcacccgcaacacataaatgccaacaatgactcgcctctaaaattgtactttgagccaagcaattttgaacacaccgtaaaaatcaaaacgaaagaggagaatccgcgcgatattttctacggggaaacacaatcagaagggtcggggtcattttggcgcagacaagtttaaagattcataacttttttttttaattcgaccatataaaataatgttgatattaatcaataggtctaaatgttctttattagcctgcaaaatttcaaaaaattatattaggttttaaaaaagatatggcgcgctgcgccaaaatggccaggaaaatgcaattttttgaggtttttggccataacttttttgtttctcatgtcagctaaattttttgaaacactatcaagccacttaaaatcataccaagattaaattttttttatattgtaagatttttaatttggcaagatttttagaaaagcgtatgggtgagttcagccgctttgttcgatcccgaaggggtaatccttaattactatgcgtattgacaaagacgagtttgatgattagagagtttgttgatttttttaattgttttcaagagcttttttgttgataaatttttttttcaattcgattatgaaattattatgcccagcagatcattgataatccaaattaggagtgtaacgggacccataacggattaagtattcaagtttttgattaaaattccggca

SEQ ID NO: 13576 - DNA, 2877 bp, Heterodera glycines
  unsure (1)..(2877): unsure at all n locations
aaantctgaaataactntttgaaagaatttcttaaaccccactagctggcagaagtgatcagtggtgacaatttaacatattttttcgaattggacatttgaataaatatttttctttatacttttacaaatcagaaaaccagtttggaacaaagtttagaacagatcgggcgagggcactgatcagaacagatagggcgagtcgtttagaacagatcgggcgagggcactgatcagaacagatagggcgagtcgtgtagaccaatgccgatcccaacgccgccctcccgcgcctcggccgccttcgagcgcagcatatggccacgctgcacattgtcaatggtggccattgttttggcattgcccaaaaagtaaccgacgatgcccaattcgctggtctaaattgaaatggaaaagaaccattaattggtttgtcaccaattaattcaatgatttcacttaccatggcgtacattttcggcttttccctcgcgcgaattgaataattctgaagggaaaagcggatcaaatttgattttgatatttaaatttaacacttgaattgttttaccgtcacttggggcatctccaatttctccatcagaatgagtcccccgcgttccttccgcgtcatcgttcgcaatttgtccgcgagttgttcgtcccagaaattgttcccccctccgtctcggttcgtttttagcacaaatctctcgggcttttcgatggcttcctgtaaattgtatttgttttaaaatctttttagaaatccaccttaattatcgcacgggtttctttgtcgtctttgtccaggccccaaagaccggcgaaagttttgcggacggcggcgattgtttcagctttttggtcgggcaaaaagtgctccaacattcccggcagtgccaaagtctgaactaattgctaaacagctgtttctttttgtgccattcgacctgttggactttttttgttccagccaaatcgatgcggacatttgttgtcaactgaaagcaattttattcaattttgtccctatgaatattttattatttttattatatttgccaatggcatttattgaattattattaatttagtccatttaacactttttcttacaatggcatttgatcgctccaactttcgtcgaatgtcccattccttttccgtctgccaatccttctcaaacagaaaatttcgttgataaattatcgccacttttctccctttgtacgaaagtgatgaatcatttgggtccaaaatcagtcttaagaagaaaaaatcaaccaaattctgatcagtcaactgagtctattggatttgtttggcattttgtctattttgtatgtctgtctgtttacttttcgccacattcctgcaatgtaaggcgcacaatttcgattttatttcccgaaatccgttcaatttcgtattgtacgagccgttggtcaaaaatgctctgcacttttgtgtaactcataaacacaatgacggacaaagggtcgttgaattgtttcctgatttttaataactaatgaattaagtgtttaattactctattattattatgtccattttactgaccatgctttgaccagtgcttccgctgcgcctgcgcatgactcattcggcggcaaattggcggtggacagtcccaacttcgagaacacgcgcctgtgcactttgctgacgccctccgtccgcgcgtttccgccaattgcgcccatattcacttcgaccttaagacaacaattagttcgaacaaacaatttggttttgtgtgtttgcctgcttcagttcatattctccgctttccgcattcaaatggcacatataatcctaaaaattgagggaatttattatatcttagaggtaaaggtgcctttttaattaattaaatttatttttaattaataattattgaccgctcgttgcaaaatcagactgatcggctgtttgttgcccctctgctgaacgtcgtccaaaatgtccaaaaggtggccaatgtaagcgtcgcctttgcccgcctctccgagcgttctcttcaaaaattcgtagttctgagacacgcgaaagtaaagcaattggaacgtcttaaatgtttccgcttttttcaatttaattatatttattaaattgtgtaaatactttttgaacagcttttgcttcttcaaagagacggcgcggaaaaggcgaaggaaacaaagcgaagggaacaatctcaacgacatcgcttctgtaaaaaggaaaagcaaatggtcaaattgcaactcaaaagactgaatattcaaagccgagaaaaacataaaagccaaatcgaaagttaactaaaaaatgattaaattttaaaaattaaaaggtccctcctccctctcctccctctcttcccgtgctttgttttgctcaccgttccaattggtccttgactctgttcaccaaactgacagtgtgtgcccaatcgacggcctcttgcactatcgtttcaaagtcggcatcgctctctttgggtaattaattaattgctttgtatgtaattatccattccaaataccgtaattgggctcgacagactcttcggcacggattggcactgtcgtcgaagtggcaaaagacagggggaaaaggacgacaaacaatggcacaaggaaaaagacaaacgcagacgaaaaattagtcattttcagttaaaattttattttcaaataaataaaaaacaataacaatttaacaataataataaagtaattgatgaaaatatatctcaaattcttatttataattctgcaacaggaaacattaaacaaaatccaactgtttttcttcacgtgcatttcattgggaaaaaaacaaacggaaatccgtcaaaaaggccaaaaa

SEQ ID NO: 13577 - DNA, 2595 bp, Heterodera glycines
ttttgctttcttatggcctgttgctgtcgtttaagctcttccaactgcttttcctcctcttgctttttctaggtctcgttttccgctctctccgcttccgcctttgccgctctttcctcttctgcgtttgttaccattgccactctctccgcttccgcctttgccgctctttcctcttctgcctttgttaccattgccactctctcttcctctgcctttctttcttttgccactctctcatcctctgcctttctttcctttgctactctctcctcctcagcctttttatccttggtctctttctcgcctttcttttcctttgctattctttgctcttccttcttttcccgtgccagtttttcctcccttgccttcttttcacttgcctctttctcttcctttgccttcttttccttggctgctttctctgcagtcttccttctatcttcttctgtcttacgacgcctctcctcttcttctcgccgtctacgttcattttctcgctgctttctctgctcctcttcccttcgctttctctcttcttgtgcccatttttcatgccgcaacgtttcttgttgagccgctgattgcttggtcaaatatgaaagtgggtttaagggcgcttcgcccgtattgtcttcttcctcctcaacaaacgagacgtcaagaatctcgccctcctcctcatcgtcgtcgtcaatgttcccaaaacttgcatgcaccggtgcggacctttttcgtgtcaacagccgttccacttcggcaatcatgccatgatgaatgcccctctcaagctgctgtggcgagagaaaacttccctttggcacacggaaacggtattttcggccgtcgtgcaggtgaacaatcacatattgtcggtctgatgtacccagctttgcccaacttaagccaaaaatcggacccaatagccatgatttttgcccacctgtttgggtaaattatgcctgacagtccaaccatccacccggccccatcgaacaccaacttctttggcaagtgcactttgaatttgtttgttttatttccaacaaagcctggcgtattgctcggcaaaattacaaagaaagagtttgtcatttgatcaacaagtataaattcttcaaaatgagatcgtccttatatcgtggtgtgccatctcggttcactttcccccatctttgatccagcggaaactctttgccatcgtcgtcgtcgtcgttgccggttcatccttctttaggtgcttcatgatcagatcggtgcaatcaaagttcagctttgcacagtcttggcaaaacgattgggtgaactcaaggcgttgctgctcgccattctgattgatgagtttgaatcggctgttcccctgccggaaattgtcatcacgacactctttgcacatgaacgtgaacactccatacttaagaaattttcctattttttcaaattaaatattagccaaaacctttgggcgggccaatttccaaaatatggtcgggtactcaaacacattggtcggttgttttttgggcgattcatccactaaaatttggctaatttaaagaaatttgcagaaaaagccaaaccttcagcttccatggcttttgctttcttcattgcggaagcaatttcctcatggattttgtccaagcgaggcttgcgtcccctttttgagggccccggttgcaggtcaagcagtgtttgagtgttgttgttgtctccaattgtgatgacgtcatcatcattttgaggggaaaaattttcccgtttcgactcatccatttctttaaatttaaaaaaatttaaaattattataaaaaactcaaaaaatgattacttttgttctcaaacaccaattgatcattgatttttctcggggccattacgattaagaaatagtttatgattataattgttaaaagcataaaatgaacctgcgaaaaaaaaacacgtaattattgattgatagtgagaggggtgttagcgcgcagcgacctccagacgggctgtcccttcttaatcgataggccacgcccatccacaaacacatagacgagagagtagtggttagagaaagatacaaaagggcgccaattcaaacacacagtgaatccccaagccgatttattgattttttacagattatggtactccctctgactgctgccctatccaaactgctaagctgtaaacccgaaaatttagcagaatatttgaacaaccccgaggcagtgaacaaagcgaacgcttacttggccggcaaaaaactcaaaacaacctaccagggtcgtgattccaagaccaaagatgtcaagttcggcacattttcggtgaaacccgctgcggaaacctacgcctttgagggatttcttggcaagtttccaaaaattcagtttcggtctaacacatatgcgttcagaggttaaagtccaccagtatttctacataaagcaccggatccgcctactgtacccacagctgaagtgcattgttgagtaccacaacaagggccactgcaaatactacccattgggtatacaattttgtccggaaaaaaatcaataatcattttcagagttgttggccgtgaggaaggcg

SEQ ID NO: 13578 - DNA, 1916 bp, Heterodera glycines
  unsure (1)..(1916): unsure at all n locations
cccccccccnccccccccggcgatgtccgtccgtccgtccgtcggctgtccttccgccagccgacggtgggcaattatgttagtgttcagtgcattttttgtttaaagtgtgagtagtgtgatgaaataattttctgagggtttcgaaatacataaatgcttaaaaatattttttttctatatttctatttttaaaattatttaaatatctgttttttattttaaattaattggttaaattaaaatgatttttcttatttgtagtaaaatttgattgaattaaaacattaaataatataaaatttttatatttagaatttttatttatttgaaatatttaaaaagaaatttttttgtttaacaattgaaattaaattttaataaaatcatgttgcttttaaaacggaaaacaaattaattcagatttaaaatttattcttcatgctttcagtttaattaaaattcatacatataaaatttatgctataaataattagtgtttttatattttttcatttaattgtttaatttaatagatcagcattataattaaaaaattgaatatctactgagaaaaaaatatttttttttcaataaataaaaagatcaaatgccaaaaatgtcattacttcgtcccattttggcatttttacccgttttattatgcctttactttatgtagtttttttacgcaattttacccaccaaatcgaccacaaattttcttttttgcgcttccgcgcggtgccgccgcgccgtttccttccgcctttctctctgacgcaatttcggcgagcggcaccggcccgatttttgtgcccttccgttcaccgacaattcaaaattgtatggatggatgccctcattatggtaccacagacagacattacggcaccccattaaataatatattacttaactaatagtaaaaatgataatggcacaaaatgccaaaaaaagtgtaccgttctcagacaatgaatgaatggatgaggtcacacattggcccgtcactgattatgcgcaagcaaatggcaaaatggcaccgacgaaatgccaacaatacaaaaaaaagaaaaaaggacggcaccggcaggcatttttcttttttggttttcgccctttcaattccattacagtacccagcctaaacacatgaccaatttttttagtgtggggtgcaattaacataatgccaataatgggtgccaaaattaaaataatggtaatgccaaattcctcctttagtttcagcagctcaaaattcaaatgcactgctttagttaattgaaattatgttttaaagttaatgcacatacatataatggtggccaattaggataagaaaaaaaattcaaatgctttttcatcgccgtggcatgaaaattaatttatgcgcgtgctaatcatgcaaaaccaaaaattatgcccatttttgaagccaaatccctgtttggaatgacaaattttttgtgtggcattttattttgacatttaaaacttccaaagttaaaatgccatcttcttgacggcaaaatgccaaatttcttcaagttaacacttaaatttttcactaaattgccaaaacccattcctgtcattttcgttttttgtctctgtgccaataattttcggtccggcacttttctgcccgccaaaaaatgccattccgggtgcctttgagcgcgtcatttccggcacattcccagcgagggggggggggggggggagcaggcggacgctgcgcttggccacaatcaccgccaaaaattcaaaaaaaaaacgacaaaatcaaattttgccctcatttttatgtcactgtgtcctccccgcactcctccaaaaattttcgattttcagcaaattcctccctctcacaatgcttctcccaccgacaatccatggcctaatttctt

SEQ ID NO: 13579 - DNA, 2181 bp, Heterodera glycines
tttttggccacatgcttttggccacaaaatcgccgcccatcggcccatcccccgcgggggccgaggcgttgggctgtcaatttgtgacccctctctctctccccaccccatgtgtcacacgtcaccaccgccacattgtgggtgcccctagaaaaaccgtttttttttttgcctgttttacaacgtcaagcaccgggggagcaaagaatttttgaatgcatttttagtttggccaaagttatggcattttgaccgcctttttgtgccaaaattaaaaaatctctttatctttctttctctgtcgctgctttatagcattctttatttttctattaaaacaaaaaagaataaaataaattctaagcatttagcaaataattttcccaagttaaaattcggcactaaaactgccaaatgttttttttaattaaattttatttctccaacatttatactttaaattaattcaccaaattgtgccaggtggtctcttaaaagtttaaaccattgaaaaaagtgcaaattggtaattttggcacttttcttcactttgcccagacttggcattttgagccagtgccgttgtcctcatttatctcttttcacaattacgtcattttggcgccccattatagcaccaaatttagcgcctctgaatgacattttattcccactacggccgatgggcagactcagcccgagaaaattcagtttcctggcactgacttggcacagcccaccaaacatttatgtacttatatgtagcaataccgtaaattcaaattaagtaattatgtataagaaatgttacaatatttgagggcacctgcgaattccggcaccggttggccacgtgttcctatttttggccccaaaattgctggccgatgggtggcacttggccaaccgttacatccgtccccctcaattcctatgtgtgccaatgccaaccaaaaaaggcacccaaattccaacatgacagctctgaaatttgagtaacttcaccatctgtcatcgctcttttgaatttgcgcgggtaaaagaaaagggagagagggcaaaatgccaaatttggcaacggaagtgccaaatgcccagaaatttaattgaattttctctcctttttactttttcggcaattaattggacaagaaggcactaatccgttgcctgccatcaaactttcttccgcccaacatgtttggtgccaaaaaagtagccattagcgcaatcccccgctaatttttaatcggattttaatgcaaaaatgatgcctttaatgtgtgagggtttcgcgtggaagaaatgtcaacaaaatgttgtaaattaaaaaaaagcgcaaaattttcgtaatttttaaaagtattttttgcattcagtgcattttttgattaaatattgaaataatttaaattattggacactaattacacaatttgttccgtttggcccatttttctaatgccgataagtgatgggagccggtttcttcactttctaaatcccggttccgcaaggtttttttttggggctcggcatgccgtttcccgaaattatttagggcctagaaattcccaatgccaattcttgaaattctttgatacatcggaatgccgatttcgtgatttctgaattttcttggcgcctcggctcccattcctaatgcacatttgtttttttggcattaaatatttcaaaaatttcaactaaaatttaattttatagatcccaaaccttggcattttcttttattccaatgccattgttgtccatacaaattgacagcctgatgacgacaaattcttatgggttatgcttgaaattccattcccccccccccctcgcccaagggcattcttttttgttccttaggggctaagcaaaaaaatttaacgccctccggcaaaattttttcacggtttacacattttgccatattttataggcaagggacaaaaaatacatatgtgtccaggccatttaaactaattttgcgcccaatttgttctgccgctactctcttgctaatttgtaaagcaatttgcggcaatttttcgcgcgcaaattttactttgctgtgtgttataatacccagcggcaatttgtgggtgcatattaattatgccaattcaattaggcacactcacaaattaaccttttgttgggcaccaaatgccgacg

SEQ ID NO: 13580 - DNA, 2008 bp, Heterodera glycines
tggccgtcaaaaaattttaaattttacaaaaattctctccctaaaattaattcagaaattacatggtttccttcaaatcttactttttcatttactaaccctatctaatgattgattgatttcttttaatggtttttccactaattttttcaatgtttttatttatccaaagattactcaacaccttttcaatagaagttttatttttaaataaatataaatttttatttttaattaaaaaaaaatttttttttcaagacttctttgtcatttcccgcaatacaatcggaagcccagcagatgcccaactccgtcgctgctactccttgcgcccccaacccgttcaacaacaatcacttcccacaatcagatgcagaaaagtacaacaacaaacagtgttgaagtgcttcagaaaaatgagcgatgacaaaattttgctgtggttttgatggtcgacaaaaattccgaatgctttttaattttttaatttatttatttgatcggaataaaaacaaggtattgcaggaaaaataattttttataatttaccagctaaatagagaataataatttgggctactccaaatgcttctttatattgaaaaaaaatacacaaattgattgacaaaacgtcaagtacaatgaattgcgttaataattttcaaaaaatttcgacatcacccaattgcgatggtcttttcaatatttattactacaaaatttttaaattttttcaattcctctcaacatacttaaaaatttatttgtaggagataaattatttattttaatttttatcaatgaactgtgaaagtgatagaaaccctcatggattttaggatgaccgaaaaataatttttgaccaaaacaaaaatcatttgtgctttttcatgaaacagaaagaaatgcttaatcgttaatattagaaacaaaatgaaaaagtgtaaacaattttattcataattttgctaaaaaaactaaattcttaattcataatattgtaagacataagctaattaacataaattgccgaagcatttaagcacatttcacattaattttaatctctcttttcattttcattttaatttatttattttcccgttagcgatcgatccgacactcctcccctttccatttatgtctatttaagctgcgatctctccattgatattcacttaatcatgattatgtagtttatttaatttatgtaatttttgtgattttatttaattgtatttaattgtaattgttatttaaatatttaaattcattgcgcatttatttatttatttgttttgattttatttgtaattgttttccatgcttttcctgaaataaagccattccagaatggaattggaattggaatgagttggggagggaagtgggattgatcaccccaggaccccctcataaaaatgattggatttctaagggttgggagtcccaaggcctaattcagcacgttccactggcatgtgtgttattggtagcaccggatggttaggcatttggcctgggcggctaagggacaacccataggaaaatgttagtgagggaaaagcatggaaatgatggccatcagtgagtgcttcggcaataaaaagaaagtcctccggaggcggtaaaaaggagaaaagaagagagtaaaaaaagaatgccccgataaagtcagtgaataccctttgggatgcccttttggatgaaaatgcccattaggatgaaattttgaaaatttgggatgccccttaagatgataaatagataaaaaaaatgactttcgggatgccctaggatgcccttcgggatgaaaaaaaagaaaaatgccccgggatggcctttttgatgattaaatgcccatttagaagaaaataatggaaaattttgaaaacccttccggaaacaaataccttgaaaaagaaaattcaaggatgccctttaagttgaaaatggtgaaaattttaaaaatgccccagtaggaaaaataaataagtagaaaaaaaaa

SEQ ID NO: 13581 - DNA, 1563 bp, Heterodera glycines
aaaatgagatagatacgagagaacaattagagtttgatgagatgaacaaaacccaagaggcccatggaactgcaccttttccttttagaagacctccagggtctcccagactgaatattccagcaactcctcctgctaatttagcacctattttccaaatccaagcaccaaataggggtaaggtgaatgcactcactgaagtaggcacttcgggaccacaaccagggctatttaatggtgaaattgcttcggcatttgatgaatgggaaatcaaatttagggattatattgatgtttttggtacaaattggaatgaatcagagaaattgaatcgtcttaagctacatttgggaacccaaacacggaacatttttgatggacagtcctcattttcgggaattagcctacagaaaattagcagcatgctaccaaaaggaaggagagtcagtaagtgacttcattaagcgcttagttcctcttgtcaacacaacttcagctcaacttccgcctgaagcaagagaagagatgatgtgtaggtgtctcatagaaaaagttagacccgaatttcagcgttcattacagcttgtaggaccacttattgggagaaaggactttcagaaactgacagcatacattcaagagttagaagtctcaattgaaagggatgtgagaaatgagagcttcggcattcaagcacttaatacaaatcctagtcatgttccacaaggcaaatttaacacatggggaccttcgaaccctaacaatattcaacttgggcacagaacatttagaaatgaaaatcgtgatcagtcagacaggagacccaataatttttcacagaacaatagatacaatcagcaaaggagggattggggcccacaaaatgatagaagatggaacaatcgacccgtctgtcattactgtaagaaaaccggacatgtacaatacaattgcagggagagacagaatgatttttctgggcaatttaacaatcggaatcaaacacgatggcaatctccgccacaaaattcaaatagggacaattggtacacaaatgagtcaaaacaattaaaaaatatggtagaagacttagcagttcaggtgcatgaaatgaaaatgaataaaaattacgcttcggcgagccaacagaacattaaagcattacaaatgattcatacaaacgaagaaattcaaaaaattgaaccaaagaaaaattcttttgaacccaaaagtatttcaagttgggagaataagcaagggaaatccaaaacattttcaaacattttaatgacaattacgcttttaaatgttttaacaactgctattggcaaacaacaaattttaactgtagataagcctatgatttgccaaacacaaaagcaagcaatgctttgggagctaccaattattcaggggtgtccgacaataaggttaagtgtagataattcacctattactcaaaatcgtcagctgtttatccctaacagcattgaattttcaacaaaagcttgggcttgtaggaaaattaagaaaattgttagaataatatacaaccactaacag

SEQ ID NO: 13582 - DNA, 1783 bp, Heterodera glycines
tgcttaatggctaggcttcctatttctatgcccttctcccgggttttagtgcctatttaagatgtttcggaaaaacttttcaaaaaggtcataaaattaaaaaaatactcttatgagtttaatctttttaaaaaggtaataaaaacgaaaatttaattgaatccctaaaatattttttctccttttcttgagaaaaatttttgatttttaaaattgtcctattcgagggtctttctatgcctgttaatgtctgttttgtggattttttttgttgcctttttaggtgcctattttgcgggcttttgttgcctaaatatcccacacctggtcattagtcagacaattatttaattttttaattaagcaaataattggttttgattaaaatccaattggcacaccgtccgtcccggacgtgctcaaaaaatgccaaatcacaatcactgtagccatattttgcggacaaaatcggtgaacaaaattgtgtcattgtccacaatgtccaaatcgtctgggaagcccaaagcgtttcttgtccacaacagttatacttggcaacagcacttcttttgtctctggaaaaaatgttggaaaataaaatttttttttaaattttttttcatgtgccttaaaagaaaggggggtttgcctatttttcagcattttgcttattttatgtttcttttttaagcagtattatcaaattttccaacaaaattcgcaaaaatttttctaaggtttcctggcggtgctttatcaaaattattagtgtgtctaattatcttcaaattttctaaattggcctgaaattgcccaatttttcatatttttttgtgtgtgcctaattaggaagtccttgttttttaccatttgaccataaataattaatttaataagcattaatgtctattaaattctaaacatagaattaattggtttttaattaacgacatttaccacttctcattttctttgttaacgaattaattgttattaatgattttttccctaattaattgcgttcaatattgtttgttaattaacaatttttaataataatttttttttaattgtttctcagaatttctagcaatgagcagcaccttcttcaaaattgatgagcagtaagccaagcacggcgtcagcaacaatgaattgttgtgaattgaatcgacgaatgccaagcggacgtccacaaattggaattgttttgcgttttccttaaaaatggaatttaaaaaaaaaaattaattatggtaaaaaaaatttgaaatacccatccgttcataaacattaaatttaaaatatacaaaaaaatgcattaaaacaaattctaatttctttttggtactagtgcattttgtatccgctgtttttttagaagcgtagccagatagtaacaacagtgcaccaattgctgtgtcaccgccgcactgtatagggatgaagagaaaatgaggtctctgtaatcccgcaaaaagtgacggcggcgatttttaaacttatgacatactttagaattgaaactgaagtccaagatggatatgttggtgcatgcaataattcataaccaaaatagatgaaatgataaactaatgtattgctatttaaaataaacttgctttcaatttctgaaatgttttgtttttaaaagtatagcgacaatatttcttaaaggaaaatctactaatgttatttacaccctttattattaaaaatcgttaatatttcaattttttatcttattaattatattctattgaataataaattcactttattg

SEQ ID NO: 13583 - DNA, 2520 bp, Heterodera glycines
  unsure (1)..(2520): unsure at all n locations
aaggggtcgtcggcccggcgaggggggaaaggaggaaaagtgtccgaattcgaacatattttcttaaaatttatcacaaattttcacagttctgcctcccagaaattttaagaaaatcaaaaaaaaaaaaggtttatttacatatatacttgaacaaattttcgcaaaaccagggttgtcagatgaaaattttcaaaatcataactttgcaaacaaaaaaatcatcaattggggtaaaaaaatcaacattttcaataaatttattagttaaatgcaagaaaacatgaataagtgatctgttctgatgagtttttttcagatttttctggcaacttggaaataattttttggtgattaaacattttgttccattaatttgcatcgtcaaaatgggaggccaattagggcatggtcttctaagacaaaaatagtgggtcaatggcaactcgtacaaaggcagctcgtacaaaaaaaaaatttctaagaattttcaactaaaacttagaatttttagataaaaaaaatctaaatggattttttagcctagaaaaactttttaaaacacttaacttttcaaaaaatttaaaaaaatcagctgaaaattagtaaaaaactaaaaaaaattttttaaaagtttttctaggctaaaaaaattcatttagattttttttatctaaaaattctaagttatagttgttgtttttttgtacgagttgcctgtgtacgagttgccatgacacctaaatttggaactttttcgaccttaatttcgcccttattttgaacttacatcagggctgccatcgtccatgctccgttttcaaggacgggtatggcgatttgcaaggacaaagtggaaatccaaggacatttaaaattttattctatgcaatgaaaaattgttaatatttatttaaatggcttgtatttttcaccggaatggattttttcaaacatttttttgttttcactgatttttcctcatttcaccgcatatgctcttttacggcgcgctttttccaaaaaatttccggggaacagggggggggccggcggtgccgttttaccaaatgctcattttcaaggacgtccttgcatccaaggacattttttattttcaagaaagagggcgcgatttcaaggacgtccttgccattcaaggacggatgacagccctgacttacatacctatttcaatttatttctgacgaaacattaacgattaattcttgatgcttttagaatttcatgtgatgttttctgtaattccattgaatgatttgtgtcaattagcaaataattcatgcttattgagtaaacattttaataattcgccaattctcaatggaatcttaaaaaatgctgaaataattgaccacctatcgaagaaattacaattcgatgaatcagaaaaaggtagggatatccaattcatcgcagtttggagatcatcccttcttttagcacttctttccattgtcaagcgcaatgttgaccgtcttcatcaattatgcaatgaatggataaataccggacacttctcatctattcccgaccattaccggttattgtacgcattttgctgtgccgttcgtgccaaactcagttatttacttaaggattatttcgtaagtttttagaatgaattataaaataacagttcgatcagttgtctctccgacattgtgacgatgggttgctgaagggcaatgatttggaggatgaaagtctgtccaaattcgcttctttcttgtgccgcaaatttcttcctccgccctcagaagtgccggaacatcagaccgatgtgttttatccagaataacaattaaatcaacatttaaactaagatttagtcaaaaaaagcgcctaatttactgccaaattctgtccaaatttcgtcttcagaattgccttcgctcgaatatttcttcaacaatttttataagcttcaagtccccgtcatcattcgtggaatggtctttttttcatttataaagtttatatacatataattaaacatttatttaggtgaatgggtggccggcatttgaaaaatggagcttttcttatttgaactcgatttgtgggcatcgtttggtccctgttgaattgggtagtaaatacacggtccgtatggaatatttttggcctttttaacgaaaatttttgttcaaaaattaggatgacgactggcgccagcagatgatgagtttcaaccaatatttggacgattttgtttttcccactaccaatgtgagttataatcaaagcatttttttgcaaattctttttcctttttgtttgatttttcaagaaaaatgggtaaatttttttgaaaattatgcacagttttcttaacatattttaataaaagttacaaaaaaaattaagattctagtctaacaaaaaaaaatttttcaggaatgttttcggttacacctaggttcaaaaaaagctttgaaacattcttaaataatatattttgcgcagantgttatatcccggctgacnttttcggcg

SEQ ID NO: 13584 - DNA, 1234 bp, Heterodera glycines
gttttcatgactttaggaaccataaaaaatttttttgaaaaaatgggagggacaaggcacagccagtaacaccaaacaattgttccatctcgatttttcccggttacgagactgagaacacatttgcacgactggaatgaattagaattttcgccataaatataaattttagacctttgaaattaaaactggaaaagagcatgagttagataagaaaaaaccaaacaacaagattgttacaacaatttataaaacaaaaaaaaagacaaaatttacacaccccaaaaatgacgcgtctcaacatagatcgtgtcacgattctgcaagccagttgcatccagacgcctgtgcatgtgattttgcatgatctgaatatgctatacaaataaaattcaaattgctgacactaaacaccaccgtattgaagcctcgctcgtttacgaaacggagccgaacggtgtttgggtcatagccgtaatctctgacaaatgcgaaaagagcagtgaccctgtggtgcccattaaaagtacggtgaagaatttgaccgttcgccagtcggaatttgatgaaaaaaaaatcagagcgcattgaaatgctggggagatcaacttaatgttttgcattcggaaaaaaagaaaaaactgacggcgaatgtagcgattcgtacggccaatcaaagacattttcagttttgatgctcaataaaataattaaaaattgaattcaatggggataaaatattaaaagcagttaaacaacgacgtgcgaaatataagcagtgtttagaattttgtgtcaaacatgtttgtaaatgaataaaaatgccgaatgacatatggattatatagcgatcaatgattcagtcaggtcactcacccccttggcacaagtacaataaatgatcatttttcctcaatgttcaactgctcacgtttggtccagttcagctgtttaaacgacttggaagtttccaatgtggagacctgatgagggaggaaagtggcactttgttaatgaatcattaagggattgaaaaaggaacatcaaatttggcttccattacagagatgcactttttatttttatgcctcttgtccttgcgctcaagttcataaatgacaaaagggggggggggggtcaaccgaaatggcccggtcttgtaaattgacgtttttttttctttgcttttcaaaaccgcttctttcgcggcgcgctttttccaaaaaacttttgg

SEQ ID NO: 13585 - DNA, 2377 bp, Heterodera glycines
  unsure (1)..(2377): unsure at all n locations
tagagtcaatttctaaaaaantcgctgaaaaatttctcaaaaatttttttccttaaaattttcgtactaagaaaggtcctatgaattttttatgaaaaatttctaggtttgaaattttttgggaaacgacgtggggggggggcgacctgctcctccatcaactcaccaggtaaaaaatcacagagattgagcagaaatgctgaattaaaaaactaacaaaaaaaacttagatgtccacctccattccaattcaaacaccaaacaactttttcgtatttaatctaccctgaatggcggaggcgcgcgagatcacggcacgctccttgatcagcacaataagcatcggaaatttggaacgcggcaccattttgatgtagttggacacttcggtcaggttggccaactccaaccaatcgaacaaatgctttttgttgtccgccaacgaaacgtcccaagcccacaaaatgaactgacacttgagcaggttgctcacattcacattggacatcacctgattaagcaaataaaaattaatcacagcaaaaaaatgggaaaaaacccgaaaaattttagttttcgtctcaatttttgcattacacccgaatcggatgtttccacgtgtttaatcagtgtaacccattcattttcgagaatatagcaagaatcaagcaaaaaaggtgtgaaaaccgtttgagcgaagatgtgcgccgcaactgattggtcgtcgtggaggtaaatggccaaaggccgtcgatgttcagcgccacccgcgggcgagtcgaacgcctcggcaatggcatcctgcagagatccatggaagaacggcgcatgctgggccccgtatctgtacaaatgatagtgaaattataaaattaatattcctcaatttcaggaccccaaacgagttaaatgacgattgaattccatttttgcaaatgtcttcaaaataaagccttcttctcatcggtgattgatgtgggcgctagtttaaaaatggcaacttttgaattttactaaataccaaaatggagggaggacccatttgtttttggggttttaggggtcgatgataacgaatctgacatccatttggatgaattcctaatccatagccaacaatcgaaagatagaccacaaattctttttcgaatcaacccagaactcgtcgaaatggaggtcaggttcgtaaccaacggcaattttgcaggactagacaatagtccataaagagtaaaagggtctcctatttggattttagtgaaattcaaaagttgtaactttaaactaggcaccatatctcacaatgacaaaccggctcaaaatgttgaagccacaactgacaaacctcgagtcaaaaacggcattaaaattctgcatggcctccggaatggaagtgaattcggtgggcaccaacggcagttggttgacattgttcgccgacgagctccgctccaactccaagtccgagtcgcaatagctttcgtcgccgtctccgtccattttttgcacggcaatcaaattttaatagagaattcagaagagaaggaagtaatatttattataaggggcttcaatatgctgaaaaagagcaacaaaaataaagaaaataggtaagcaatgaaggaaaaagtcaaaatttacgtattttgtaggaaaaaaattttaatttttgttcgaatttaggtcgggggttcggaagagattaatttcagtaatttttccctaatatttcattcaaaatgggggaaaactcaaagtttcgcttcggactttattaattgggaatgagaagaaaataactcattctcatcaaatttttgtttcccaaagaaacaaaatgccacactttttaaaaaattctcctaaaaatgcgcaagatatgcggtttttcatacgaaattttcctctaattaattgccttttgatgttacctaaatagaatgatatcgaccacaaaatttattgaagatgtaaaagaaatttgtttgcatagcaaaacgatttgcatggacgagccatggacactgcgggaaggggtaattaacgaaccgaaaaactaaaatttacacatttaaatgtataaatttcgtaaaaacaggccaaaactgttggtggtggaggcttctggatggaacagacgagtttcatcaacgatccgcttaatgggaggccagtgaaacggaattttgctgtgtgcttcaggtggcatgataaaaaaccaaaattgattaaaaaaataaataatttgcatcctctagcgagacgtatggcgtgcccgtcttctggttcaatttttacgatgaaagtaatgttttcttttcgcgaattcggaaaacatttaaaaacggtctttaaattggccctaaaatgatgaaaa

SEQ ID NO: 13586 - DNA, 1287 bp, Heterodera glycines
attttgacacattttaatcggattataaaaaaaaaaatttttcgaaaaaaagttcgaatttcgggttaggggttcggaaattcgtccaatagagttcatattcgtgatcagcagccccgaaaacccctagaaacacgtttttatcattagaaacaaaaatttttttttatgtgggtcaaacctgtatataagtaccgtaatcttttcctatctgtaagtgtcaaaattataccaataaaaaattagaaattttttctaatttttaacgatggataactgagtccctgttggaaacggacaccttaaaagcccgtttttttccttgaaaaatgccaagcgcaccataatttgcattttcctcgtcattttgggccattttaaatcgattaaaaccgtttttaaatggctttgagtttggaagctaagagacatatttaccgccgcgagtttaattcgttaataagggtgggtcgtcgtagggtcggggggggaggggtcgtaacggaggggcaaaaaatttttattgagaaatttccttagcgaaattcaattaaggtggccgtctccttttgttcgactatttccaacactttgcattttcttccgacgaaattcgatcgcaaatgggcgaatccatttctcagaatgagcacccttttctgggcattgccttctacaatttgcacccttgcaaagtcgagaatttaattcttttttatattttagtattaatgatttttaaagcctttaattttcggtaatttaagggcaatgtgcgagagagtctctgttttttgtgcccaaagcaaaaattgtcattttttgatgaaactctgttaacaaattgcattaaaaattccaaaatgttttaagtactctcgaaatttaatttcatattttttcaagtattcccgaattatttgtagattctcgaaatttttaaaaatgttttcaatttttgaagaattttttaaattggaggatggcaattttaaaaaacgagccaacacggttgaaaaacattgattcttttggttatattttgggaaatttcttttgaacagcaaatgcttttgatcaaaatgttttcttataaatttgccttttttcagacttccgaactgatgcgatcgcttaagccacgcaattttgtcctcaggtcgtcgtttatcgatcatttaaagcaattatcaaattatttatcctctccctttcagtttcctttcaacgatcggttcgctgttcaaaacgaattggccattagcactttttactaattaagtttaa

SEQ ID NO: 13587 - DNA, 2937 bp, Heterodera glycines
atttcatttgctttttgataaaatttattggatggaaaataaatttgcaaaaaataacattaaattaaaaatatattttagcattttccttttcacaaaagtatttgtgatcccgtggcctataaaataattcggtctgttctaactaattgaataatttttgtagttttttatagtttctttaatttcatttttcccattcgttgccaaatagttcatcaaaattcagtcttattttgtatgatttaattaaaattaataaatattaaatccccgatatttatttttgcgattctatgaagtctttgtctgacgaaagtgatgagtttttccgacgtcgaactttcatcatgattttttttttgttattttctttattaaataaaatttccagaacagatgaaacccctctggtgttaggctgttgtagtttttggttcagttattttatacgatttaaatttaatatatgatcttatttaaattaagttttataaaaaaggctaaaaaatatgagaaaaatatgtttataataatagaaattatgacataatttattatataaatatttattaatgtatgcgatttaatgacgagattaggaatattaaatgttttatattgaaaaatgtaaaatactgtaggaagccacaaacgcatgaaaaacatgtttttggcatggtttaaagtagagtgccacgggaccgggacctggtagcggacaactgagtacaactgagtaccaaggtcccggttttgaccgggactagtcccggttttcccagccaaaaattcccggtttttcacccgaaaaggtcccggtcccggttttgccccaaattcccgtcccgtggcactctagtttaaagcttcgtggatggatttctctaatccatattttccatatttcgcgatttatgtccatatttcaatatttgtccatattttggttataatacccatatttatgtccatattttggcatttttccaaaaaacctctattggtacggcctcaaatcagctaaattttccttattgatccctcgagacctaaaaattttctgaaaataattttgcataccatcatttttaaagttttactttatatttagagaatatgaagaaattttgaaaattataccattgaatatggttaccgtagttcctttcccaaagttgttctatgatctgttacgtccgcattaccattcccaaaattggaataatatcctttattccgaaggtgtgcacacaattacataatgagtaaatgagggaaaggagcggcccccgattcgtacgggacagatggggagggaaggatcggacggacacttggcccaatccccccgatcagaatgaatagaacaaaaagagaggggaacagattaatgagaagggggggggggcggggcgagtggggcgagaaaagtcaagagcataggcaataaaatacaatgtaatgacaatcagtatcaatttccacagcaaattttattaaaaatttcaatttttcatcaggcggccgaaaacttcaataatccataaaaatttctccaaaatttgaaaaaaatcaaaaattttaccattttggtgcaaaatcgttaaaaatagcgtgccataaaaaggctacgaaaatcaaaaaagttttcaaatatttaattttttttttaaattttacaataaattatttttaccagaatttgttgtgggtcaaaatctgaattttaatttttttttccagaatttttttaaccccttttgagccctgcttaaggaaggtactgtgagattggttatctattttttttgtgcccgtccatttttaagggaacatagaaaatgaggttaaaatgcccaattttaaacatcattggcacacaggacgaagtccaaagacaaaacgctggatgcccccggggggatttttcccgcgccgttcccccggggggtgccgtgcccggcgggggcggacgggcggggcggagactcaaaatgttcagcagctcgtcaaaaatgcggcacagaaaatgccctttttgtttcgagcagataatgggtaatttgcttcaacttttttccctttttttttgctttaaaaaatcatcatggacaaaacaaaatgccaaaaaatttgggtttttgaaaagaaaaatttggtaaatttttaatgagcctaaatatgtgaatgggttaaaaaggcaaacaaaaagtggtactttttggttcggttttgtgcaccaatcccaaaaatttcaaaaatatgtcaacaaaggaagtttttttgatggcacaaaatgaaatttgccccaagcgaaatttaaagtttttgccattttaggttccttttgtgccatcaaaaaaatccgtgcatcatttatataaatttgtttaaatgtataaaagcgaaaagtacccaaaaagctgatacaaataaatggaagccagtggcaaaatgtatgattatgttttactactaccgtatacttgaaaaaaggattataacaattttactatgttgtataatacaaaaagaaatttgagcaaaatttttactacggtataccgtatagaacaaattttcgtagaccggaccattgaaaaaaaaagtatatgaattgacaaaagacactgtttggaaataactaactgatgtactacaaccatttttgtgggaatctcgatctcgacaacctctcatggcaagacatacatgatttaaataatgaacaaatgaattaatcgctggtatacggtaatggagggttaaaacagatgaaggaggattaacagtgaattgtggttactttaaggcaaaatcccacggagggaatcgagcaattagccaaaaaaaataataattttaagcctatcggaggcgccaaccggtgggaatcgaatcgaatttgtcggcttaatcttcagccctaaaact

SEQ ID NO: 13588 - DNA, 1345 bp, Heterodera glycines
aaaatgaatcgagaggccagcggcggacggagcggctgtcagcaaaaggcatgccgtcgccgccgccaacaagctgtgctgctgccagccgcacatccccgcgtcgcccctacacccccgagggcacacaacgaacgaaacgacggcaatatgtgtcggatttccggatttcttgttggagcagcgagcggctggcgggcgcgcccgtctcaatttacagctgctctccacccgccccgtccgttgtcggcggggtcaaacgccgtcccgccggaggggcggcggcgttttctttttcaccccttcgcccctccggcaatggacaaaaaatgaattatacatcggaagggcctgtgctcaaattaatctcgttaagtgaattttccggggacaggcgtataatttgtgagaattttctttttttgtttgaaggggttttgttcgtatttaaatgcttagacacaattcattagcgtgaattgcttaaggatgagacaaaattggttggcattgtgccagcggaaaaaaagtgaatttcaattcatttaatatgcctaaataatcttaatttaaaaaacatatttaattgttattttaattcatttttttaaatgcggattaggatattgctccacgacatttattaatttctccagccattcccgacagaagttgaccgggggaatttactcccctatcctcgacttttctctccctaaggtcagggtttaacaccctaatttgctaatatttttaccttttaaatttaatttaattaattatttaaattttaattaagcatttacagttttaccttttaaattaaattaaattaattatttaaattttaattaagcacataaaatgtaatacctaaattaataaaataaaaatgtcataaaaacaattttcaagggttaagcaaattaccatacctaattatttgtgtaattaccattcctatttttaaccaatagacagactaatataaaagtacaaagcctaaccaaccattaaatgttaatgtagtgccgtatattggaagtaaaatgccctaacttttttttttgataattagcacttttaattgttattcaggtttttagctgtgacaactgtctgaaaaaagaatataatgtaaatctaataattaagtgataaggaaatgccgtaaaaagtgccttgagaaaaatttaaaatgaaatttaagaatttaatttaagagacaaattttagtaatataaataaacttaaaggaaatggcattaaaatcttcttctttttttttttgctttgaaaaaatattttaattgttatgtagaagggaacgtaataataagaaaat

SEQ ID NO: 13589 - DNA, 2422 bp, Heterodera glycines
ccgacaactcattgaaatggaatcgaggaattggcaatctcaagatggtgaagaacacccacacaaaacgcaccagtcagggtgtcgtgcaagcttggacatcgtgacaattacgtccggtgatgcaaacactgacagcgaatgggtcgaagagattgtcgttgaacggcctcccggattggcagcgcattgtccggaagagtcgttgaagcgcatctttcccaatgataagcaagctccacgctatggcatcgaagaaatgatacgcgatgcattccacaaaaaccttatcagcgatgcttacaacacgcggaggatgtcccaggccaggggagtcggccaacccattccaaaggcaccgattggacgtccgaacgcaaatggaccctcctgtttgatgcggcgacctgacgaacacgtcagcgtgtttggagtccaggagattgacagggcgtacaagaacaaagacatggacacagcgtttaaggtttgaaaattggaatctatggaaatgaaagtgccttttaagctatttatcgtcacccgatgcattgatgagtcgaatgagaagaacgttctgttggccgagcaacacattgccgccactcgacagaaacaggcacaaaaggacaaggagaagtcgaacaaaatggagcaaagacagcggaagctcggcccgacttcgtccgcgactgctcaatctgtcggccacttggactcaggcagtttaactctcgcagattctccccatggtaactgaactgcttagttcccttggagttgcttttctcctgtttcagcaagttgctcctcctcctcgtccatcgccgtttcgtcctgtgcttcgtcactttcttcccagtcgcagctgacggcgacggattcggcgtcgacttctctccacaatttgtgttttccgaattcgctggaactccgccgttccaacgaagacccgcggctgagtgacccgcacttgcggaagtttttcttcaggcaaaggctctcttctcagtctcgacatccgcatattcaccaccagtgcgtttgttcaatgacttaacaatttataacatcttccaagtttcagttgttcattacgttcacctgacccgcgcatttgtgccaaatttgcttgtgatggcaccactgatccaatcagaaatggccaatcatcgctgtttcaacaacgaagaaattatgagaatgtaaattcaacaacattttgtgcaccagcaacggaagaaattgaggaagatggaatttgcaaaacggacgatgactctttcaatgactacgaatttttccatccacgacaaacgacgtgcagcacaattcggggcgaagaagcggaggcgaaaagagagaagaaggggacggaggacaacaacaatttgtcatcgtcatcttcggtcagcacaatcaccgcaatgacacggacaaaaacattgccaaatggggcgaaacaacacgaagaagggcacaagaaacggtctctccaccaggaacccctttcccggaaaaaggtcggagactaatactgtataaggcacacggacgttttctttttaagagcagcaaccaagttttggaaaggagttcgctcatatcttcgccgtcctccgatcacacagagctcgaagtgttccacccctccgactgtagcttggcaccctcaagttcttcatgttcctcgtcagatgtaaagaaaatcccgaatatgtttgtattccaatcacacctttatttgtttagagccttgaaaaccaccggcagtcccggcattgtcccgagttggcgaacaatttgcagtcccagtcccaccatcagcaccaccggcacagtcataaacatagaaaccatagcagtcacaaaagtggggacagtgggagccgaagcagcagagaaaggaagtgacaggcaaactctcgcatttccacgtttatttgtcgccaataacctctccttacacttcacattcagtcagccatccacaaaaagttctccaaattgtcgtcgttgttttgtttataattatttgtatatttgcatttaattctctcttctctcacatatcgaaaatcacccactcatttcgatggcaaattgtttgtctcgtaaattcagttcgcaaactttttaggtataggtacactacaaaatattaatttgtgtacatatatttataaaataaagttttaaagttattgataaatgaaattgcttagtttttgcagtctaaaaatgaagaaccactaagttttgattagttcagcggcacttcgtacaagcatagtgaatgtggctcaaatgcactttatgatgaatgttttatagtgttttttttaaatagatttttataaagctaattctcgcagtagaatattttttgtaatttttgaaggcaggtaaaccaccataagta

SEQ ID NO: 13590 - DNA, 1388 bp, Heterodera glycines
tttgactgttttctgccaaatttcactttttggctcctcttcggacgctaatcgggcggcaaaacctgaaaatgtttctaataagcaccgcttcttgaaaaaacggcaattcaatttgccatatggtgaagcggcgggagtgtccatgcgaaagccaaaactcatattgaaaatccagccatcggcgacacttccgcctgctgaatgcgcgtgtatcggagattccttttgggaatgccaaagtgagtcggcccaatgagtggtgccacgcccctccccatcagagcttttgaattgccaatgattaagcgagagtagccaccaagtaagtgcctttctctgcttgggttggccacgaaagcactgactgttcggcctcgggcagtgagtgcctggctgtgatggacaaagtattggtgccgcagcggccgcacttcgtttggcactatttggaaaaacacggcgtccgcgtcgcgcagccgcccgtggtcgctcgtcacttcgcaattccaatcggcacagccacgcaaatttttctcaaaatttgcgtcccacataagcagcagcggaggagcggagctgttatctgtcattagccaaatgattgtcaaagtgaaaagcaccaccaatttgttcgggctgaagttgggcacggtcttccagcgaagcgctgccgcggggcaacaaaaggtcaacaatggttacggtaattccgtttcggtccttgatacggtatttgaacggaggacggcgaaaaacacgacgaatggcaaacaaagaagaagacttaagaaggggacttaagcaaaaaaggagcaaaagcaaagcggcaaattaaaaatgtaaaaatgtcaaatgcaaggagaactaaaaaacaactgccatttacgaatgccacggcatttcccccgccccccgccccccccccccccccgaaggacaacgcaccgcccaaaaatggtcaacgacgcttatcatcaaaatgacaaatacgcacacaacggccgacagcttaatgagcagacaaaaccaccggtgaaggaacatcgaaagtgccaagaggggagagggacaaagtgccgaattggagtcaaaagcgacagaatgaatatgcataaactagcgattcgtttttgtttttttccgaatggtttttttctttgccccccccccccccctcggcccatcacttttgtgaataatcattcgttctgatgggattcgcaaatcgatttccaatacataagtgaaaagctttggtaaacgaaatttttctttttttaaaagaaatattaatttaagaaactgaaataaataaagggtccaattttacgaatcagcgaaaattgccattggcgagaggcatttggaagacgccacttgctgct

SEQ ID NO: 13591 - DNA, 1547 bp, Heterodera glycines
gtagacaaacgaaggtgcaaaagggctctgatgacctataattcttgttgaatgtttttgatcgcaagcaactgaatgagagggctaactgatgtccagccgatcggaagagcatttagtcagtgatcactgatcactcccctccccccccccccctcattttatttctgtttgctttgtacttccccaccactttctcagcttaccaaaaggtttatcaaaacaagggataagaccccttaagcatttcatgcagtgataagcagaagggcgtttttgccatacaaaatctcattacactccaatttctatttaaattagagcgtgttcattatgccaatttaataattttgttttatttcgctgacccacaaaatgtccagcccacgaaatgtccaagtctcgaatttgagtttttattattcagatgggcctaaggttaggcaaggggtaatataaagggtatattcgtattcagcgaccccgaaaaccctaaaaatcctaaattagactcattttgtttttataaattttgaaaaattttggacatttcgtgggtttttactcttttggacatttcgtggcttggacactttgtgggggtgcctatttatttatttttcattgaatttaattaataaataattttttttaaataagttttaaatttgctcttagcttgttattatcttttgcttatctccaaagtgatgaacaacatcagcgacttttcctcctcttccaaaatggcttccaacagaccggcactgaaagagggcgagtgggcgtgtgtggactccaaatgtgcgcaaattaattcggaaaaacgtcggcactgccaaaagtgcggcaaaggttcgtcgcttcttttcaagagttcttacgctctttttagctatttttggttttatggcccggatttgaatttcaaaaattccatattttgcaattctgcgcacactttggtttggtttggtaatactacggatggtaccccctttttccgaaattattattttttcagggttgagaatccgattctaacatccattcaaagcctcctggggtgaactatagtgaacgcccgtgaaaaaaagggtcaaatgatataccaatcgattcgtctcaaggagctaagcatggaaaaatatgtctcaagttgtggaaatgccaaaaaaccggtttttgaaccggttcaaaactcgaaaaattgagagttttcgcactctaactttttttaacgatcaaataccgacaaatttggtaccatttgaaagctcttgacgagcttaatctgaaaatcaggaaatgaagtcgaacccatgccatctgagcacttggactactgagtccctgtgaaaagtgacatttcagtaccaaagatttaaaggatgaacaaaaagaattttacaagttaactttcgcaaaagggagcatgcgaagacggagcaagtagtggggcgagacggagggcggaggaagcagtctaacgagcgccacaggcggttgactgcgagggcccgaaggcaccccgccaatcagtcaac

SEQ ID NO: 13592 - DNA, 2133 bp, Heterodera glycines
  unsure (1)..(2133): unsure at all n locations
gggtacggcggtgccgataggcgccgcaggggaattttaaaaaatttcagttcaatttattaacagaaattgtacaaaacttactagttttttgaaaaaaaaaatttaaaaaaattccgacttttcatcaaaaatttcggaagtcggaattccgaccccaaaaatgtcggaaaccggaagtctttccgtgccatacctggtgcctatcgacatctgcgagaaattttatgaaatttaatgcgatttattaacagattttgtctaaaattgaccaaatgacgcagtttttgactcaatttctacaggattattaagtaaaagcctatccgacggtgccgataggcgccgccgggaaaatttcacaaattttgaatgaaatttgcgatgaaaaatgagttaactttaattaaatttattatttaatttatttaaaaatatttggcattctgtcttagaaaaattttcaaaaaaatcaataaaatcccgcataatcccgcacaaaaaatcaaatttgcggtcaggacagatccgagccctggtctaaagtttaaaaaacaatgaaaaataatatttaatgttagaaaacctttgtttaattaaaattcaattaaagtgtttaaagaaaatatgaaaaaactctaatgtcacaatggtgaaaaacaacgaaagacagtaggcttaaccactaggctacatatatgtttctgattctttaacagaaatgatttatttatttaattttttctcaaaaaatttccgctgacccacaaaatgtccaagccacgaaatgtccaagccacgaaatgtccaagccacgaattgtccaagccacgaattgtccaagccacgaaatgtccaagccacgaaatgtccaaaagagtaaaaaacacgaaatgtccaaaactcgaaaaagctcataaaaacccggaaggagtctaatttagggttttcggggtcgctgaatacgaacacgacatttatattacccctttcctaaccctggacccaaatataaacataaaattgcaaaaaaaaattcaaagcacctaaaaagagtgctgatcaaaattcgaacaagttttagggttcctatgccatccgaattctctctatagacacaccctcagcttcacatattaaaaaaaataattttattaaacattcaataaaattctttacgacgtggacaattgaatcatcaaaattctcgaaatccttcaattttcctgcatatccctcaatttgtaaaccgagcgccgtcataagatcatggatgtcaccgttgttgttgtacgacgcgtccgccaaaattcgcaaaatgacagcatcctggaggatgtatcgtttgtgtcgcttgtgaatgaaatggcgagcagatcgggcagcgtccacctgtctgtcgatgctttcattaaccccacaaatgaagtccgagagggcggggtggtgacagaggcctttctaaatgtttcttttcaatttgcttttaaaaaattaaagaccataaaatgaagatgagttgcttccagtccgttgtttgtacgagcgagggcagacgtggcctgagagtgcatgttccaaaatgggattgggaagtggggcgcccgaaagatttcgtcctcccacgctggaactgaatttttttattaaattaaaacggatgaattgattaaagaatttgcctgaaggcgctatcgaagtcgatagcgggctcaacgaatattgaacaatctgctcccgtggacatcgacgtttcccaacaattttttcttctcacgccgcatcatttcagtcaacgcattgttggaactcatggcacaaatgcttgatccgttgctgatcgcctcacttttgacaaaattcgggtcggcttcagacatggctcggccaggacactttcttttattttctgccgctttgactctgcctttaatacaaaacatttcttttaatttaaacaaacttgttgtttctgaggtgctgggagatggttatgttctctttgacagacaatctcccccaaaattggtctttccgcgctncaggtcactgttgaaaagtcagcctcgttcaaagtttgttgnntcacattnngtcgaagtatcancgcatgcgattcgtcaccctccactc

SEQ ID NO: 13593 - DNA, 1067 bp, Heterodera glycines
  unsure (1)..(1067): unsure at all n locations
cacagnacgccaccggncaaagnaannnnnagncanaangnccaacngcagccanngncacngangnggaaggngccggaagcaccgagcggaacgngaacaaccngaacaaaccanggacacgncaaaangagagnnnaagngacataggatcaaaggcacgaaaagccaaaaaaaaaaggaggaaaacgaaataaaaaacatcatatggtatgatacggtacggaacaaaaaatgaactgtagtggactaaaacaaaaaagttcaaaaaagtaaaaaataaaatgaagaaaacgaatggaaaagattgtcgtcactgccggacatttccaaaaattttcctccatcgacgagcaaaaaaaagcaactgcttttgctccgattttattttctgcttataggccccctaccaaatttcggtttatggcaaaatgttcatagcgacgtctgcccacggcacatttgagtccaggcaatgagggcaattcgcagcggaccgggcccgggcaattgatcggatgcttcgatcgtccatagaagatcctgagggcaacaaatagattctgatcagaaataggtaaacaaattgatcaatttgcctattatagcaatcggcgatcaacggatagtaaacaactcttgagggcaaacgcgcgaacagctcgccaagctcaggtgttgtggccaaaaagcggtgaaagttctgctccagctcgaccgcccgggccggctgaagcatgtccgacatttggaacttgaaaagttcaaaggtctgtaatcgaacaaattagggatagagtgatcagaactgaaaattggtggtgatcaaaatcattgtcgattgaccaatgtcggcttattggtagtcaaaatgccaatgcttctgtcatgatgccaatgatagagcttacccgttgtgtccgaggatatgctgaggagctgaagtcaatctgaaggtttaaatgcgttaatctatgaccaatgccaccgacaaaatcgaatgttgaattaggcaattccatttcgggcaaaatttttaaaattgttccgtgcacaccactatgatc

SEQ ID NO: 13594 - DNA, 2001 bp, Heterodera glycines
tgatcaaagagacaaggcttaatgaccatcggtgatcagtgataaacagcaagttaattaattggtcacaaaagtgattaaatcaccaaaacaaaacgaaaaaaatcattaaaaatgaccaatgccatcaaattgagacggggagattaatggagacgggcatatgattagagaaattacggtagtaccatgctccagttgcgaaagtggagcatgaaattctgctccgccggcacagtgtacattcggcctcggctgatgattccgggccaatgcagccaaacgctttgcacattgcccggcttcaccacatatttggggtcttcccattcggtagccactctaataagtgatcaattttttttgaaaattgaattctttttaccgcgcttcattgatcaatgccgcaagggaaaattcgcccggttcactgcctgaagaagagaaatgcaagagaaaaagatctaacaagaaggaggaggagtcgagaagacgaaagtgagagagagaacgagagagagagagagaaagataagagtgagaggaaagacggataggaaagagacagatagggcagaatgcggagagagagagagagagagagagagatggttctaatacagcttatacagcttaattcgtgcacagtaaagctagctcacttgtcaccaattcggtgttgtatcggttgtaggaaaagccggccgcgtaaggcactttggcacttagaaaacggaattcctccaaaaatgtttggccaagcttcgggatcagcacatcatccaaatcggacacgatcaggaactcagcggcatccaaaaaattaatgatttggcgcaaatttgtggggtccgcctctgatcaggcaacaacaaactttgtagaaaagcagacagtccgtgtgcgcagcagcctgatttctgaaaaaaattgtttggttttcaggcaaaatctataccttagatcaaatcagattatttcataaaattgatcagctattcaagggcatacctttgggtcttatcagattcgttcattgatcagcatattattaattaccaaacctcggcattttttggctttatattgatcaatcatttcagctattcattttcaatcattgagttgtgatctcatcaactaagaaaccatcgctattaatcagtactattcacagtgattagcttgatgatcactataattaagccttatttacctccattctagctcagtgtttgggtcatagccgagtcgatcagtgccgtccgggtcctggacactcagtcccatccacgtctccaacttgacaattttctgcctttcgtacaccttaaacacaggatgccataatgcgggtcatttttgggtttccggcccgtccctggttcagtccagagggcacaaaaaaattcccctctcccccaattttgccccgggcgaatcggtccccccttccccaatcgctaattttgtatggacccaccttcggaataaaggctattatcctactccaatttaacacattatggggatggcttcggttacgaatgccaaaagtgcatccgataaaatcaccttcatgaagtcgaggatttcgaccagcatgctttggatgtagtacacttgaagtgtgacgcccaattggcgataaatttccaactgaaaacagaacgccaaaaatttggatgaaaaaaagtttgatcagtcggacctaccgtcggaatgatcagttgccaccgttcgttatagaacaatgggctgaagcaggcaacgacggacaactgttggtccgagacgggtcggattggcacagtgacggaatgggacagcacttggacatcgcgcagttggaatttggtgggacggtccaccgtcggacaggaggccaagtagacggacctaattaattgtcagagtcatttccatattaattaatttggctggttataattaattgtcaaggccatttagttattattattgtcatatcaattgtcgggg

SEQ ID NO: 13595 - DNA, 3427 bp, Heterodera glycines
  unsure (1)..(3427): unsure at all n locations
ggacagtttttaaccgtgggaatttgattcttttgggtttgaaaagtttatgaagaaacttctgtacatcgtgaagctttaggttggggatacgttttcgcgcttatgctagcaccttttgcattcctgcatagctggcggcgaattaaggttgtaataaacctgttcaagttgactttctatagttttgcccataatctggtttaaatggcggtttttctctatttaatccttgggtttttatagggttaacctggacaaggactagttttcttttagttcttctcttctttcctttaccctgttgtaaattaaataagtattttgcaatttccggttccctcttcaaacgttgaacaaaaaatgtatgacctctaggcagagaaatatcttcacctgataataatttcagtgattcagtataattcgatccggtgactggcttattaaaattagtcaaaacctgtcctgattgcatatcgattccaaatttgtccggattttttccaataatattcataatttttgaaaaatttttctgacttaattttacgtcttgggaacgtattggcgtactactgctacattctgtagccgaagaataatctgccgaggattcaaacacgttttcacttttctttttacgtgatgctcttattaatcgtaacggctgacgcttattctcttgttctacggctgtttctatttttggtattttatgaattcccatatatggagcaacgtttggtattgcagaactcgggtttccttctatgatcactttctgtggtttattttccatcagctctttgagttgacgtctccgtttgtacagccaagagtgtcgtttcattttaatatcagctccgattgttttatcattcaaatttttatgtatatttgagtctaatgatgttttttcatcttgtataggatcgcctcggctacccatactcttcactatgttcataagcgcaatgtattcggtttccggaaccatgaccattttctttgtgtgcttcattatgctgttattttttcaagcaaatgttgggctaagacactgagaacaggcacaagaatagcaccaagggcaattccgctcccttgttgaagtttttgccgagctgagttctcactgcgagcgcgtgctatggccctgtaatagtccgcgtattgtgacaaccgtcgcttctggcttgaatttaaacgaaaattaaattttaaaatatttgcgcaaatttccacaagggcaagtatttggtctgctgatgctccctgtagtagctcgttttttcgtttatcagacctagtggccgcaagctttttaaaaaaatctgtattttccctaacgtaaggactaaattgatacattttggattttttctacattcatgtctttatatagacaatgcggttagtgtaatacgttattcgctcggtaaatagatttctctgcgttcgtccgggaatattttgctagtaagacgttcattttcctgtgcattaggatgcatatttataaccaggtagctaaacggttgacttgttgcatcgttatatgactccataaaataatttaagcgctttggaaacaattgagatccgactgtccgtacctgaagttgcccggatgggttacgtgtcagcacaagatagtgactgttcgcccttgctgtccgaatatttcgcccatacaggctctgagttacgaaaattacgtttacgttccaattatgcgaaccgcgtgtaaacaaaagatccaaaaaatcattgtttatgttcagcataaggtcgtccagcacaagtaggagaggtttaggtttactattaatcaatgcctgatctggaatcccattatgggtttctattccacgtttcatcagatcaatgaccgaatcgttcatttcagaataacaatataaaactttttcgggaggtgggttaatcagttcattatggtgtttcaacaacctcatcagccaatgggttttaccacttccggtggcgcccgataatataagagtgaagggggcattaaacattttttaaagttcaatttttctaattgtaacttatttatatagtgtttgtcctcaattttgtatgggacatatgccgcacattttgggcacatccaacatttttctgcccaggggaagtgtacggtgccaaaatgcaatagactttgtgtcctacatcttttacaaatttcataatgacatggacagtaatgacaacattttacttgatgaatacaaattttgttcatttttaataatttgtaacaaattgaaaaaaacagaattgtttaaatagtgtaaatatgtaggggcagttattcgggtttcatgatgtattcgagccattgtgttaaatctgccgaactgccagataattctactgtttccttctgcgaccactctgttgtcaatttggctgttttaaaaagagtctgcgggtcggactcggatattttggcaagtggtggaaatttctcacatgacaaatcgttttcaaaagtttgaggggctgttggtataaacgatgacgatttttcttgtgggaaatcttcatcaggcggttcgatttttggttgtatgagtggttgttcgcgttccatttgttggtccggcggtggtaaaggttcacgctccaattctttatcaaccgataattgtatatttttctccatgaatgtttagaggtaatgggtacaataatctctattaactgtacatttcttaaaacgagctgcttatatagtgacgctaggggcgggggtctggatcctttaataggacatggggcaggggtctggacccttaatatgacaagggacatgggtctgagggtacttaatagaacaagtggtaggggtctgaacgaccctgtccgttgattatatgcagaaatgctttaagttacagggcaggggtccccagatcccttgcgataggttgtaggggcaggggtcccagaccgctgcccatgtgatagattacaggggcaggggtcccatgtgataggttgtaggggcaggggtcccagacccctgcctatgtgagaatacgttcacatgatatcatatactgtatgttgaaaataggatcagcatactgtataattttgttgcaataaaaaaaatgaaacaaaaaagggttacgaataattaagcatatgtgtttgtcagattgagtccaattattagaaaaaattggattaatattctctataattccatatactgtattttgaacnnangctcagtatactgtataattgcaattgcaacaaagaatttatggataattaagcatactgttttagtcagattgaaaatccagatccaccagcttcaatatgaaatcccgctccatatntcggtccagggctttttttttaattgagaaactctaaaatttaa

SEQ ID NO: 13596 - DNA, 1519 bp, Heterodera glycines
  unsure (1)..(1519): unsure at all n locations
tgtcattttttacatttgcttttgaacaaattccgtcctccatttgcccttaagtggcgtaacaagtcagtccaatcatttatccaaacactcattcattacgttgtcaaatcggttctaacagcttcttgctctttgttgtccgatgctctctttttcatcggtgccaatcgcgacgaaattcgtcagagtgccgggcccttttggcgctcatcaggtgtggcacggcatttgccttttcggtgcctttttaatttgtgctgtgccccattttcagcaacatttgagctaccccttctttgtccatgtgttcgcttcttctttgctagtctttgcctccgtttgcagtgccattgcttattatttgccaatgactaaaatgaaacgaaggcaaaacgacaacggacaaaaagaagagacagtggcggaaggaaaacggtgagagaaggaaaacggtgagagaaggcggagggaaacgggggagtgggagacggggggggggaagccgatggacgggggaggtaacgaggaataccataccaatcagaagggatagtgccaagcgggatccatgggggagaaaaatccgaggggaggtatgccgatcagaaggggaggaatagacaaaagagatccatgggaggtgtggggggggggggagaaaaagccgagtgaagggaaaggggtaacgaggaatgccggggaaagcaaagggattagagagcactttggacgaatgatccctctgccccctccccgtcccttctttagccttaacaatggtgccgctgtgctcctcagaaatggcctttttctgagtgccgcttctctcccctgtcgctccgtttctccaaattcttcgctctctgattattttccgccgcctccgccaacgccaagactctttcagccggtaacagaaaagatttacaatagcagtatattattgcttttttctgcaaaggattggatgtcacagtatttaacgggacgaaagggtacggtaggagcggagagtacggtggcgaggagagaaagggacgggtgctggtcggccgtttgagtacggcaagagagaggcgagaagaagttacacgaaatgcttgtaaaaagattcaataaataaatgtttatattttgttgtgattttaaatgccattctccggcgaatggcagcgaacggaacgaaacaatttcaaatttgttttttttcacctaatgaggcacactttttaagatttaatnttattgcccccccccctccaacgcattttttaaattaaaatttacgatttttaaatccccccccccaattgtccgtttcattttataaaatattattaattagtaataatttaagtgccacattattcatccgtttctctttctttctttctttctttctttgttttttttgtgcttttcctcctcttttcatgcgctcgtttccctgaacattcgctgcgtccctttggcattggcattttgactttggccgttgtaagcgaattgttggcca

SEQ ID NO: 13597 - DNA, 2724 bp, Heterodera glycines
gataaacaatcaaaaaagaagaaaacgaagggagagtttttgtgtttgaagtgaaaatggcaaaatgaaagaacgaattggcggtggctgaatcggcgatcaaaaataatcaatggccatcgatcagttatcgattgatcggtcacacttgcgtattcgccccgatcagtcgcgtcgtccccccgcctctgcccgctgccttttgtggcatttcgccggagggatcgctggaccattcgaccacgggtcgtcggtagaccgaggcgaggttggccgagtggagccgtgggccgtcatcgaacagttttctgtgatgagaaaatggaaattcatacggtagaggggaagagtactgtaggtaatagcaaaagggatactgtagagaagaggaaaagagtgaaaaatggaaaggaaagggagtaaaatgattaatgttatcagaatgtccgcttgaacactttcccccccccccctccctcaaaattgatcaattcattttaatagcgtatggctaattaggcaattatgacagatgaaagggacaaataaaatttgaattgtttaaaatgacgggggaaaattaaacaaacgaaaaacaaaaccaaaaacgaatttcggtaataaataaaaacatatataataataataataatataaatatttaaaaagtgctttgttaaagtgcaatttgtgcacaattgcgaaacacaaaattaaggcaaagcaacagaaaactgaggagagaaaaagtgaaaagaaaggacagaaaaaagggaaaactcccactaccgtaccacggagaataccgtacctttgctgtccattggaagtgagaaatttgtaagtggttgcaatggcacagacaaaagcgaacgcccagcagagagtaccgcccaaatggaggtaaaaggcgtagccgatcacttgctcctaagggtggaagggtactgtagaaggagtcgaccgattcggcaaacaaatacggtaggacaagccacggtagaatgtgtgaaaaacttacataagtgccgaccattccttaagagcaaaaatatatttaattactcatcacccgatgttgaatggtcaccctccccccccccccctcaattaattaatgctttcgaatttggcatttattttgtgcctttttaccggtgacgaagcgaatgtcgacgcgattagcggagaagaagaaaatgccatcggcgagcaccgacaaaagcatggcgatgaacagagaaatggcgaaacagaaggtggacggggcaaaacaaggcgcacaaacgccggtgcaaacggcgacaaacgcagccaattgggagagaaggatcagcgaaaggacgaccttatgccatcccctggggacgaatgggatgatcagagacggcacaagcaaatgtcatccccggcaaagacatagcaaaagagctaacaaacaaagggtggaccacatagccccccccccccaggcaacgtcattgatcccctgggggcaaatggaaagaccagcagagatggccaatgcttttcctaccagaatcggtggtgctcagcttctccagctgccccgtcctcgtcgacatggttctgaaagtgaatgccatgccgttttttgctttgttttgccgtgccctctcccacccgaccagcgctctttcgatgactaatgccgcggactcgtcgaatttgtacatgcaatggagcggcgcttcctcgtaaaagtcgcccaccgccaccacatgctgaaaaagaatggcaaacgaacatcgaaaggcaatttgatcagctaaaacggagccaaccttttcggcacgaatgcaatcccaccaaaggccgtgctaaagcaaaaaatgggggaataaataaatgaggggaaaagtcggtggagggcggggaaatccccctcgggggatataatttcaacaatttattaccgaaaaaccctttcatgtttaagaaaaacgaattcttactaaatgtgcttattgtttacttcaatatttcgaataaatttaattatttcttaaaattaataggtaattcttttaaactgtgccttttttgttcaatgaaaaaaatcttcaaatggattaagcaataaatctcatcaagctttaaatagagtgcccttaatttaaaattatcttttaattaattagaattgcctgatgttcagctcggaattcgcgaatgtcaacaactaaagataaatgattaattagattaatttgaatcaatgggccaaatgtttttttggcattgccttgccaagcgggcgaaaaaacaccggcgactgtcaaaacgatgccggcgatgatcagaaaaatggaaacggccaacaaaagtttttgaatggctgtgctcggcattttattgccgagaaaataacgaagtgatcgattgatcgatcagtcggtgatcagaagcaaaagatcactgaaaaaagggaaaaacaaaaaattaacgaaatgccaaaaagggataattaaaaagggaatcaaagaaaacaaaatatgatgagtcattcattcgattggagattttgtcaggaaagtcacgagaagggaaattcattcacattgacacaccatcccagaaatgagctgctgtaccaaaaaagatttgcgtgtgtggctcacgtggttttagtaagatagtaaagggacaaagggtggtggttcgagtcaaaaagtgcaactatgaatattttcatttatttat

SEQ ID NO: 13598 - DNA, 1025 bp, Heterodera glycines
atatatttattatttattagataatcattcaattgttaattaactaattaattaaattattagaataactcttccgtactgaaatggcccgcctcttccgattagggggatctacgacaattcaaagaggggttttattttcgaaccctctcgggaagagagagggctgactttatttaataaggggcctcaaattcaataaataggctattccgccatcgtttaccttcatttccggccccattagttccttgtgcattaaatgggctaacaaatttttgcgctccatcagcaacattttcagcaaatcggcaatgttttcggcattgtggaatgaaaacggaattgatttttccaaaatgcattgcataacgcaatttttgacgcgttcttccgtcgtttttccctcagtgatttttcgttcatcacaaaatttttcaaaagtcctagctcttatgcttggttgagttttaagggcccatgaaaataaatcggcaattcgatcatcttttgactcttggacaatttgggtgagtgtgatgagttcgttttcaatttccaccggcaaattcgtctcatctgatcaaaaatattcacatattaattgataatgattagaaaaactatttttgaataaaatattctgttaaattacttttttgctttgtgcttttcgaagtttctcctgctccgctggctgttccaattaatgccagataaaagataattgaaaagtgaaatgagttgtttttagtcgcgcttctcttcattggtttttttttgtgtatgttaaggttctattatataattatgcataaaacagagtaaccatcggttagctcaatttaaaatgatataagagggaaaatttgcgaattcaaggatactttaaaaaattaaaaacacaaacaaaaggaataagcagtagtgactttttctagcatttcgtccctttttttgcggttcgtttaaaaaaaaaattctacgcaacagaaggagtcggcgaggggggggggggggggggg

SEQ ID NO: 13599 - DNA, 3153 bp, Heterodera glycines
  unsure (1)..(3153): unsure at all n locations
tgattatatacccattttatatattatatttgttttattttttgaaatccctccctctggtgcccaaacttcccggtgcncaaatttctggtgcncaaacttcatgtcgccgtcggcgatgccgataggcgccgtgaaatttacttatgatttgttaaaagttatttccagcaaaaaatttttgaaaaaattggaaaaaagtgtcattcttaatttcttgagtccaaaaggtatccaaattgaacacttcgttgatttattgccacaaaatgcgattgtaaagcgacgcgtttctgtaataaattggcattttttattacattttgcactttatacatttatttatagagctaatatttttagcttctatggtctgaattgcacgaaaaaacattttgttgttttttttggtgggttcttaagctacctttcgtgttattagggcctatttactaagtttttatttttagagccgaaaaccccaaaaaaaaattttgaaaaaacctgttttgacctattttggcgttttcccaaatttttaacaaaaatgcaataaaaacgaaaaatacgcacctatgattagggaaccgacttttagtgacgaaaaatcccgaaatagttaactaaaatagtgacaaaaagtccgaaatagtgacaaatagtcacataattttcagccaaaaattgagcaaaaataatttttattcactgattgcagttgcaaatgaggtacattcctttcttacattttttagcaaatattgaaatttttaaaccaaaaattttgtaagaaaaaaatttgggggaaaaatttttatgaaaattttccaattctaactggtattttttgaaaaatttttaggtcgattcttaggggtgtattttttggttttttggcatttttgttaataaattttactaaaaacgtcgaaatagtgaaaaatagtgacgaaaagccaaaaaagtgaattttcactattaatagtgatttctagtgacgaaaaatgacgtccaaatgaaaaattttaacgcaaaaatgcgttttttgagctcctttcttcaaaacaatttagcaaaaaaaagttttttcactagaaatcggtccttacctatgatcgaccctaaaaattttcagaaaaatatgctataaatcaatcgtagaaatgaaaaatttctcaaaaaatcatctccaaaataatttatttattttcttgataagaatttctggttttaattagagtgcagcgggaccgggaccgggccgggaattcccggtcatccgaagtcccggtcccggattttgaaaagctcaggtcccggtcccggtcccggtagggcaacagggaaaaacaagcactggtaattcaaaatttcccccggcggcgcctatccgcaccgccccggatccccttcttccacaaaaattttttgaaaaagcgcgccgaaaaaatgtgatgtgaaaagcaaatattaatttataataatattcaatcatttaatccaaaaaatgattaattgtttgaaataattaaagaaatttgtttgaaaattttcattaatttaatttagctttaactttaatttttggattttattaaataaaaaacaaaataaaaatttaattttgtattattttcagttgaaaaaaggaaaaacactttcttttttgtgtttgcgaacaaaagttgggacttttatttacatatttttacaaattttgggatttttctacatattacatatgtacatatttttatacatattttggactgtttcatacatattccacaatttttcgtacatatttttcatttttttacatattttgaggatttttgagaatttatagaaattttttgtaaaaaattaaaaaatttttttttgaaaatatatccctaaaaaatcgatttttttcaaaaaatgatatatcaaaaattaatttgtaaaatattcaaatgtgattctaagcctattttggtcatttttatggcattttgtgcctatttcactttttacgaagaatttttttccaaaaaataaccattaaaaaaattttatttacatattttcctacatatttgaggacttttgtacatatttcatacatattttagcattttttatacatattttatttacataattcgcaaattttcttacataaaattagcagccctattaatgaatatttagctcaatactgatttggcataattttttttaattgaaattttcttatagtgaatgtgggttagtcacctagggtacagaaaaacacccggataaatttttgttagggatggcatttcttgcgaagagttggaataattcaatttttcatctttatcgggtgattttttttccttttcaaggctcgagtttaggtcggatttttgtgaatagcctgggcttactcgggatttttgtacattgaaaaaacagatagggagggatataggttggagaaggaagaaaaaagtgccttggaaaatcgagcaaattggcagagtgatttgtgtggagggcgaaattgatttaaatacacaatttttcgatgcaatgggaggggtggataaaatggaggagggatttgtggcaaaattcaacaatgtgcaatgtggggccacatgccatacattgcattgcgttgtgtaagcagtgggggataaatgcctgaataatgtccatgccatacaatgctatagatgcctttcattgtgtaagcggtgggggataattgaattatgtccatgccatttctctctttcgaaaattaaattctctctctctctctctctcccttctctctgttctctcttctccctctctctctctcccccctctgtctctctccctctctttctctctagctttccatcgttacttatcgccagagtgcgttgatcgattttgggcctcctacgcagttggttttagttatggatgatgtgaaaattgctgacttatatctcgcaaattttgtaaaacctgaattggcatattacaattcgaatttaagcctgggaggaagggagagacggggagggaaaagatccccgcctcgatcagcggggctctgatcagtagggaataaaattatatggacataaaatcacgaaatatggccataaaatatggaccaaaaatcgaaaa

SEQ ID NO: 13600 - DNA, 3538 bp, Heterodera glycines
atttttcaaaattccggacataaattttacttaattctttgataattcatttatgtgctattttaattatattcatttttaaaattattattttttaattattattttttttaatttcttcaaaaattttgttttcgtataatagctaaattagctatgaaataaaaataataaacattgaaattttttctgttcgccccattcaattttttttttcaaaaatattataagaaataaaaaaagattggcataaaagaaagaaatttttacagaaccaccacccacctaaaaaaaccaattttctatctggaagacaaatttttaaacgataatttaattaaaaactgttaaccattttaaaattgtttaatcatttttaaataattaacgaataaaaatgaatttatgacaaatttaaaaacatttttaatgtccctttattcggcttttcattgcccgttagataaatctgtttcaaagcaattaaataaaaccaattaattgaaaaacatttcattaatgatccgttgggtgaacaatgaatgggctgctgtcgcatttttcggagatgaattgacccgttaaccgagatccattcacaaaatacaaagaagcattcaaccgttttctgcagaagctgcagttttcctttataattacacctttttattaatataaattaataaaaattttgattaaaataaatttatcttttttttctttcattttggcggttcttccactaaaatagctaattttttaaattgatattttttaaaatttcgatcaaaaatttatgaaaaatgagtttttcccttttttcattcaattaaaaaaaatctggttttgagttctctgatcattctgcacaataactcacgatcacaaatacacatttttaggagatctctccctgtgttgatcagcttgatcattaatctcgccatgcaaaaaaagcacacaaaacgcgcacccaaacacagcacagcccctattgtgttgtgatgatttgatttgcgaataaaaacattaattatttattcataaaaaaggctttttccgcttcatttgccttgggcaacaaataaatcaccccccccccccccaattagccttatcaatgaaaaattattgcgcgatttttgggcgcatttaagggcctcccaatgttaaaaaacaatgcgcgcggaaagcttgatcagatgcttcttcctgttcccgaccaatgatttgatcaatgaataatgataataataatatttgtgttttgcttcagattcaagtcgtggaaatgatcagtttttattcaatggaataaaaaataattataaaatttatatttaattgttatgaacttatttttgtttttttttagaatttggcaattttatttcattcattttccagaaaattgcatatgtatttttgttttttatcgataaattcggggattttaaataaatgtttaacccggattttgctgttttatttttaaaccgtggcaatataaaagttttttttaaatacaagaattttaaaaatgaacctcccatggctttgatttatagcggcgctttagtcctagcgtccaaaaaaatttcggaaaatccgaagctttcatcaaaaataaaaaaactaaaataaagaattgattgcataaaacgacaattttttgatcattttttttcatgtctaatcgttaatcagcgaaaatcggtgattgaccgaattcacttttccgattcaagcagtacacccaacgaccgctttcttctgcgcacaaaaaatcctccaattgaacaattccatacacacacacacataatgattgacctggaattttaattgggtgctgcaaaaactttaaaccctattttaaataagaaaaaatgaatataattttttagaaaatgtatcatacagtaattttactgatcatttgccatctacttcatacagtaatctcgctggcttctgtgctcgtttcatcgccgtttgataatttccgaattgagtgcccacagtcatcgggcgcacaacggttgtcaattcgtatggtcgaatcgcaaggccagaagcgccaggacactgtattcgtgctcagttgtcagcacattgttgaggtaatgtgtagtacggtatacggtagtttacagtgagaatgggtggcagcttttccaaaataattaattattttaaatttcttaataattgcaaatctctgtgaaatgtgcaaatcaggagtgggtttgaggcttactgcaccactcttcttacaaattaacacaattttttaaaattaatcattttgctaaaaaatttagaaataaaagaggaaaagtgcaaataattttaattgctaatgattaagtcccgctttacatttgaaatcatttaattcttaatgtcatcattttcaaatctattaaaccaaaaagtaattagccgattatacaatattttaaattcatgaaaataaaatcagttatattttgcaaaatttgtcaagctttatccatggctttgtctatacaaatatttttaattaataatgaataagtcaattttttttattaaaatcatttaatagttaatgtttataactaagtaaataaaaaatagattttttttttgaaatgaggatttgaggatttttgagaaattttaaagtttctgaggcttttggggaaaatcgtcagaatctattaaatttgtgattaaaaattttaaatttaaattatatatttttgggagagtaaatgttttaatttaaaactaattatttattaattttaaattaaaaaattcatgtattttttaaatttgaatttttcaaaaaattatttcatttcaatttaaataaataatcaattattatacatttcaaagtttctttttaattaagaaaaggagtaatttattttaaaatttttcaaaaatttaatgcattcaatttttaatcttatttttaataaaatcattgccttatttattttattttaaaccgtggttgtacctcttccactcgtggctgtagctcttcaaacaattgttgtactattttcttaccagggttgtacctctgctaaaaatttttaccacttctaaccatggctgtatatggaatttgaataccctgattaattaaattaattaaatttaatatttattatttctattgtaaatttttcatttaaatgatgttttgtagaaaaaaaacactttgtttaaattatttcaaatatatatgatgaaaatgatgtgcagtgttcaactaactattcattaaaatttctttttcattcactgcattggcacaaccgcattagagttattaacgcaaattaatttcaacaaaaatgcaaattgtttttgaaatgccgtgcgatattcagaactaaaatagaaaaaataagaattataataattaatacaaaaattgaatttgccttgtcaaatacaaaattggggcacatgatgcggcactgaaatgcaacaaaatgccaataatttggttaaaatccccataaaaatatgg

SEQ ID NO: 13601 - DNA, 1264 bp, Heterodera glycines
  unsure (1)..(1264): unsure at all n locations
attataattgcaatttctttttttgcagttatatatgctgttaaaaaaatacagaccaaccttactactctaatcgtaagtcaaatgcctgcttttatattaaaaacgaaagtcagaaatgtgccatctgtgcttcaaaatttgaagcattgggtgagaaaatcttttttgttttttcaaatatgaatccgaaatatttttcaaaaaattgggagtgaatgagaaggcgggcggtgatgtaccaaaaaaaggattttacgaccgttgattagttaacatggccatatattataagcggggggggggtcggctttttttcggcgcgttttttccgaaaaaaatttggggaccgtgagggggggggggcggcggtgccgataggcgccgctgggaatttgccataggcgccactcaaaggggtttctaatgatttttaaggaaatcggtcaaaatttattggaattttcatttttcttcgattgtcctcaatttttttatactttcagccccctttttgccgctgcaccaaatttgccgattgaattgaacgaagaaaatggaacaaagcagggaatctgaaggaaaatttttgcaaaatttcaccattgtttttgaacagaaaaatgtatttgttgtttaaaaacgaataaacggctctgaagcctgaaattaaattgtaaattatttgagtgtaatttataatttttgtcatgcctttatgttacggtatcatcactgtatcgtccggcgactcccacttgatgttgctgttctccgcaaattacaccttcaattttcacacaattgtcccgttttcctattccaccgatgggttggaaataaacgaataaaaatttgaattatttctgtttttaaaaatatgaatttcgtaaagcatcacttaaaccatttttagactaaaaatggaaaatttaaaaatttaatttttgattttttattcgaatccggatccgggatcgaaattgggcgaaatggatgtcagattcatgctcagcgacccttaaaactcaaaaaaggggggctaccatccgcactattacctcgttttgttttaggaaaaaatttctanaactgcaaaattaacaaaaaattttgagtttcttaagaatggagctcactgaaccataaaacccaacgaaaaattgatatacttatttaaaaaaattttaaacattgtataaattatacctagcacccagggaacggatttatatgtttttagcatgaaaagctcaaaaattgc

SEQ ID NO: 13602 - DNA, 2846 bp, Heterodera glycines
atattttctaaaaaattcgaattctggttagggattcgagatgagctaatagaatgacagatcgggcacttgtaatgttgtgatacccatattttggtaaattgatgaaaatatatatacctattttcgaaattttaaaggtaactcaatatatgaataactattttattgatacaataaagttaaataagtgccaaaattggctatcgtatgataaaaaacaaataaaatgaaaaaaacagttaattggggggaaggtggcaatgggcatgattgggccctacgaattatgcaagtatgctgaggcggcaaccgtccatcaggtttccttctcctgctcgtcctgatcatcatcatcaccgttctcgttgtccaccaacagaccccatcagcgagtcagaggcgacggagtcgagtctcgtcgtcctcctgctccaaactgtcctcgtcgggcctgtaggtaggagcatcttcggcggttttgagtgggaattgcactgaggccggcttaattaaagggattttcatgttggtaaaaaaccagcagactttcgtcacagacgacagacagcttaatctttgcgagtaatagctcacctaaatttacgtataagcaataaattaaaattacataccatccggtctggcgtggcaagaattacataataataattcgtattcacacagatttttttatttagattcgtttttgaacgatgttttatacatgattttgtatttaatttaaagagtaaaagagaggagttattagacaattaccaaaaaagatttgattatttaagtaattgttgatattttcgtttataactaggtttagctcgaatatgaacaaagttattgtaaagaaaaaggggattgtcattgattggactcataaaatatgtgcctttggactcataagtgcattagagcaggacaaaacaacactatttccaaaatttttgagatcgaatttttaagaaatttttcatttcatatgggtctatttttgaaagttttttggtcgattcttagaggtatattttcgaaattttttgggtcgattcttagtggtgtatttttttgctttcattgcatttttgtttataaattttgtacaaaatgccaaaataagggcaaaaacttattttaagggcgaacacccaaagaaaggatttcttaggttgaagattagtttttgcgaaatgaaatatatttttttctgctgtcattttctccattactttacatgtgcactattttgcggcgcgcttttttttcaaaaaacttggcaaagcgaggtgtccgggggaaaaaaattggatccttgccattcatggacgaatgcgagccttgaattagttgaattacctatattcgttatcagcgatcccaaaacgccaagtacatcgcagaaccgcttaagacgaacttttgcgggactttcaaaatttgaaaaatttaatctcaaaattctggcacagaaatctctcttcctatgtggctataagttgaagacccatggtcaaatcatatttgttaaggcctcccgttattatgaggaggcaaggaagtgattctaacagagaatagaatacttgaccgtaggactgatgtaggtggcatgctattctctaccacttgtctacttaaatttttgaatttaccatttgtatcatctaaacgtagaaatcgcttccaatttctgaagtcattctgaagcgatgcgtttccttttgagagagaacacaagaggaacgcagttgtacacatactgtagacccgacccccacattttgaggataattcctattaaatttgctgttatatttctcaataaagattatcacctttaatgctttatttcaaaaaataagtaatttacaataatatcttatcactcatttactttttatagcacgcaaatgaacaacgacttacttccggaacgagcccaagctggggcagttcaggacgacgacgcccggctgggccgcatctcaaaagtttgcttttaaattttgtaaaacaggatattggcgtttgcaatggtagattttgttccgaaatatacttttttgattatgtaaataaccaaatgataatcttagatgttgactggcatttgctcaatcttgaaattgaatattttttaagatttaacattttattgcaaatattgctgtggaatgattgagttgtagcagcaatatgaaaggattcagaagcagggtcgacattgtcctcccccaaaaaaaaaaattttaaagaaaaggacaaattttttaaattttgaatgtttttcttatcataaaatcccaaaaattttcccgtcgacacttatcgacaccgcggagcccaatataatatttttatcgaaaaattgatctcgcatggcaaaagattgtcattttttggtgcaaaacctaacaaattcctgttttcgcctctgcgatcagaattttattttctaaaaaattcgaattctggttagggattcgagatgagctaatagaatgacagatcgggcacttgtaatgttgagatacccatattttggtaaacaaaattggctatcgtatgataaaaacaaataaaatgaaaaaaacagttaattggggggaaggtggcaatgggcatgactgcgccctacgaattatgcaagtatgctgaggcggcaaccgcccatcaggtttccttctcctgctcgtcctgatcatcatcatcaccgttctcgttgtccaccaacagaccccatcagcgagtcagaggcgacggagtcgagtctcgtcgtcctcctgctccaaactgtcctcgtcgggcctgtaggtaggagcatcttcggc

SEQ ID NO: 13603 - DNA, 1987 bp, Heterodera glycines
gtgtcatggcagctagtacacagggcaactcgtacaaaaaaattcctaagaattttcaactaaaacttagaatttttatataaaaaaaaatcttaatggattttttagccaagaaaactttaaaaaaattttttttaaagtttttaaaaaatctaagtgttttaaaaagtttttctaggctaaaaaattcttagatttttttatctaaaaatctaagtttagttgaaaattcttagaaattttttttgtacgagttgccattgacccaaaaaaagtaacagcagaaaatgagtgattggatgggcttatccacttgccaatttccgcttttttgtcccttttttttcttccaccgtcaaatcaatggccagcgtcactttgtcctcatttttgtcgtaaaatcctttgctcggctccattaattccttaatgtcaatttatttcacgagaaatgagttttgccgaggttatgatatttgcatttatactctcactttatggttattttgacttgtcgattagctttttgatgaattaatgcgttttattgttttggtcttatcagggttcgagctccgtgggcagggggtgaattaatattttccgataaatttttgtttttcttcggtattttgtaaaatatttttaaaaatattcaattttcctgatttactcaagaaaattgaactttttaatttcaacgtttttatgggtgtttttgtctattatcgtaaaaaaataaatcaaaaaaacgttaaccggtatcgaacccataacaagaagtaatattggtgctgacaaagaggcactaaccactaaaccacaaataggtatattaataaaaacattttcataaaaattagccaagatagttttaaaaaataaaaattgtatgttttccgtcttttatcatacgaatatgccattcttagaggtgtattttcaccccgcgggggcgaaggtcgcggggctcgaaccccaggtcaataataccccttgaattttcaaatcttactccaaaaattttgactgtcactcaccgtaaaagtaatgaaatatttgaatccccggtcgttctcttccttgttaaaaacatggtcaatttttttcgttaaatcctccgttccgttcttttgtgcaacaattcgtagggttgccgaacattcgaagctccaatttccatctttggtaatcaaaattaattaatgcaattaaaattctcaattttcaccattcgttggagggacgcacaaaaggtaaatgcccaaatatttctcatttattgtttttgcaaatattttccactcaaagcccttcatttgcatggattcactgtaacggttgctcctcactttctctcgtgcaaattcagaaaatttctcaatttcaagtgtgagtaagtaatccaaattttaaatctcaaatttttttaatttataggcatttaaaatgaataaacaaaattctctattgttaacattgagaagggatttgcttgatcattggagaaacagataattttataaaaaattccaaaaataataatcgtgaaaaaatcactccatttattgtacaaatgttttattttgtaaatggtaatcaaagtaatcaacagaaaatgagcgattgggtgggcttaaccatcggccaatttccgcttttttgtccctttttcttcttccaccgtaaaatcaatggccagcgtcacattgtcctcatttttgtcgtaaaatccctcatccggatccatcaatttcttaattttcaatttattgtgattttttttcgatgagttttttaaataagttattgcgctttttatgggttttggtcgtatcatacggtgctaaatcaaaatacccttgcccaaatgatcattttttgacaaaacatttagcaaatttgaaaaaatttcttttctgccactcaccgtaaaagtaatgaaatatttgaatccccagtcgttctcttccttgttaaaagtatg

SEQ ID NO: 13604 - DNA, 2806 bp, Heterodera glycines
  unsure (1)..(2806): unsure at all n locations
atttagtttaactattttgggattttcgtcactaaaagtcgcatccctagttataaacataagaaaattccttttatctgaaaatttataaaaatatttttattgttgaagagtatgcactttgaaaaaaaagaggagacagaaaatttggctctagtcaagtttatgcgttcaatcatcagtgactaccaggggtgtgacttgtctcagaaaagacngagagtttggcgagaggcgagangtccccnaaaaancacgngagcgagatcatgggancgcataaaaccgacccagaaccacaaaaaattcactccatttattgtaaaatgttttattttgtaaatggtaatcaaagtaatgaacagaaaatgagtgattgggtgggcttaaccatcggccaatttccgcttttttgtccctttttcttcttccaccgtaaaatcaatggccagcgtcactttgtcctcatttttgtcgtaaaatccctcatccggatccatcaatttcttaattttcaatttattgcatgattttttttcgttttgtcgatgggtttttttaaataaattattgcgttttttatggtttttggtcgtaccatacggtgctaaatcaaaatacccttgcccttgaattttattgaaaattgacataaaatgatcattttttgacaaaacatttagcaaatttgaaaaaaaattcttttctgccactcaccgtaaaagtaatgaaatatttgaatccccagtcgttctcttccttgttaaaagtatggtcatttttcgcgacaaatcctccgttccgctcttttgtgaaacaattcgataagtgatagaacatttgcaactccaatttccatctttggtaatcaaaattaattaatgcaattaaaaattctccatttttcaccattcgtcgaagggacgcactgaagataaaagcccaaacatttttgatttttttccgtttttgttcgtattgccaatattttccactcaaatcccttcatttgcacggccgcactgtaacggttgctcctcactttctctcgtgcaaattcagaaaatttctcaatttcaagtgtgagtgtgcctctatttcccacggaaatgttcaagtcaggaattcgggtttgagtgggaaatttcaacgggtaaagtcctggcacaccgcgaaaattcggatggcaatggaactgataaatgccgaacatttcttcaatgctcagaacactggatggcgcccggaaaatgcgtcagtggaaaatgcgtcagtagaaaatgcgtcagtggaaaatgcgtcagtgaatgttttattgtcataaaacaagttccttgcgttttcgggggcacttaccacgaatctggtatccatttcggccaattctgaaccccggacgcgaattcgaacaaaaactcgaaagtccaaattttcgaatttagcattttttgttcaaaaacggcataaatgatctcctattgcaggattgatgtatttcagtttgtttctgtgtatttaaaccgatttgaagaaaaacactaatttcgaaaattttgactttcgattttttgttcgagttcgggtccggcgttcggaatgcagaacgatgttcttatagaagtttatttctatattacaatacaaatgccatacaactttattttaaagtatttttatcactgacgcattttccactgaccgattttccggtcacgcactggatggaactgcaaaaaagaataattatttgctctcccttttcaaagatttcattcgaccgatgctttctgaaaaatcctccgttgagatgagagggaatcgaattttgagcagtgccgggccaagcactgatcgacgattctctgctgaacattcgatggcatcttgacggcacttttcgtcggcccaacggagtgcctaaacgaaaaaatattttaattaaatgagtatttatataaatattttgaattcaaattacagctttccaaatttcaaattccttgccgatcaccaactgatcattctcgaataattcacagagcaaattctgatcaatttgtaaaaattccttagattcgaacaattggccggcattttgacaaatgtaacgcaaactttggtgagcaaaatcctaagaatgtataatattgtaaatacacattaaagtacaataattgcttatattcagtttctcccaatttttctgattttttgaattttgagggctggaaattttttttaaaggaatcaaattgtaacaccaaatttcattaaaaatttaactttttcccatgtagcaactcaggctcagcttttgaaaatgaattccagttcttttttgctgaatttcaaaaaacttaggaactctgttaaattaagaagatggttcgtcgtatttcccacctcaaagtcgaaaagacgcgtctgaacaagggccaagaaaacattggacaaatttggaattggaatttgcatacatcgacggatcagcccccccaaaatgttgtattttctggctaaaaatattcggtgattaaaaaaggataaaaattaaaaatattttattaatttgttttcatgcatttaatcagttttgggtaattctgccgatgggttctgaaaaattttaattttcaaagtcaccgaanagggtgttcctaacaaaaggataggttacccaagtgactttggggcgttcaaacgaatatttcagggaaaggagtagggatgctcgaaaaccttggtctcaagtctcaactccagaaaagtctccgggtttttttggttctcggtttccagtttttta

SEQ ID NO: 13605 - DNA, 1697 bp, Heterodera glycines
  unsure (1)..(1697): unsure at all n locations
aattttaattaataattaaaacctactcaaaatattctatagaaatcaatttaattttaaaagtgtttatttttaaaaaaattgagggttttcgtgccaattttgggtcttttagcattttatttttggagtctatttttgagagaacagcagacatttttgcattgtttttaatgctttcatttcaacgaattagcttaagttttctcattatgggaatatatttattattgttgttctttattatgaacaaaagtacaaacatttatgatttcttttattactaaaatgccattcgaagaaattaatttagtttgaaaaaaataagcgacaaaatttaaattatttatttgaaatatataataaataaacttaaatatggtcgaaataacctatcttttaatggacagggagggccacacaaaatattaaaaataataataatgatatgttattgtgtgaagaccagcgcatatgaataccgaaaacagaccattaaaacaagcataattataatttttaattaaccataattaatgcaattttttcatctttctcttttatcttttattttcaaacccgtgtattaataaactcctccattttgtgttcattaaaagttaaacagattattattttaattagagtcctcaagcaaaccattaatttgtagtaatattttttttgtaaacatttttccttttttgatgtaagaaaagaatggattacaattttaattttttgaaagaatcggatttaaataattgaatagaatccttaatttgaagataattcaaattccaaagtacatctgatcgctgctggcaaaaaaaataaaaaatagaaataatttgtattggctatttatcaataattatgacaagaattaaaaaatttcgacaccgtttgaatttagacactagcggcaaattggacccccgatttttgtttatatatatatatatatataaaagttaaaaaataatcgcttatatttaattaatttagcttacaataatgaagcattaatttaatactcagtcattttccagtttcgaaattagcaaattcctcggtaaaaagacgatttgtactgttttttttcctatcataagtttcaactggatttgtcatttttttaaattgactaaacatatatattggtattattggatagccgccatatttatcagcacgcaaaatttcaaaaaatttggtccaagtacaaaaaaagtgattgccagaaaattccaaaaccgacattttttattttctggccattacttttttgtaagtggggcaaatttactgagcttttaatttttatgatgatttttgtcgataatttttttttggaaaaatacagaattgtccttcgtccattctcctcacatattttttttgcattgcgccaccccaacctcattcatccatataacacataattccagcacagtcgagagaaaaaaaccctttttatgcccgaaattttccgggcctctcccccgcccccgcccctccagcgatgaaaagaatggggatttgggggatggatgaagaagccaagccgtgcctttgttaaatgcttcttcttcttatttttctgctttcattctgtgtngggacttaatccccccgccccctcccatggcgcgagccaactcagtcccacaattccgtcccccgccactccttcc

SEQ ID NO: 13606 - DNA, 3416 bp, Heterodera glycines
  unsure (1)..(3416): unsure at all n locations
ggattgatcggcgtaggattattgctcacattaataaatgtgctggttgtggtacaaattatttgtacaaatattgtcctcgtcgtcgttcacccgtcgcgccacacttcgcaccatcgttcattntattgctttctgttttggcgttgttgtggtggtgtgctgggtggtagtggtgcaggttttaaccaataaattttgatttaaaaaaagttttaattccttatttttttttttaaatttattttgacaaaattttcaatttttttttcattttttaactttaaaaaatatttctaaaatgattctacgaaaaaaatataatattatttaatttattttgagtttaattttgtaaaatttaaatcgcttggattttttaaaaattaattttacagaattattcatgactttttatcttttttttttaaaattgacattttttgctcaacaaattccgtcccatattgcatatcaataaatggttccacaaataatcacttttccccattcaaatcaatcaaccggaaagtgagaagccccataaatttaaaccacaagcaatttagcagtcgcatttcaatgccaaattaatttttttttttttttaagatttctcgcatcataaatttagttttcaaaaaatatttattttagccctccttctgtccaatatttcaacaatcaattaatttaagtattacgaaaaatttttctcatatgaaatataattaatttaaattgcttttattaataacaattaatttttatgccaaattttgaattttgtcatttgcatttatatgccttcataattttcttttttgagcacctttctttctttgaaataataacagagacaaaaacaattatcaaaaaaatcacataattcaaaaaattaagcaaatttccttttccatctgtttaatgttgaaattccaagtcccaatttcttggcaattatttcgttgttgattttaggatttctttcttttatttccaaatattgtttgacctttctcaatttgtcctcattggaatatttattttgtgcttaaaatttaaaaacttataataaaacccagaaagttcacttacttttatggtactttggcgctaattcttttttccattttcgaaatgtcttttcaccaatgcccaattccttcacaaattctttctgtttgccttggccatataaacttttaaattcatcaaatcgttcaatgaattctttctttttttcctcataaaaattcattttcattttattaattttctttttatttaaatttaattcttttttccatttatatattttgtggcgatttgtgcctaataattttgcaattttccactcaattttatttcttttttcattttcatattttcctttttcttttaacttttctttaattgcatcaaatttctgaatggtttctcttttttgttgatcatttggacaatttccatttttccacccatttgatcaactgttgctgagttttcattttgctcgttttgatcattttgttccttttttataacattttcttcacttttatttttgtcccatctgtcgccaaatatttcgtcaaaattttgtcgaattttgccggatttaatttcgtaaaataagcaaaatataataaatattaaaagccacaaatttatttttgccattttgaattatatgtaaggaaaaataaatttacatgtgaattatttctttcattaatttgataattaaatagaatatattaaattgtaataaataatgttttttgtagttaatgcccaaaattttcatttttgaaaaattttccaaaaaacaattcttcgcaaatcttttttttttttgccttggattataattataaaaaattttgcaattttttttctcaattttggtgtgattttccattgatattataaggccgggaccggaaatggcctttcccccgcccatttatcactccgatagcgcttaaacggcagtgtgaggatcagtgtcgggagtcacttcagtggaacggccaatcgatccccgcctaggaggtacccccagagatccattcatcatcccttcccttccaagccctgaggggcctaattacggacgcgtaagagagtcccctggactaaattacctcattagcactggtagtagggcctaacggctttattatatttacccttttcattcaacttttctttaattattttgattagaattaaaaaattttagttgaaaaacaatatttgagaatttgttaaatcattgtccaacattaccgacaaacagtaaaggcctaataaaacaaaaccggttaaaaataaaaaaaatatggaaaatttgtaaaaagctttacttcctcaattaaatcaaaaaacaaacaaaattatatataaaaaaaacttttatcatcggcaatggattatgaaaaacgaaaaattgcaaaattcccaaaaatatgccagtttatcagtaacgatttggaggagttggaagaacgataacagcattttgctgaggatacacatgatttagatggaaaatctttttgatcgacacaaaaattcttccagcaattttcgtcggaccgaaaatatttttgataattttacggcaatcatttcgaattgttttgttcagcaaaaggaaaacgattgatggagccccttaaattttttaaaaatttatttaattaatttcatttaatgataaattaccgtgaacgctgagccttaattgaaaaaaagaaattactaattatatttaattaaaattattaaccaatcaaaatgggtaaaagtgatcatccattggttgagctccattacttgcataagcacatagatgaaactggccaatgaattcatagaagataaaatgaacacttggagaaatgcctaattgataaaatatatttaaaattaaatctttttcaaaaaaataaatttatataaatttttgaaccattttcttggcttgtgaaatgtgtgcttggtggtagcactgtttgtgccaaaatgcgaatgtaaacagcaaatagattgatggcaccgaaatcgcgatgatcacattgtgaatgaggtggagtaggacaaaatactgtaaaataaattttaaaaaaaacttggattgcgatttgaatatcctgattattcttgagatcagcattggtttcaattgcatttgtaaaaataggcaaaatctttatctttatgtcaattaatttatccctctgtagaaagtaagaagttttttaatttaggacaatgaagtcttttctggaattacagattatattttagatatgttttgtcattatgaaattttacagtttttgatatctaaggtatcccaaattggtatagctcggctttgtattttcttcagctttgattaatca

SEQ ID NO: 13607 - DNA, 3198 bp, Heterodera glycines
atgggtccgtatcgttatggcatcaacccaagtgtttgggttataactttttttgttgctagcctaatccagcaatcttggtatcaatcgaaagcttaacatgtttagaagatatttctaagctattgcttcgcgattagacaattaccaaaaaagttataacatgaaattccaaaaaagtcgaaatttttgagtttttttcttaataacttttttagaagctaaaatttttgtttgttttttgtaaggctaatagagcttgtgaagggctttcgaaagataccaagattgttagatttggtcaacaagaaaaaaagttataataaaaaaactgaggctggcgccaaaacgtcggcgccaaaacgacccagtcccaaataagtttgttttttttgttcagtaaaacagaatgccaaatttgtaaaatttaaaaaatcccatgggattttcccttgtaagaacacaaaagccgacctcgagttaaaaacataactttcaaaaaataaacagggattcgatagaggtggtctaaatatagaactgagcaaaattttaagaaatttcaaaagctaaatttatttgtcagccagattcaaacctctttcacgacctcaatattttttatttgcttcttttatttatttttatctccggaataccaaggcaaagaccaaatgccggtggtgaatgtgtactcgacttcggtgaccagcgacaacatttcgcgcaacgaccttttgtcatgggtcaacgactgtctccaagtgagaaacattggcatttgaaatgcgacggcaaattcgaattgagaggcctccgtttgccatttcagtccagcctgaccaaaatcgaagagatggcctcgggcgcggcctattgccaactgacggactttctcttcccgacccaagtgccgctcaaaaaagtgaaatggaccagccgatcggacgtggattgggtgcccaattggcgcgtgttgcagcaatcgtggaaacccatcggaattgccaaagtttgaatcaaaatgcaacaaatttggagttaatttgcaggggaggaccaattcatttgggaagttggaaaattggggtgaggggatgcctaaacgaataaaagaattcaaacggatgtcaaatcccattgcatttcagcctgtgcccgtgcagagtcttatccgggccaagtttcaggacaactttgagtttttgcaatggtcagtctcgttcccattcattcgatcgttccttttccctttaggttcaaaaagttcttcgacgcaaattacgatggtcataaatacgactctttggcggcacggaatttcgaagtccgttttgagggatttgggctcaaatgctttaaaatcacttttccattgtcacttcacacacaaagatgggtctcggaaatatattttttatccctaaaatccgtaccattttttcttcccatgtccatcccccctttttttcattcattcatttccaatttcttaggagtttcccgccgctttgcctggtggtagtaaacagcgtgcgcctccgcccattgcgtctgccgttgcggcgcgtcgcgctccgtcgatgtccgccacaaacactgcgcaaaaatacggcggctccgctttgccggcaccttctcagagccgtgcccaaactgccaccaaaggttttttaatttggagataggaaatgatgtcaaataactttttaccccacattacagcagccaaaccgcctgctgctcaacctctcgtcggaccgtcgcccgccgctccgcgccgtgccagcccccgctttatgggctcctcccagcgcccgccctccgccgtgggacgtcatccaccgcaacaaacaaacggcggtagaacgggtggaagcaccggcggaaggccaaaaacggcgagtgcatttgccagcaaagcgacaccgaaggcggcgtcgacggcgacggaagtgaacaatttgaaacagcaagtccaaacactggagacacaggtaagaaacgggggagtacaacgctttgtaaatcttaccatcgtttaatttgcttttagaattccgaagtcactgctaatctggcgattgagcgcgaacgtgcgcagctgatggaacgcgagcggaacttttatttcgacaaattgcgcagcattgaaatcctttgcggcgcctgcgcactgtccgacggcgaataatgtcgccaagatgcgttcaagaatcagaacatggggcacaaaattacgggcgtaaatgccgatgaaatacatttttaaaagtgccgggaaaaattgcatagattcggcaccaattgggtcccaaaggaagaatttgaaaagacaaatgacaaaacgacaggaaccacgcttaaatttagaataataatcatttcttgtttttatttaaatactttgatttaatggaatttaatttaccaagataataaagagactctggaagatgagaatggctttcatgttcgggtggatgaccgatgtgcgtgccaccaaaatcaaattggcaatggacaacggaatgccaacaaaatttatcaacagttcaatggcaccgccgaggaaaaaaagaaacagctcagtgtcagttggtgtcgttgtgttcatgtttttgtgttagcatacgttgattatttcaaaatttaaaaataaattaaaattacgtttttaatcaactgatatatagaaattataataagtcaaaccaaattatgggggaacagaaaaatcattcaaaatttacacaaatttccccattattaaatacaaatttacaggcatgcttatgtaaaaaatcacccgccaatgtcagttggtgccgttgtaaccgaagctcttcttaaaagtaaaagagaattaaaaaaaggtaaaccaaaagggttaatttttgttcattttctcatgttagcaataacttgatttagggatgcaatttttaggttttcgcctatttttttcctgagctgctaatggcctaaaacgcatgaaaaccatgtttttttggtgcttgttaagcgaattttcggattggcgagaatttttatcgcaccctgtatataaaccttagctaaaaaatattgcctacaaatatatgaaaagcattaaaaaagatacattattaattttagactaaaagaagggaagatggtagaattacaaaatttgcattatgactagggttttaataa

SEQ ID NO: 13608 - DNA, 4769 bp, Heterodera glycines
  unsure (1)..(4769): unsure at all n locations
cctttcatttcatggtgacaaacgacagacaccactcccctccccttccccccctttccatcatcggcttttctgtctgtttaccattagcggtgccaagccaatattaattaacactcatgcaatattattaaaatgcccttcttttatatttttgcgaccgcactctgacaaagtgttcccgataccaataaataaacccaaatgttgatcagatgccttctgccgatgtcgccggcccaattccgttgcgccgcgtgtcgcatgcatttgaccagcagcacagccaccaccaaagtgtaaaaactttgagcgcacctcccggctaccaccaccaacagcaacaaatcactggtaaaataacattgaaattccagtgttgaaatttatttttattatttttttggtgcaggtgttttcaatcagtcgttgaatgctacggcgcccactgccgcagttgtgtcacacaacacggactcgtccgactgcgggtccagctccggactgggcggaatgggcacaccgatcaaaggggaagagggtcagttggtgctggtggcatgtttcctgggactgtttgtgagtgtctgtctcctcggatttagtgtctcgaatcttggaaaatggctcgagtagcaataaagtttcacaaacagtgtctgattgattatctaaatacaactgttttaataggtccttttaatttcgcctctctttgctcaggttgttccgcttcctgctcaacttcgtccaacaattcaatggccgccgattgtccgttggattcgcatgaccgcggcagcggtggccaaatcccagagaaattggttggtacagaaggcgtcggcagagagcacacatcggtggccaatggccatcgttcgttgttggccagcgcgacactgaccccggcgatggtttcgtcgtcgcaccattccgccacaaattcgccggtccgtcgtttagccgttctttgaccaaagacggagttagcaatttccaacagacatatgtacctattaacagttcaatcaaaatattttcctatgtaatttttcactgttttctaaaagaatttgcttttcttttaaggtgtccgccaatttgatgcccatttttcaccattcggccgccccacaacagcaaatgcttcaacaacatcagtcattcaacgcctttgtcccaccaattccgctgcttaacactcatcagccaaatgcttctcaaattagtaaaccatgattacctttcaacgatattaatcactggaatattaaactctcacttttcttggcatttaaaattttttctttttctaaccttggctattcaattccataaaatttggcatggcattggtcatttcatttggcaattcccaacagattcgttgcactgttctctttccgatggtccgtctccgctgatggcgccacctttgcaaccgccgaccgttggcgtccttccttacgcagcggtggctgctgcgtccaactccgtcaggcctttctccgctgcgtcgactgtcgccgcttccgttggcggcggtgcgctcccttcgcccgctgcgctggcgtcaaagaccggcctaaaacaactgcagcattcgcctccaccgctgtgcggacgtgcgctttacacaatgacatgttcgtcactattgctttttctttgccacccacacgttccaaaaattgaaaaaagagctttgacattttatgctgttaatatttatcagaatattttttggaatgccaattggagggggagggaggcgatgagcgagcgaagcggtggttccgttccccatttttacaattgcttttctactttttttgtttgtcattgaaaaaagaggaactttctgtaaatgacttttttagatttgtttttcttttcccattgttttttgttccccttttcaacaggtgaaaccaacgcactcgcctcggtcagtgcggctgctctcaccgccggttaccacgtcactttggatccctcggcttcggcgcccccaatcatcgcaacagtggcgacgaaagcttccgtcggtgccgaatttcagcaggtggcggtgccaacgagcagaaacgacggtcaaactgagcaacaacaggagaacaacgatggtaaggatggaaatgaaaatattttatcaaatttaattcgattgattggtaaatgggtctttttcctcttcgtatgtccaaactccaaaaccgagaaaggaaattattaaacaaaatatttcaaatcaatattgaaatgaatttgtttttcccagcgtcgtctcgtgaacaaaaagataaaaacgatggaggcggcacaacaacaaacaacaacggttcttccggaagcgatcaactgaccggaaatgacccagcaaatgccggggacgcaacagctaatttgcccccgggcgttcctcccgaaatcgctgcggcaataagtggtggcaacgatctctttgtaagtgagggaaaacagcggctaaagtgtttttcaggacagccaattcaccccatttcaatttactctttttgcaggttcacattcaccttggagatgccattgccctggcggtgggcaatgatgttcagcacatccacgggccggcaacgatcagaatggtctcccaatcgacgacgccgcaatcggcgattccgatgaatgttccggaaggacatattgtacagcagattttggatagacaggtgaatgacttcattttcaagtaaataatgactcttttgcatcaattttttccctgcagggcaatctgtcccacattatcatgtcncaagagccccccgccggcgttgggccaatgctcggccaacatgtcattaccgcaacgacagtaatgtcccaaattccgtccgctccatcgacgacggcggcacagcagcgacaaatgggttaccaagtgaggagggcgtcaatgaatttgccaatgacaatttccagtctgttcagctccatccttcggctgccaccgtaccactaaaacatttccgttccaacaattcgccaccgcgttcgacagatgtttcgccgctgaacgatgcggtgactttgtcacggcagaagcaacaccagggaatggccacggattcgggcgctgtttacccaagcggagttgttccattactcaaatggagtgatcttcaacagcaccaccaacagcaacgcgagcactaccaaagccaaagtggaccattcggaaggcagcatcaacagggtcgagggcaccataccgtgccttccccgttcaacgtatacaatttggctgattcggaaaccgtctcttcggccccgcggcattcgcccggtttttatgtgcatggctcgacaactatgggcgggatggacaatgtacgttttttaaaatttttttccctttatttaccatttgaattcattttcagcgtgttggtccttcggaaacccttccaactgttgcatatcaccaaaaccaccagcaacaacactcccaacatcaacattctgctcccggtggtgccgacactttcgattcggtcaatttcccaacacaaatttcgtcagtgattgatgatgatgagaaggaacggctcagagacactctttcctccattcagccaccgattctctcaaaaggtgtgaatattcagatgaattttcttaactaataattttgtacgaatttcagtgactgaccgtgatgccgaagtgatatggcaagtaatcgacacttctgaggctgctgcttccggtggtccgttcccgcaaattgacacctccgaattcgtctacaaattgactctgtttgaccctgtcaaacattcacaaacattccacaaaaccgaggcgggagtgaatgtgttgcatttgcagcaattgaatcccggcactgaatatatggtggggttggcttggctgcgcttcgcttcgtttttcaattttcttttctttttaggtcgctgttcgtgccgaattgcccgaacgcggcatcaacggacacccttcgacctttacttcctttcgcactttgtccacttctcccgaaacgccttcgctgccaaaattggtcggccgacaacagaattgtttttcaattcagtggaagtcacccaattgcaacggagcgccaattctcagttactgtcttcaaatggctaaggttgaaaaagcaatttccaagcagcacatggagtctgaacgattcagggaaagatggcctcatttgagacggtttacgacggtgcccacgagcaaacggtggtctccgggatggacagtggcgcgttgtatcgtttccgtgtgttcgcgcgcaacgaaatgggccaatctgagagttcgcccgttctgacggtgtaccccgagaggagtgacactggcggacgaatgccgccagcctatcaccaccaccatgttcagcaccattaccatgctcaacaacaacaacagcatggcggaatagtacaacgtggcggtaagcacaaagaacggcgaggggtgggagacggatgcaaaaacaaagcaattcagctgcgtctgttgtgggctcctcttccgttccgtcttcggctgctttgccctctcaccatcaccatggacacaatcaaccaattcgcccccctcactcgcccaatgtttattcaaccgcagcacgggccatcaaattgtcgtggaacccgttgagtggggcggacttcacatcccttgcagtgaatatntggaatctttngcattcatatttttaattaaatttgtttaaaaattttagc

SEQ ID NO: 13609 - DNA, 1986 bp, Heterodera glycines
taagcactattattcgattgtttggatagattctcttttaaaaattcttaaattcattgacaaaaaaagtgaaaaatttttaattttttttaagatttcaccaaattttttatgtcactttttaaaaaatgctttttttaaattttcattcaagatttaacccccaaaacattgttcaattaaaaaaaatgctcattatgttcaggcccatgtcgagaattggtccgcctttgcgcccgacttctccgagttggaggagaactccaaatacgtggagaaggagggcgaatttgatgcgcatgacgaggacgcaagtgagggggacgagaagatggaaattgcggcggtgtgttttgtcattttaatgaaattttagtttttttcttttttttactgtaatctaacgttttaatccaaaggttaacaccgtcttttttgctttttttaaaaatcattaagagagttttttggaaaattacaaaatttattagagaaagatggaagtcgaaactctcataaaaattaaaaaaaaaatttttttttgattatttgtaaattttcaaaaattttcgctcatgtttctaacaaaaaataatatagaaaattaaaaaaaaaaattttttttgttccaaaaatgtggtcatctacactaatatattattaatccacgagtttttcgtaaaaaaaatttaaaatttgtttaaaaaaatacaccaaaaattttccgaagcacctcaacaatcagttaaatgataagaaattttaaaaatacaaaaaaaaatttgccaaaaattatcccgcaggacgaggaggaggacgtgttggacgtggtgcacatcacggtgtccgtccaactttgctcgtccgacgaatcggagccggaagacttttgcaccgacttggaggtgggcaggtcgctgtggtttgtgccggtcggccctgagttggaagtcgctgacgaaggtgggcctttgtgtttgtttgttttttcgagtttttatagcatttagtgctctcgattataattagggggccgttgggcgaaaaaaccacaaattagatgggtcgaattgaggcaaaaaaaaaaaaatcaaattgactcacactggaacttttcgaattgtaaatgtcaaaatcaattttcgatttgctattgtaaaattttcggcttttttgtctctggcccacaaactgatcagaaaaattcgataaaatgaaaaatactaataaaaaatacgttaatttatttgcgatttttcctcttacattttaatgcccatttggtcatggggttcgagccagctcgacagatggtgaattatttttgaatttcttaaaatattatttcagttgactttttttttattcagatcacttttttattcaatttggtgtgtgagtcagggccaaacagccgaattttttgtttaaaagtgatttcaacactttctgttcgaaatgttcctttgtaaagtgaatgacatggcattttttggcatttcatcctccctcatataatggccgttaataaacagcaagcaccctagtaatttaggatttaattaattatccatatagaattgtgccaggagctcagcagaccaaactcccaagctgcgaaaggacggagtggcggtggcggtggttcatcacaaaaatcgcaccgaaatcgaagatccaaatgaatgatgacacttttttcttttgcttttttttatcattttattaatccactgacccttttttaaattttattattgtattgttttattacccaaatgacccttttttttatacattttatcatatttatttttattgtccacaaaatatgccaaaaaaatgcgttgaagattaactcttatatcgcttttgttgtcattagagcccggtaaaaaaatttttccgggaacgggaaaacgaaaaagaacggggcgggattcccgccttttttcccgttcccgtaaaaatcctgtcagcgaaaaa

SEQ ID NO: 13610 - DNA, 3248 bp, Heterodera glycines
  unsure (1)..(3248): unsure at all n locations
tttttgattatttttctaaagaaattttttttctatttgtactatcttgacacagggtgtccttggaaagaaggactccaaaaaacaaactaaggacagacaattgtcaagcaaattaatttttttaaataaataatcaatttttgccgccgtcacttttattattatataaaactgagtaataatataattaaaataataataattataataataaatgaaacagaatgaagtgtaagaaatgaaggaaaatataggtaaaataaaaataagaaaatccgaattaaagttcaacaataaaaataattaaaaataaaacaatacggaagcacaaaaattgcaaatgaactgtaaatataaaaaaatcaaaatgataaaaataatataataactcaatcaaaattgatactaaaacaattttaaaaaaattaataagaaagcgcaaaagcatttcactatgaacttaaaaattaaaaaaaatcaaaatgattatgcacagattgacgacattttttgttgtcacatcttctgtttggcattcgtcttcaattattttttaattattttttcgttgttttgttgttatttttttgaattaataagcaatttcaaatataagaaaaaaaaggaatattaaggaatatttttacaaattttttaccccagtcgtccccctcccgggctttcgcacctagaaattttttttataagaaaatttaaaaaaaaaattgttaatttacagcagtttttttggaatcttttttgaaatacaataattcatcataaagtttttaaaaaaatcgctgaaaaaattttaaaaaattattttttttcttgtaattttcttaaaaaaatttgtttataaatattttacttatgtatgtaaaatgtagcaacagccttctcctttttaatcatggctattctgaagaaaggtatttttttaattttaattcaaaacacaaaaatacgttctgctgctgggcgcacttttactcatggtcactagttgaaacaaatccatctattttattcataaatatgattttaaattaagttttaaaatattttacgtttagccaacatttccattaatccatagcccaggctttacagcagttattgtctccaaaagtgccttcatataaatgccaaagcatgcgcatcccttctcccattcactttgcttttgctgacaacatttgaattcgtatggatgctaaattaaatatttaaaataaatatttttatttaaactggcttttcctttgtacgcttgaccttatccacaacacatcccacgcgtaggcaggcatttttcacagtattttgccgttgctcatgttgatgccagcagatgacggcgaccagttcccccatccgcatttgcatattttttccggcaaacatcgttcaatctaggcacattaaatagggaaatgatacaaacaaatatttatataatatttaactctccctaattccatatatatttttgtacctttttgacaacagacatatgaatatgtaattgtcaaaattaaattaataaaagctttttataaaggagtttttaaaattagcgaggttcgtggaattttaaatttgtatgcccaaatttattttttaattggtttatttggtcccaaattgtatcaattaatttaaaattgcaaattaataagttacgaaacggatcatttttactatttttctgcatcttttttcatcaatgagaaatgaacgatgaaaaacaatgtttagcccgaaaattcttaatttgaatgtcactctatttgtaatttgaaaatacaccatttcggactttttatcactaaaataattgtgccatctctaaaaatgccattctctgtcaataataagatcttaacatttgattggaataaattaaacggactttaattgaaatttgaattggattaccctccaagaatgcttgctcaagggagtttctccttttcggttgtgccaacaaaaagaatcagcaggatttgttgcctttcaaagacattggttatgtgtaataaataaataaataaaaaactttacactgaaactgttgaagtttttgacatctgccgatgatcaattcatcatttgtcagtgccattgttttttcctctttcaattgggcgaaaatgtcaaaaaattgtgatggaatgcattgtcagccaaaataattccgttttaaaagctccatgtgttcaacaaaccatcggctaaaaagacagacaaattttacaaaaatattattcattttatttctttaatctaaattacccgcttttatgagctaatttgtaatgcatcacggagccagcaaaaggcttgaggccaatacgagcaaacaaacacttaacaaaaaatacgatttttaattggattatctttaaatatttgtacaataaaatatttattttgccaaatgatccaattaaatgaataaatgaatgaattaatgaatgaaaattggtgagatggaattgtggatgtgatggaagtgttataattcagttggaccaatcacattgctaatcattgcttacgtggccattttatgggcggtagacggaaaataaatccggtggaaaattgatgacaaattgtatacaaaaagcagggggaaaagccaccaacagcagagaaagtcaaccaaaaagataatattttatagaagagatatcatcagacactgatttgatagccaacaaatatttgttggcaaatgcatcaaaaattgaaaaaaatagagaaattattgaaaacaatttataaatttaaatatgaatttccaaaaatggcgaaaattaaaaatatgatagtgaaaacggaattcgaaacccatgcctgcttaaatttcacgaaaaaatgcttttttttatttgaaatgaaattattattattattattattagattaaattatttattttatttagtaaaataaaattgctaaaaagcaattagctccaataaatgaaggaaatgaaaattagtcaatataaaatttcaattgatttttttaataaaataagaaattaaacggcaattagctgcaataaatgacgcaaatggcattataaattatgtggcattgattttcactgcgcgcttgaaaatattgctcatttaaaaactccccataaatttgcattatatcaaacaaaattttattttttacaanagataattgttaaaaccctataatttaagttgtattaattcata

SEQ ID NO: 13611 - DNA, 1926 bp, Heterodera glycines
gatcaaagatatttggccacaattcaacccagattccattagtgtggattttgagcacagcattcatttggcaatctgcaaatttgctgacaccaagattagatgctgttttttcacctcatacaaaacttacgcaaacatttgtcttcagcacatcttttaggtcgttacaataccgatgcaaattttgcacttcattctcgaatgattactgcgattgcattcattccggaagaggatataattcggtccttacaggaactcgaagatcatactcttgatcattatccggaacttgcgcctatttttgaatggtttactaacacttatgttggaagaggaacaagggcacccccaaaattttcctatgatatgtgaactgtttttcagcgtactttggaaggcagcgaccgtaccaacaactataccgaagcttgcaatcgaaattgaaaatcggatttggctatgctcacccacatatttggcgttttattgacgatttaagaaaaattcagaaaggtttagatcagattatgaagaatatgttagaggtcaggaaggtccatcaaaaaggccaaggtacaaggaaccgatgagcgaatactgagaaaagtgcaaaattatgaagtcggcaatgttttggagtagggttgcaaccccgaccccgccccgaccctgaaccccgacatttttggccattttcggggaaaaccccgaccccgaaccccgacgcttcataccccgacaaccccgaaccccgacccttaaccccgatcggggtcggggttaaatatatacccctaagaatggcattttcgtgggagaaaatgcaaaaaagttagacgaaatttgaattttttttaaccatttgccaaatttttattaaataaagaagatttgctcaatttcggacatttggaatgtggtgtagaggttagtgccattgacattactttctgtcgtgagttcgataccgtttgacgttttcttctttaattattttctttgtgacaaattgttttttttaaattaaatactcatagaaatcgaccaatcttggcatattttgacaaaatacatatcgaagaaaaacaaaaatttaccgaaattcataaatttttttggtgaaaaatcttagaaaatagagcttaattccaaaatttagcgctgcctatcggcatcatacttattaaaaaaattggctcaaaatcgcaaaaatttagcatattttggacaaaatctgttaacagatctaaccaaattttcaaaattttcccggcggcgcctatcggcaccgccggacgccgtaccctttctccttaagtctttagaaaagagcgatgtgaaaaaagatgttttggaaaacaaaaaagtaataaaaaattttaaaatttcaagaaaaaaaaattaattctataaaaaatttctgataaaaagaaataaaaaatatataaaaacaatacaaatattattatggaaattaataaatattatttccgaaaaaatattaaaaaaattttgactatttggcataaggcaaaaaattgaaaaaccccgaccccgaccccgaaccccgaacgatttggcaaccccgaccccgaaccccgacacttccaaccccgacaaccccgaaccccgaattttccaaccccgacgtcggggttgcaaccctattctggagtttaaccaggtctcattgatcagaattatagtggggtcatatttgtttgactatgtattctaagacagatattttatttgctattgatcgggcatgtattaaaaggcaagaaatccagggattattttctaccatttttccaatttttttgtttggtttgctcgcgtagtccctacagagatctgagtgtgcggtactctctcagagatctgatctccaagacaaacacaagatacttatactca

SEQ ID NO: 13612 - DNA, 1567 bp, Heterodera glycines
  unsure (1)..(1567): unsure at all n locations
acaaaatacttatactcacctgcggcaatattggcctgatatgcttgttgccggagggagtataatattttagctcgctttgagtcatatctctgcgaactttgatgtgttggggcacattgggcaattttttcacagcattacggaaattataaatgaatttatcgcgcgaatatttgtccgtaaatggcacttttaaaattcggtccctttttacccctccatcagtccgcgtccttgggtggcgatgaatgtccgacgacagtttgtccttgaccccgcattcatcggcaatttgctccaccaatgcccgttcgtcgattgcctccggcaatttttcaatgactgcccggttcgccttctccttaagctgctcggagttgatgattgcgtcggttatcatacgcgaaacagcgccattcccagcgaagggcggcggttgaccccattggagttgagggccgttgttggaagtgtgtgccgatggtgaggatgagatatgctgggggtcagcaaatcgattcccataccgattctcacccgcaattagccgttccaccaacttttctaacttttctagtcgttcgatgactgggaccaatgtggggttccctgacccttctaacatcttttcaagtcggtcgagacgggcgagaatgtcctccccctcatttaaatttggggaattttgccgtcgttttttggtcatttagtttgggaatgaaatatttggaggatgaaatatttggagaatgaaatatttggagaatgaaatatttggagaatgaaatatttggagaatgaaatatttggagaatgaaatatttggagaatgaaatatttggagaatgaaatatttggagaatgaaatatttggagaatgaaacatttttgcctaattggcattgtgtaaattttttttgagaaaatggagaaggatccggcggtaccgatatgcgccgtcaaaaaagtttttttttaatgtgatttgttaattaaataaataagtagtttattctctgcaaaaattttatacaaaacgaaaaataaacgcttaataaagtttttttaaatttgcttagttatttttatggttttgaaaattgcaaaacaaaatatgattctgataaatgccactataaagaaaaaaaatttcaatattaataagacttcgtttttagacacaaaaagccaaaaaagtcctcttcgggtcggacaaaaaatctgggtcgagaaaaatgccgagtttcgtgtttcgggtggtccggtaacaaacctggtgtagatcactcttttgtaaccgacttttaatggaataatgtgtaagaaataaaatttgaaaaacaaatccaagagaaaaaatggcaattaaacttgtcacaaaggtacttagatcatacaaatggtaatgagaaaaatataaaaaattttaatctatttaaaaattgaaaagttttattgtatttaaatagcattagaaatgatagatttattgcatttactatgatttatgcagagaacagataagatgtgctaaaaagtgtcaaanntatgtacatatcagggg

SEQ ID NO: 13613 - DNA, 2603 bp, Heterodera glycines
tgcaggtctgattaaacattattaaaaatgacagagctcttaaaaaaattttaaaaaattccaaaaataaaaaatgataaattggtaaatttttgctgttcacatttttatgaaactcttgctatttgtcggcgaatagcagcagagcgcaagaatgtcaaaaacgggcagcgaagggcgactgacgtcatagataaaaaaaaataaataaaaatttacaaaaataaaacgggttaaaatgatgacgcaaaaaggaaaaataaattcaaatttagttaaaatgtcaaatacttatattttattttatttttgcatcaaaattcgtatttttgatttgatggacttttggccctaacacatagattaggccgacaattgtaagcttaattttacaatccgatttaaaaccgtttagcgatttcaataatgacgaaactaacatttccgagatttattggccaatgccaaatacaaaaaatgatgccttatccatgaatgtttggattttaaaataatttttatgtccataaatctattgggaataagccaaaaattcgaaatttgcgcaatccattgctattactttgttgcttaatgggattaatcagccgccgctgaattgaatgactgatgacgaacaaattagcgcttttgcttaggcgctttttggctttaagcacagcaccgccgcacccttttgcggtaatcatttgcgcatttggctgcagccacctgccgctgcccaccgtccgtaattacttctgctgctgtcactgtcgctgtcctcgacttaattaccctcaattttgctaggccggctaattactgtgtgtgagtgtgttgtgtatttgatgtttgtccccgtcaaggtttgttgcacacgccgccgcgcacatagtccacaaaacagttaccattgtgtgtccccgcgccatggcacaccgtcgcccccaaaatcggtcatcagccactgcggacggaatcgtcggcgggggacggaaactcgagaaatccaatttttggaatttcaaatgatctttgatctctcccactccgaaaatttttaccgtacacactcatactgaacaatttcgagaacgaggacccgagaatttgattttgcagagatttgagtcttacataatatgcttacactattgtgcataaaattcgtcgaaatttcgagttttcaactccgggacggggggaggggttggttctcttttgacacgtaaatgtggttcatacatataggctttcaaattatgccagatttgctaatgtgaattagcaaagaaaaaagttatggcaaatcaaagttggcggcgccgaaacggtaggcgccgaattgaccacgactcataaacctagcttatggcgatgttagcctctttagccaagcgattaaaaatgttccaattgcgtaccatttaagttctgtccctgatggtaccgttaaattaaaggtcagtcggtgccagcagcgcaatttgaaattcacggttctccgcggacggcgggtgatttacgcaattttaggaaattgcccagcgcaattgggcagtatcgcgcgcaacaatgggatacataaaaactgagtgactgagtgaccactcagttttggaagtaaattgtggggcaataaaatttgaaattaaaattaagttgatcgctacggccaagtgagagagtcccgccggaaacgcggggggaattaaaagccagtttataaaattaatttaaatcctgtattgatcgggatagactcattcattaatcttccataagttcaaatgagtttttaaaggaatggtttggattttgtttgcctcacaacagatctgcgattaatgatcattttagaaaataacaaaggctctggtcgcagatttttccgatactctgatcagcagaagccattcgattatcgtaatcagatcaactcattagaataatgatcatacatgaattaagttttcgatgtcctaatcgcttactaacaaattctacattttagatacgctaaatgttacaatttgattgggactttttggccacgacatcgcttttaaaattggtaaaatatttataataaagtggggtcgattttagggtgatggtggaggagggaggcacaaaagagaagagcggggtggaaacaacaaataaacagaataaatgggattttgcggggtccccgcctccccccggggggatgatggggccgtgaagagggcgaggaaatgggcgagaactgcgaccgacgaaggaatgaataataatgggggaatgttgggggggggggggaataatatgcataaaaatgtcggaaattttgctggtgaggtgctctgcctgtcctccaaacaacagtgaaatgtggagcgcaaaatgggggaaaacggtcaaatgatctttgcgggttggggcggaagactcattttggagagtgatcagaagagggaagggagacgggggaggaaaagcacattgtttccggcaagtttgatcgaacgagtcgagttggccaaaaaaggagtttagctcgtctggatatcggatttcgggaataacattctttattcatcagtcagtgatcacag

SEQ ID NO: 13614 - DNA, 1003 bp, Heterodera glycines
  unsure (1)..(1003): unsure at all n locations
cagtcagtgatcacagaaaaaaaatggggactgatacgctgttttactaaaatcagacatattctgatcagcgatttaatggaagaaagagcaaagaaagtctaattaaggtttttgaagctgaactttaaccagcacaatcttaaagtgctcagcttcattagttgcttctcagatcagaaaggaaggcaaatttgaataaacttattatcttggatatcggatttcgggaatcacatcttttattcctcagtcagtgatcagtgaaaaaaatggggactgatacgctgttttactaatatcagcataatcatcaagtgttcactcagcttcattagttaagagaaaattgaataaagaattggaattggacaatcaaggcttgcttaaaagaaaattaggataaataaaaaaaaaattttttttcggaattgatgcaattaattttttgctaaaaattgatcagtctttcaaagtgaacaacagttcacattccaatcagtgtgttaagctgtgttgtttctctctcagcttttgcataataaaatctttagcaattttttttttgaaaatttattttttcgctgatgcaacccagacaatctttctcttttttttgcttgcaaatcccctactgacacagattttgggggcggattagaagctgcttgaccccccccccccctccccgcttaaacttcttcaacaagaatccaaagcgtttgagaagcgcactgcacacacatttatcggacaaaatctctacgggacgcacggcgaaaagcatttggggaaagtgaagaaaaaggttcacaagaaaatatattttatatttaaagagatcgaaaataaatggttaaatagtaaaataaagtaaacgtaataaaaaagatattttaaaacttgggtttgatttattgaatatttttcatantttaaattaaattattaaaaaataataataaataataaaattaaaaaatattttgaattttattaaaaa

SEQ ID NO: 13615 - DNA, 3592 bp, Heterodera glycines
  unsure (1)..(3592): unsure at all n locations
aatttatttatattaaaatgtaaatttatttagcatacctttaaaattaataaattgtggaaattcaatatttttgaaattttctaaaaaacgctctttaaactaagttttggagtttttaaagtcaattctgaatttatacacaatttttggcattttttgagggttaaaaaccatttttggcagttttttaaggcatattttagtgcatatttgagcatttttcgggtttttagggcatatttgggggatttttagtgcatattttatgcgcatatttggagttttttagtgcatacaacttataaccctagttatgaattttgagaaaacaaaaaatatgattgaatgaatcgataatttaaattccaacaaattttattaagggaaattttttttcaaattttttttgcatttagttcattttatcgcgaaatatgaaaacccaaaacagtgaattcaaatggcagccgatttgcacattatcaatcagactttttcaatcaaaaagtcaaatttgaaagttgggccaaaattggcctcaatttcgtcgccagggttgagaaaagaaaccgctggttggaggccgtcaattgagtcgacaaagaaagtgggagagcctaaattcattcattaattaacccaaatgattttataattaattaattaaagtttaatgattggcaatttcccactggtcaatctgacgccgttcttcgtgaaaatgatttgtttgctggccaaatcgatgccgcagccgacgatgtcgccaatttggaatttggcatccgaattgaacgatactttgaaaacattttcttttgccaattggccataaaaatggccatcgttgaaataggcaaaagtgccagggaattttccgggcatttgatggcacaacggagtgttttttgtcacaaagccaatgccaatgccaaagtcacaatgggaatcactgtaaaaacatgggcataaaacataaatgaaactacaaaaatatgcataaaatattctccacaaattcaacccaaattttcaaatggtttaaactaagttttcaaaagtgtttctcgcccttttgggcgttttgtaaattcaggaaaggttaagaaaaatgagataaataaaaaatcatatcattgctcaataacacattaatggaataatcttttttatttttagatctaacaattctctataagcctgaaattttcaaagagttagtgaaaaatttacctttttagctttatagaaagaaaatttgtattttggcaccaaaaaaggaataaaatctggagaccggacgggaccgggatcccgccgggattttgtcgggagtcccagtgaaaggggtactttcccaaacattatgagacgacaagtcaaaatttaaaaaaaaacaaagggacgcgcaaattttggcttgtggtctcataatgtttgggaaagttccatatggaaacccgtaaaaaatcctgtgctttagttatgaagcattaaacttcgaatgcattctcagacaaatcttttttgccggggatttcgtcaaaccgtaatttatttacttttacctcatttccctttgtaattttacaattttcacttcaaaataaactgctccaatattttgagggggaaacacaaaggcaaaacgaacaatgcgaagacctggggaaaaaaggttgacagttttagattcaaaataataaattttatgtttttaaatttttaattaaaaaaatgtttaatattaaaaaaatatttccgatatttccatccggatttacctttcttttttccataatgtttgactttaataattgttggaatcaaaatcatacgatcactttgacagtccgaagtgttccattggtagtcaattgttattgtatctctaatctaaataaaaatgaaaatgataaaaagaaattaattttttttaaatttcgatttgtcaataagttaaacgtcgtattcattgacttacaatttgcagcggttcttcttcagaaagcatttgctcctttcttttttctttctcttttttctgtccaatgaaaaagatataacaaaaaacattttaaattaccaaatccgcaaaaatttgatcaattttgtcacgatttttctcaatcagttgccttataattgaatccatatttgattctgaaaaatggtgagtttatataatagtaagttactaaaggaattaacattttaaattctatttcaatttttagcgttaaaaataaagcgcctcttgtccacaaaactaactttattttttaaaattcatcctgacaatccaaaaaatgataatttggacaaagaatctaataaattgagaccagacttttaggcacgaaatttttaaaataggcacataaaataagcacgaaaaataagcacaaaaaaggtaaaagacataaaaaaatgaacaaaaactacaaaaaaggcacaaaaaattggaaaaacgcagtaaaatttacacttttggacaaaaatttttcatattaaaaattatcaaattttcttttggcactgataaatcaaatactattagttttttagcaatataaatccatattttaggggttttcaggaataaatccatatttgcaatttttgctttttgggtccatgttttggtccttttttggaatttacacaagaaaattgggtatggatgagttgggtttattctgtttttagtccatataaatccatattttgggggtttttcgtgaaaagactgagaacgacactaaaagctgaaaaatttaaaacataccattcgcctgaatatcagctgcagcaattgatattgctttttgtaaccacaaaaataaaaaaataaaagaacgccaaattttcattttaaaagttcgctgcgagtaaaaataatagtcaaaatttataagaaattaaaatacgaaccaaataactgaataaaagtcacaatcagaggattaacaacgaatcgaacgaatgcgataaatgaatggcaattaatgggagcgaaaatggaatggcattcattctcgagagtctcgcaggtccgaaaataacgacctcgaaacaaccttcaaaccttctaagagatatccatcaaccatcaatcactcttggtcaagctgatatttgatttccttacgcatgattaagcgaaccccaaaattggtatatattttttgcacattcatgcgcactttagtcattgaactgatcagtatataaaaatgggccattttagccctattttagaaatttagggaaaggttgccacgaaattgtacagtagtaatatcttagaggagccatttaacacttacataaattctttgatttaagtatcataagatcgggatttcatctattggcacaatcggatcacaaaaaactcttcaattaaaaaaaaaagtcattcacaaacctaaaaatcgctgtcgcagatataacatttaatatttcaatattnttttaaaaagaanagacgaatggcatttgccgaaatgaatttatccnatgtttggattgtattgaaaatttacattgtgtnaatttatttccatcttcgtatgatttgctcagg

SEQ ID NO: 13616 - DNA, 2159 bp, Heterodera glycines
ttctgaggattttccccaaaagcttcaaaaatcctcaaaatttctcaaaaagccacaaaaatcctcaaatcctcattgacctatcaaaaagccacaaaatgaggataaatcctcagatctggcaaccctgcacttagggctatcaaatgatattatgaatataaaatttggttgcttttaagcaaagttatagcaaaaaaaaaaaaaaaatttattttatggtttctgagtatcgtcatagcacctttgaaacctatttctgccattcaaatccggactagcaagcgaccgacagaaggccgaacctttaagccatataccaaaattttaatttttaaaattctggccccggattcgaatttggctaaaaagagaagcatctcttcgaacaacaatttgtcatacatacgaaaagtttgtgtctagctgctccaaattaaattttacaaaatttatgtctgctatggatgtgtcggcatgccgatttccgcaatttttgggccgtcgagatcccgatttcgaaatttttttggacagtctgatttgcacgtgtcgaaattttttgagtgcgttcgcacacatccctgatgtgtacggcaattcgacaatcaataaacacaacaaaacataatcgatgtgtcagcctttattacgaacaatcaaatttttttggcgcttcgtgcaacaaaaataattgacaaaaaaaatatgggagacgatagaaacagtagaaaatcagcagaaaggagaaatgaatggatgaatgaatgtgtgatttgtcaagaaagggaaaataagaaacaattagttaataatgattgataatgatcatttcaaaacatcattcatcaattataaaatcgtcgatcaatcaagcaattaaacacccgccaattttcgcaccattccgtcccatccgccgccgccgctccaacaatcaattaacgggggcccaatgtccaattagtacatcatgtgctccgcgtgggacgagcgcggcttcttgatcttgtcaatgttcttcatcagcatgtcgtacagcgtggcaaagtggttgcgcatttcgataatgaccaatctgtggggggcgagagaaatttaatgtccaaaaaaaagtgcgagtgttttttgcagcattttgtcaattgaaatccttgaaatgcataatctcaaattcaaacattccataatggattagtaagaccataaatcattaaacattttttatataaattttcaaatttgctgaaaaattttaaaaaattggaaaagaaattgattttatttttcccagaaaaccgttcaggatagttaaaaatctaataaatttttgacttttttttaaatttcagtgggaaaaacgatgttgggttaaattgctcccttttgggtggcggaactcgaaattgctggcgaaagtttaaaaacgcttgactaagtgtttttcagaattttgaaaaaataaataaattatcattaattaaatttcattcattttaaattttccatttaatttaagaaatttttggctggcacactcacctgatgttgatgaactgcttctgaaaatggtgacaaattagctttcaaaaaaatggaatataattttactaaacacgtacctcgtccatgttgagaattgcacggctagaaaatgtgccaaaaatttggtataaagccaaaaaaatttggaggcccaccggtagtcctccacgtacggatatttggcaattttggtcacaatctgtgccctcgacgccaaatattcgctgctcatctacagacaaaaatcgaaatttattgtacaaaatccttttttaaactataggctgacctggtccagataggtagacaactccgattgcactttgtaagtttcgttaaggcagtcctggaattttttttaatttaattcaatgaattttccgattccaaaacccacctgcatagacacaccgaaaacgttgccgtcctgaaatgaatataatcgaatttttaaatttgaagagggtgacatgacaccaaaaaacttggcaaactgacctcaattttggggatcaggaactgaatccacactttgacccttaaaaatagccaattttcgcataaaaatttaatccaaaatccaacttgttgacatcttcgatggcatcgcctgc

SEQ ID NO: 13617 - DNA, 3826 bp, Heterodera glycines
  unsure (1)..(3826): unsure at all n locations
caattttaaggcattggaggtaagcaacaaaaaaaactctcccaggcgaatggggagctcgtttcacccttaaattcttcataaaaattttaaacaaaattttccaaaaaacttttttttaaagtttttctagcgatttttttttaaatttaagaattaattcccaaattcgctaaaaacattttaaattttattaaaaaattttctaaatttccaatattaaaaaaaatccaggtggagggatgcaaagttcaaaccctgcccgcaacatgaacaatttttattggaaaaagttttcaaaaaattttaaacatgaataaaaacatatgctggaggcatgggaaaaattaatttgagtcccaactcatttccccattttttcacttgatgctggggctgacctggtcaaggaaaccggccacttccgactccacgttgcgcgtttcgttcagacattcctcctggaaaaagcggttttttaaaatttattttcaatgaattttccgttttttccaaacccacctgaatggacacgccgaaattgttgccgtcctgaaatggatataatcgaatttttaaatttgaagagggtgacatgacacaaaaaacttggcaaactgacctcaattttggggatcaggaactgaatccacactttgacccttaaaaatagccaattttcgcataaaaatttaatccaaaatccaacttgttgacatcttcgatggcatcgcctgcaaattttaacaaaatgaatttgtgaaaaatgttccatttgggaatttaaaattaagacgaagcccaaggaaaagcggaaaaaagcaacgggaaaaagggaaaaattcatctgggaaccaaattaaaaagcgacttttaaaaaaattttctggacggaaaatctaagcaaaccgcaaaaaacaaaatcccgaaaatgtttccatatgaaaaacatcattgttgggacagaaaccatgggcataattttcaaaaattcaacatcgaaaacttacgcaacagtgggcgcagttcgtcaatgagttcggccaatttctcattgcaattcacagacccttttgcaaatccgtaaactggcgttccgttcagcagtgcggctgtgtcacgttggcagtccaatttttgcaactttttggccacctacaaatggggtaaagggtagaaatttaagagaaaaattctcaatttgagtgggaggaatttggaaaaaatacccaaaatttcaaaagttttaaaaaattttccgagtttttcgacctttatgttgaaattttcgaaattttaatgaaccaactgaatctcagtatagtttaaccaaaaatcaacttacctcatcgccgctcgtttgctcacctccacatggcactggcaaactgaaaaaatggggaatttttcaaatgtaatcttttcattaaaatttgtacaattttgtaagtggttaccccacatttgggcctagggttcaccaaattttagtcctaatgaaccaaaatgacaatgttttcttaagtttaatgctgtttaggctatcagggattgaaaaaactcaaatttaaacccgattttggacatgcaaatgtctggacacgattatatatagcataagtccgtataaaatggcaaatgaaaattgaatttttgaaaaaaatggaatccctagagggttaatccgtgaattcggcataatttggaaggcctaatttagtcaaaaaacaattttatttacattgaattgacatcggtcaacgcggtgatttcggccagacgcgcgtactggtatttggggttcttgagcagttcgttgaactcgaccactttggaggggaatctgtggggcagagaaaaattggaaaaatgggccaaaaattccaaaattggtttacttttgctcaacgatgatctccgcttcctgaaaaggtgggaaaacaaattgtattttaaacaattcatttttgttaaagtttcaaatttaaaatccgaattgccgaaaaaggtatccggatccatgaaaaaccgagattcaggtcgaattttaatttcattgaatatataaaatttaaaaaaattcaagagatctgttggaaaagcagagccatcaaaaccccagttaaaatatcttgaaatgtctcgaattcaataatcggaaaatttttgtagttttcaaaaattttgtaatgtttttttttgtaacttgaccattcaaaataatgtaccttcagtagctcctgtttgtagtcctcaatcttctgaaaaacaaaaactcaatttacactaattatggtaaatggtggtggcataatttctatggcacctttttgtgtgtcgatgatgatgccgatttattgttgttggggacactcattttgtgctgttgtcgcggttaattggagggcacacacaatcttttaaataatatttctgtgtttaaaaaatcattgaattataaaaaaaataaataaataaaataatgtagaaaatgcaacataaaaacatcagcggatttaacaaaattaaaaactttatttttatttataaaaatttttatgttaagctttttttttcaaagttaaaatattacacataaaaaatggtgggaaaaaatgaaaaaattatgaagatggaggagcatttgtggtgaccatcttgaagatttcgatcagtgttgcttgncacggcctcagatggtagtccttgaaaaaacgagagttttagggtttgagagtttcgaggcttggaggtacccctctagaaaaaaaagaaaattatttcaacaaatttttcggatttttttgcccttttcctaaaaattgtacccttttaaatggaccggttaaaaaattttttatggtaaggcaaaattcgaattcaaatccgaattctaacaatgagtcatttttgagtcgaacaaaaaataaccatttgcaggcacgcggactcgtacccctagcaggccacacacggcccacaaagcagggaccaccacacaacgaaatcaaccggtggttcgagtccgtgtgtacgcaaatgatttttttgtttgacattcaggatccaagcataaaaaaaaaaattcaggtcagatagctgggactgaaaaacatgctattcgtatcagcgcggctttggttcctttccccaaaaaggtttaaaaaaccggttttttcgaaaataaattcaagagtcaaaaaccagtcacatgggatccgatcgagaacttgtccacatttttgtagatgtccaaccctgacaatgtgtgccaacggcaataaattggactttggcagatgctaaaaaatgccaacctcggcccattttgaccaaccagccattgttgaacctaaaaattaatttcaaaaaagcatcggaaccaacgcattgccctgaataatttataggcgggtactcacaatcagagaaaaattcggatacgtgtttaaattttagtcaattttcttgaaaaaattgactctaaattttccccggcggcacctaacggcaccggcggcgggtccaaattttcccatattttatatttttccaaaataggtctcaaatggccataattttccgttttttttctatggcgctgaaatctaaacaattctggcctgaaaaaactcttcggttgcccctcccaaaattttcgtgtctcgacatttgcggtccgacttttgcggcccatttcttaagggctattttcggacatttgcggtcacagccaaaatatggataattaccaaaaacacttttttttctcttcaaatttacgccgagctttcaatctagcaattctttttcaaaaactgggctt

SEQ ID NO: 13618 - DNA, 3715 bp, Heterodera glycines
ttcatcagttggagcggaatattgcgcaaagacccgctaattatactgaggaagcagctaatggacgaattaaaggcacgcaaaaagctgagggaaagcggagaacaacagcagcagcagagagcgaaagtcgacttcattgacctgtttttggagacggaacagaacgaacagcagcagctgacggagcaatgccaaaacgagggcgaagcaatgctaagcaaaacggcacttcaggtggggagagagaggaagggggaaggggttggtggcggtagtgaagtcgagagtcttagtctcgaacctctttgactcgagcaaaatacttttcgggatgagcgtttcaattctaaattcgatacagaaaagttcggctctattgcactttatgagtccaatcgaccaaacaacaattaattaattaatcaaatctttttggcaattgcctaaacgctgagattttatatatttttgcttctttcctttgtgctttcgaatgataccaaaaacatagggtttgttcgaacatcaacaaagttattgtataaaaagaaggtattaatgccaaaacgagggtgaagcaatgctaagcaaaacggcacttcaggtggggagagagaggaagggggaaggggttggtggcggtagtgaagtcgagagtcttagtctcgaacctctttgactcgagcaaaatactggggcttccaaggatccgggtttcaattctctaatttgatatagaaaggcgctaacagaaaagtacaattgaatcgtttggtatttaatagtaatgctcgagacgaaaatttctcccgagacagagacttgacttcgagaccgagacccacaaaacccgagacttttctcgagtcgagaccgagatttttaaaaaatcttcttgttaaattaaaagtggattaaaactttttacaaaatttaatcgatttttgaggcttttctaataaacttcttttttgaattttgatgattcaattacatttttatcaattcaccgttaaactaaaagccttttttaaattcataattgaattttcactattgcttatttaaaaaaatgaagaaaggcgccgccggagaaaaaatgaaaaaaagtgcaatggaataattgggtatttaccacgaaaacatttgaaaatagagagtctcgagggtaatttggtgcagaatatcactaattggtgttaatcaaagcagtctatgagaaatgcaacaagcattttcagagagtagcaaagcggtgcactttggaagagattacgtcgcagcttttgatgtttctgcttgccgggtttgtggtattacgaaggcccaaaaaattcccaaattcacggcctcttaaatttcttgaaccaaaaattggttaccgccgtattttctctaattgtctcccaatctccattaatccaccaattacgctaaacgtgaactgtacagcttcgacacaagcgcaaatacgctgagtttggtttgccacgcgttggcccttcacgcggaagtgcaagcgaaagtccaagaggaaattgactcggtgtgcttcgacgaggtgtcgtccttgagaagagaggaatttgaagaaataaattcccgttttcaaggacccaacttatgagcagctgagccaattgaaatacaccgaagcggtggtcaaagaaacgctgcgccttttgcccattgcgacgaagtgaaaccaattagcataatgaggcttaacatatgaagaccttgagaagcctttgagggaaaactatggggcgggccggctttgaaccggcgtctctggctttccgggccagtgggtaaaattgaagaatactagtgcctcaccaaattatcgatcattcgatgcctatcggtctgtaatgcacgaatccgaaagaattttttggcggaaaccactttgggccgagttatggacccgggaccgaagtggccaaatggctgtaggactgaaccatccaaagccttaaaacgcacaaaaatgcaataaaattcgtggaatttgatgaggtactaagtaagtattcttcagtttccgaccagtgttctaccagccgaacgaccgaccctaccctctacagtaccctattgtacttgatagttagtatattgtcaccttaatggtccattaatcttctctcgggtaaacttcattctctatctcgagcttaatgagtcagttcccctgaaaattgggtgcaagcgaaaatggcaccaaaagaagcggattaggataaattaaatagttaagaaaaaaatgtgaaatgttccactttatattagtgattgaaaggttttctcaggcttaaaaattcgagttcaaactttagattttcattgatcgatcaaatttttgaaaatccgatgatcgatcgatcgatcagtttgtatttaaatgaccaattgttaagtgttctgaatcggacgtgctgccacacgacgacattgggcgacataaccgtggagaagggcaccgccgtggtgtgcgatttgctttcgctgcaccacgacaaaaccgtgtggggagaggacgcggacgaatttcgaccagaaaggcacaaaaaaacccaacaaaataatcataataatgggccaaatggaattgaaatggcaaatttgtgcacctttgttcaaacagggggacacattaggcattttggttttggagaataaatttttgcaatttcttaatcaaattcactgagactgaagccaggcaaaagccattaaaattggaagtcgtttaaatccaaaaattgtaatccaattgaaactgttttcaggtggctcgaagcagggcatcaattgccgccgttttacgcgttcggcggcggtccgcgcatttgcattggcatgcgattcgcaatgattgaggagaaattggcattggtccgaattttgcgcaaatattccattgtccaaactgcggacactgaggtgatcaaatggacaatcaaagcggtggtacaatcatttcaaatcgcttacagaaagagttggcattctccggacaattggtgatagcgccaaaatcggtcactgttgggcttaaactgagggacgaagaacggcacggcacatttgagtaacctctgaatttaggcttagtaaggtacataaatattttttagtatttaaaaatattaattggagagtggcgttatacagggaaaatatgaattataaaatggaaaaaggctaatttgaggaaatatgatcaaaaacgatgaaaactgataacaaattaaaatatttcaatcggatttttaattaatattaaatttgaagaaatatttttattaaatttttttgttgtaattgccatgggaatatgaacaaagccaatggaaattcagaaactcacgcaattgtttgtcttttaatttaaaatttaaaaggcaaaaaaccgaaacaaaaaatccatctcaaatttaaaacaaatttaaaaatattcaaaatcaatttattcaattttttatgatagaaatttaaatttactttagattttaaaattattttctaaaatcccttaattttaaacggtctgcgaataaactctcataaaaaatttttgtcgcatttcaaatttaaattttaaaatgggacattattaactgtattttatcggttcgtgtaggaaaaaagaaaattaagtacagcataaatagtgatcatctgtttttgaaaccttcatttt

SEQ ID NO: 13619 - DNA, 2472 bp, Heterodera glycines
ttggtgctatgtcgttatttaaaaaaccatcattatgattttatgtaaaattatttataacaatcaaatttttatttattcatatcattcgatagccctaagcgatctctgtcaacgatcaaacctaaaacacctattgttccacttacctcaaaaagtcaatttcttcaaatatctcttatctagatcattttattatgtatgtactaatatatttatttaataattctcatgcttttttcctttgttcttctatcattattattttgtttgtttgttagtgtctgttttcttaaaatctttattttcgtataaagatgagtatttgtcttaatttaattttattatttattgatttgtactatttttctactatgttaatttatttgtgaaccaaaaaaaaatcaaaataatttaaagtcgctaaattttgaattaattttttataaatatttgcttgatggaaataatacatattaaatctttttcttagtattatgatgtatttctcatatttttattagataagtttttttataaattatacttggtcagaaattcgaattccgagttaaattgcattattagataatttattcatttaattttttgaattttacacatttacctcttttattttttaaattttcattaatttttatttttaataactatcttctttttttttgagtagcgtaagtgctcaaatttgtttttattatttttgtatgtttttatacaatacacttagaaaaaacagaaaaatttgataaaatttgtttattttaataatttattatttgaaattatttttaatatcatagcataattaatttatttttgtcaaatcatttatttatttattcaaaagatcaatgagatcgtatttttcatttgagttggcatccattttaatttattacaatcttcaaagatattattaataatatttttctatatcaattattatattgtatcaaacagaattgatttctgttttacacttccaaccatttgtgatattgataaatttttggaaatccggtgaaaacataaatcaagttattttaatattaaaaacaatttgattaaaggactttaagaaattgattaaataaaatttttaaaatggtggaaatatttaaattttagttcttatttttaattttctatatttatgcattttcactattttactttgaatattatttttttttaatattaagtgttaaatatttatttatattaatattttaagtttttaaatttttattttatataatacgttaattatttgttattaattactacttaatataattttctttttattaatttcaattttataaatgcggccagagaattgaatgtaaagatcaagtgaagctctgcggaattggaaggcaacgtccatcgtgactatattgattgttgcttatattaatttattttagattgtgtaatgtaataattataattgtatttttttttatcatttttacatatttttacttcatgatctatttctcatgatattttatattgaacttattttttgtatttcacatcaaatgtctttaatttaaactgaagttttatgatttctattaatttataatttttactcggcattgttcaatatttatatttttttagtcaaaaattctaaggaattaaatccttaatttttttaaagaataattttgatatgagtaaaaatgagattattggagcaattatttgtttagttaacgaagtgtgtaattcgtttttttcaattattttatgttgtttaaaattattttgattaaaaaattttgataaatttcttgatttttcatttttattattaagtttttcatattcccatatttgtttttatgaagtgtctaatttatattaaattttaaaaaattttagtttttacatcaaaattaaattagttttggttttttaataagtgctcattttttgttattatttattttttatctaagtttagcgtctttttaaaggatttctttagtcgtaataattaaatttgtaaaaattttgtaatattctcaggaagaccatttttaagaaaattaaattacattttgatggtaaatttttagctactttttttattattaatgatagattcattttattttacataaaaagttgattagttcaataatgaattttattttacataaaaagttgattaattgaataatgaattttattttacataaaaaggttgatgttaatgaaaagtaattatatttctaattgtttgaggcttctaaatccaactttttcgtgttgatttttgctgatttcttgttttaatggccaaaatatgcgcataaatatgcaaaaaaaaaagtcgtgaaatatgaaggaaatagcacaaaaaaaaacttgaaaattagggggtgcaaattaattttttttttaaattttctcgtaaagttttatcggttg

SEQ ID NO: 13620 - DNA, 2566 bp, Heterodera glycines
gctgacgaagatcgaagcagagaatagtcaaatgaaaacgaaaattgagaaaatgcagacaaaattggagaagaaggaggagcagcacatgaacaagtttgagcaactgcagaaagacgtaattttcaaaatagaaaactcaaaatttatggactcaaatccgaaatttcacactctaaaaactaataaggagcggataacggatagaatactgaattcttagaattttaagcgtcctttatcttaaaggacatccattgaaattggcattaattttggagtcaaagtctgtaacagagctatcgaattaaaaattttaacccaaaaataataaataaaaaattgattatttttataaaccctatcaacgaaaatttcagattttcatagcacatcaacagcaaaatggtaagggaaaatgaataaagaatattgttcctaccgcaacattattattgttattatggcgatttgtaaaaaataaaaaacggctaaaaagacattttttatagaaattattgggcagcgatttatgtaattttaatattaccgtttttatagtttatttgttcgtttggtaatatattcaaattaaagagtttttcatgttttagaattggttggccaaatcaaacaattgaaagacgaacaaaagaattatttggcgagggtcgacgaattggaggaggaacagaaacatctgcagcaggaaaagaacggtaataatatcgaaccatttaatttattctcttggctctaattttatttcttttttttctctaattttgctatttgaacaaaaagaactgaaaaatgctcacaaagaaatgcaagaaaatatgaacaaattggaggaggagatattgtgcacaaaattggacgcggtgggctcaaattatgaagcacttacaaaaatttggccctaataatttaaagctttattaacatatttcaaaaaaatagtaaaatttcaacagaaagcattccaagaagggcttgagaaaaagcaactccttgaacaaattgtgacggttcaggcgaaggttggcaaaatcgaaatggaaaaccaacagcaaaagggtaagggaaaatgaatcaaagtctttaaaaatatgaattaataatttatgttatttaaatacaaattatgaaataatcttttttaaaggcattagataatttctcgagatggtcaaataattaaactattaagtaactagaaatgttaagaatctataaaaacaatcatttttgcaatatttttgatcattgttcaaaaaacatttgctgacgaattgtccactgacgaattatccactaacggattgtccataactgacggattttacttcactgacggattgtccggactccttttattattactgtcaaatattatttttgcttaacaaaatgcaaagaaatatattacataatcctatataataaattaattacaataaataattaatatttttagtttctatcgaccaaatcgaaaagttgcaaaatgaacagaatagaaaaatcaatgcattggaaaaggaacggaaagagaagcatatggaaatggtgaatgaatataatggaaataaatattaaaaattaataaatgattttaatgtttaaaatgtgaaatttataattttaagaatgaatatgaatttcaattttaagacacttttaaacttccaacagaattgttgggatgccaacgcttgtcacaacggactcaaaatcactgatgggaaaagtttgacggttgttcatatgggaagaagagaaagtatttttaaaatttactttttaaattattttttcatttagtcgaacttcgcgttgtcttcgctacccatccaatttggcttgacaaggattcctccggcttttcttactttgaaatttcgatcaaaaatatgaaatagtaagtacagcaattttaaatggcaaatttatcacaaaaaataataatgataaatttgaatattccgaattctattttagttactatttcggtcagatcttcttcggattcgcagtcaaacagcagataaaattggaagaaacaattgttccttccgactttggcacttattcatacataagccaaggcaattttaacatcaatggcgaatggatggaagttgattcattcgacgaaaacgatactgttggatgtggcattaattgggccacccgacaggttttttacaccaaaaatggacgacttcacggtttgtaaaaaataataacaacaaattttgttgcataaaagaacactatttttaaagacaatttctcaacatcatcaaaatacattatgccaaatattttttttatccaaatacaataaaatccattggactatttaaaaaaatcagaaatgatttctcatttatatggtcataggttgcttccatttggtcgacaattcatcaaatgatgttcctgaccaattgttcccattcgtttctttgtactcatttggtgacgaaattgaggcgaactttgggcccaatttcaaattcaatttggccactctttgaggaaagcagaaacaaatgga

SEQ ID NO: 13621 - DNA, 966 bp, Heterodera glycines
attatgacaattaaatttgttagcgattaattgaataaatggacgacaacggcacaatcaatttcctaagaattaattaaaacattctatcaccctccttatttaagggcactcccactcattaaagaaatccccgaaatgttgtgaaaaacaattttctggggcactcaattacgaaaaaaaggctgaaccaaaaaaggtgtgccaaaactggagtgaaagtgccatcaaaagagtgccgcccataaaatgaataaaataatgatgatgataatggatggcttgattggttggttgattaaatgaaatatgtgttggaaaatgaaaatgatatggcatttgccaaaagtgaatgtgataatagcgaagctgctgcataaatgatgaattttgaaataaaaatgccaaaatggtgatcagtcaataatcgatcatattcctatgccaaaaatgctgatcagtctcgtcagtgggtgatcgatcatttccaacttcctcctcccatccgtggcacctaaatgccaacaccattcttgttgttggcatccgcttctggcacaattgccgccgctgtttcggcatcatcaccaccagcgccgtcatgctttttctgttgcagctgcacaattcggcgctccgccgatgaacttttgtgctggttgtacgcctcggccggtggctcgcgctcgcccaattgttgcgcaaaaatgcgcattttctcgcggaagcccaacgagctggagtccgccacgggcctgatcatctgctgctgcaccttgcgctgctggttggcctgcagctcctggaggcgtctctgtgaaagaaagaaataagaattttttttaatatttgaaaattttattttttatttaaaaaggtggattaaaaatatggcggagggcgttcgctcagagacggcttagatccccaagctaaaaagagcaaaaatctgaaaaatgtttcatg

SEQ ID NO: 13622 - DNA, 1173 bp, Heterodera glycines
tcctcctcttcatcagttgcggtttttgtgccgtaatcattcgtgccattgttgtcctcgttggccggcacttcctccacctaaatgttctcgttgttttggatggagaattggacacgctttttggtcggcacgggatggagcagttcactgcaaaattgttatcattattattttaagttatcataaattccttctaataaagcctcctcccctgtattttttatttatgagatatggagtaaaatccctccgaaatttttttcgttaaactgaaattttcaaaaaattttaaaagaaaattcaagagaaaaattttttcgaaaaatcgaatttttcaaaagattcatgacaaatcactaagtatttttcaagtttcattgaaaaatttttcttgaaattttctcatgagaaaacgagctagtcctgctaaaaaatgactgtcccccggttcgtaccgaatggccggcttggccggcaccgccggagggggctgcctttggtgccgtcgttgttcattttgttgttgcccttctgccgaccgcacaccaccatcgccgccttcaggcagttgttgttgttgttgtggtaaatgcctgtttctgtgctgcaattcggccaccaccgaagtgccatcgcatcgtggcggctgcggcagtgacgtcatcgaagcggttgccgacgaaaggggcggtggcggcgctttgcctttgatgtttggcactttgggcaagccggtggcggcgacggcaccacgcttgatttgcaacaaattgttgttattgttgctgcagttggtcgtcggcgtcgtcgaccaattgttgttggcggtgtcatgagagggatgacgaccgtcatcataaatggcaacaacatccgtgtccaacaagctgagcgcggccaacgatttgctctgcctgcaaaatcaacatttcactacggtatattttgcaattatacagtaagacgcgtgttttttcccaatctctctgagacaaaaattgcattttcctattccctccatttaaatgtgccggcatgccaaatgccaaaatgccacacctttccaattgttgcgcagctgccaccattgaagcgggcaatttgttgcggtaagaggcggaggaggcgttgtccacagaaagtcggcgatcaatcgcagaaccggacgcg

SEQ ID NO: 13623 - DNA, 2565 bp, Heterodera glycines
  unsure (1)..(2565): unsure at all n locations
gatgatgacaaattcatgccgttattgttggtgccgtaaaacgtgcccgacggcgatgtggcggcggcagcggaggaacggcgtgccggctgcatgaccaccacctgaggacggttgacggacggacggtagtgggcgggcaaccgcgaggcggacgatgatgccagcgaagcagcagaggacaacgcggaggaggacgactgttgctgggagtggcggacaagcggaaacggagtgccgccggaaaaggaaggcgaggacgcagcaacgggggcaccggttggcgacgacgatggtggtggcacaacaacggctccagcgatggcacaattgctgctactactgctgcccccggccgtgttgagcaactcagacgctgacatggaacgcttttgctgtttcggcacaaccaccggatggacggacaatggcaccggcacgacgccacctttgctgttgttggtgtagttgccgttcatggactgtctggaaaccgaagaagcgattcgtggttgtggttgtactccagctgctgctgctccattcccgttgagccgttgttggctttgaagtggttgtgtcatcatggcggcaccatcaacagcagaactgtggttgttttgttgttgttgttgttgttgcttcggatgaggctgatgaaagtaggggcccaacccgttggcttgcgccgcatgcttggcaacctcaaaatgcacaacggggccggccgaaactatcttttgtgctgccctgaaaaaataggaaattaattttctaaatatttaaatacaggccaataacaagaaaaaattttggatgcagaatccgaagcattttgagttcaaattttgtaaaaaaaatttttgtttgctaaaatgggtccggctgtgccgaagcgccgccggggaatttttttttcagaaattttaatgaaatttgttaagaaaacaataattcccaaaatttgcccttttttcttgaatccccttggcctgatttgtgattagagagatagaacaaaaactcacaaatcctgcccaacaccgatcaaactgttgccgttcacgctcaacaactgatcaccgggtgccagacgtccgtcaacatccgccggagagccctcaatgatattcttcacgtaaatgccactgccgtgctcgggagtgccctgaggagaaaacataaacatttattaaattaattattcgggccaattcaactagatttgtttatttaaaaattaaatgggtgtcccctgaagaaatttaaaaaattgtctaaattttctaattctaaaaattactctccccaatcacaatgaaaaaaaacaatttgttaataaaaaattattatttttttttaattaaaaagtatataaagaaattttatttgtatacactttcagtgccaacattttgcggccaatttcgctactcaattgttttatttaaaaaaatatataaatttttaattaggtatttctccgttaattgccgaattaaaggtatttgtgcacacaaaaaatacttaacaaatacaaacaaacaacagcaacaacaacaccttctctgtcccatgccgtcccccttcacaaatttgtccaccacaatttgaggacggaatggcactttttgttgaagtgccattcgcctccgctccaattggctgcttcttcccatcaattttcacgtcgtcaactgttggtgacgatgccaaaaatttttctcgcccaacagctgcgggagatgcggaagaagaagaaagcattgcgcgcagcagttggccaaatttgctgcgcgacttttccacacccggggatttgtttcctttgatgttgccgccgccaccatttttggcactaccattagtagcattgcttttcgattgtggcagcttgtccttcactttcttcttcgccttcttagtgcttgttatcattgcaattgcatcgtcattgtcaaattttgtgccgtcgctgttagcatcggcggcattctgattgatgttgtgccgccgatccgtgccgcccaatttatgttgctgctgatcatggccaacagcagaggacagtggcgacaacaatgccgatgccgaattgttttgccctcctactccaccttctccagcaacaatttgttcatccggagcagcacaatcattcttcccattcgccatcatcatcatctgctgctgttgttcaaatgatgaagccgcttcaagtggcggtggtggtagtggcaatacaaatccgtcgaaaaacaaatcgctgccgccggcgtttttgttgttgtagcggcgatggttgaaataatcttgctgtccctcttccccctcttcctgctgctgctgctgatggtgattgtcggtgttgttgaagcgacaataattatgatgatgaagatgatgatgatcaccacccccaccagccgaagccaaacaacggcggcaattgacccgttgtttcttttgatctttttgatgatgatcacaatgatgatgatgatgatgatgatgaggatgtgcttttgcttcttcccgccggtcctcgtncatgaattggcgacg

SEQ ID NO: 13624 - DNA, 1393 bp, Heterodera glycines
ttctccataaatattaagaatcacatagaaaatcagaaactattgaagaaacatttttttaattaatttttttccgtaaaatctcaaatttgctgttaataaaattataaactcaaaattttgaagacaggcgactttttttgtagagcacgaaaaaaactgcaaaaattcaagctcgtataactttctgatgttgatcaaaaaagtctgttgcaccctgatcagaacactacttcagagtgatcgtgagtgactatattttaacaacccttggggacttgatttgaaccataaatttggccataaaaaatgccgagtaatgctgaaaaaaaataatgcaatttttttcattttaaatttaaacaaataaaaaatagatttttttcaatttttgagaaattaaaatataacatcagataatttattaatttaaatttattaaataggatttgtaataattaaaataaacttctgttgtaactctttgccacaaatgaccgtagcccaatcccatgtaaaggtaccgtatgagtttgcgtaaaagtggtgttgcctcaacactttcccaatcgtcgtcccttacgaagaaatatttttcacaaatttttgtgtcaaatgaagatcgaacggcatggagcagagaaggttttcgtctgaagctgaaccaaaatggcattcgctacgtgcgcagaaccaaaaagccatcaatgatcttacaaattgacaaggttgggtaatgaaaattttaaaatttaaaaaaaaacaaaaatttaaggataatgtaatcaattttttaggaaattttcacgccaaatttttttttattaattattcaaaatttattcgcagttaatggtggaagaatgttctgtttgttgtgaattgatcataaatgatcaattaccaatgcaattaaaagaatgcgaggtaggaatttaaagttaaattattttttattttcatttttttaatatttagcattttttccaccctagctgcatttcacagtggttagtttcttaataaaaaaaatattaaatttctaaaataaattttaaaataaattcattataatttcaatttaataaaaatcgaacatatttattataaattgtaaacataattaaaactataaatttatttattaatttaatttaaaaaatttccagctgcaatgttcttgttttaatttaatgaattttaatttaattttgtgaatttgaaaaaagaattaatccagcgatatttaaagttaattaaatcaaaatattataaagaataagtttttcaataaaaataatattaaaaatttatattcaaaattgaataattatttttttgcaggttaacaacaaataaaacatgtccaaattgtcgaaaggaacttaacaca

SEQ ID NO: 13625 - DNA, 2728 bp, Heterodera glycines
aaatttatttcaaaagccaaaaatggccaaatttcgtcgttttgtcatcagacaacccgtcctccaaaatggccaaggcggtctccgtttttcatacgaattttggctgccccggaggggcaaaatgaagacaaagcatatccatgctcagtcactgaaagtggtggaccaaggaagggtaaaatttgctttaaaaaacaggggttccgatgtgaaaattttaacctcaaaagagacactaaaaaaagcaattcttgatgaaatatgctgaatttatttgaattgtttggcaaaaacccacacaaacttctaaattaaccaaaaatgacagaataaaattcattatattcctaaaaggcacaaaaaaataaatgagtattttctgagaaaaggcttttaacaacagcattcataatcgtaatcagaaattggaacaatgtgatttaaaaaattgttttgaaaaatcatgataattcaaattcatctttgttttattgaacaatttatcagttaagcattacaatgttaccacttatgacggattattaattttaaaaggttccattaatatttaaatcaatgaattgctagcgatgacgacaggtaaaaaaaaacaaggttaaagcattcatttggaaatttacaaattttaaaactaattaaaaattctaataattctattaaaatgtttgaacagctgtgcatcatcatgtatgtgcctcggtttacggcatacttttcaacatatgaaaaactaattaaacaaacccaatgaatgtgaatggacagaagatatatctttgataaacaatgattataataagatttgaaattaaattttttgaataaaaaataattttaaaaaaaacaaggattttaagattaagaaaagaattcgagaatccaaatttttattttatgaatgctaacggttctgtttggtgtcgaatttcttcttccattttcttaggttcattgtttcgattcccaatttttcagttttgtcgcgatttttatttcaatttcccaatttggtttcaaattgaattttttggtaaattcttgtttgattttttcaaattgctctattttttcaatattttgtggcgttgaaaattttttagataaatcttaaaatgagacaattattaaaattcgcttattccatttgttcttaccaattttcttcttccattgataaattttttgccgagtaattcccaattccttcgcaatttcacattcaattttgcatattttgttcttatcatatttaaatccataaattttttcctttttcatttcatcaaattttctgatcattcgaatcattgtgtccttatttatgtccttatttactctgtacttccgtgtttgtcctaattttttctttaatttataaattttggcacgatttgtgcccaacattttggcaatttcactttcaaattgaacaattggcattgttttataattgcaccgcaattcctttttcatcaaattaaaccagagttcccaagtgtgcttatttctaagatttgtgcttattttgaggggtcggatcttagaaagtaaaaatgtgcttatttctaagatttgtgcttatttcagcgttacgtgcttattttgtgcttatttttggatttgaaaataaaaaatgaaaaatttgaatgactattttgatttttcatttttttctgaagcgaatatttgaattaatttgattttaaaaaaaaattacattttatttcattttttgagtgaaattcacaaaatgccaccaaaacgtaaacatgattattgttttaagtcaatttttcatgtttttattgcgtttccttcacgcaaatattagttttagaaaaaatcttatttttggggtcagaatcttagtttttaggccattttgtcttattttgaaaaaaaaaacttgggaactctgatataatataaagaatcgataaattactaagcaaaattgtaaaattttgatttctacataaaatataaaaatcaaaattatttaatagataatgagtacaaataagaattgttgatctaattgaaaattgataaaatgcaaacagaaaaaatgaaatgaattcaactacataatattaaaattaaaaaattcatttaaaaaatatttttgttgaaattttgccaattttagttttcttccaaaattttcaattttcttcccaatcaaaactccatccacagaatatgtgcaattatttatttatttatttgtgttgtgtgttgtttgtccccctcttcacatttattcgccaattttggggctgattttcaaggtgaaatttgggcggggaatggaaattgcaaattgcaaattgtgcgccaaccgacggacggacgaaattggcgcaaaagaaatttgtacaaaaatggacggatatgggatggggatgtattgttatggatgaattgttggaccatatttggggatggtgtcaattattcattcattcagtcagtcaatccatttccgtcgctctctctaattacattttcaaatttttttaatttggcattgtgtctctatagaattggcacttacttttttttattcgtaaaactagagttgagcgggaccgggaaatttgacaaaaaccgggaccgggacttgccgggacttttcccaagtgaaaattttttttgaaaaaaattgaaaatttaagtgcactttgttacgaaaattgccaat

SEQ ID NO: 13626 - DNA, 2184 bp, Heterodera glycines
  unsure (1)..(2184): unsure at all n locations
agagtnncggaggaagaaaaaatatggtggtagcggaacaaacaaacaaagatagaaagaaacagacagccattccaaattccaatgccatcccatcatcgagcaaaacccattgattgggaaatcaaaagtggccatttggcattggcccactttttcaaaatttaaataaaagaaagcgaaagggaaaatattagtgaaaggaacgaagaaaaaattaataaataaaatggccatagaaaggaaaatattttctgtctgatgagaaagttcaccaaatttcaactaatgaattaaaaatgatcaatcattcttgttcagactcaatacgaagttttgtttaccaatcaaacatttttgtcttttaataaaatgaggaattgagaaaagtaattacgaattcataaagatggaaatgccaaagaaattcgcagaaatgtctgaaggaatggaatggacaaggtcactctcattctttgaccattgtggaggaagcgagaaagcgccaagcttcgagaaataaacaaatgggataaattatgaaagattggtgtgggatatggatggatctttgtttgtgtcttatctgattctgatcgtaagaaacattaatcggatttaagaaattgaaggaaaaaccccgcgggtgtcatcccatcccatccgtatctttcccatgtgtctgatgaggggaagtgactgacagggcatccagcaacagcccttcttctcctcttgctcttaaactatgcccccacccattcccacaaaatgaaattgaccattcggtagcctttgctcaggcaatagcgtcctctcttctgctgccgcccctttttcgcctcgcccaagggcactgttgacaccagcagaagaagcactagcagcagctgggttcaggagagggggggagggggctaaaccgcctgatgagagcgatgagagcatgtggagacacacacagagagagagatggtcagcagcagaaaggaggaagaaagagataggagataaaggaaaaaagagacaaagagaaatgggagaggcatatggaaacagaaaaggaggaagggacggaggggcgggggagggcaaagaatgcgcggacaaagcgaattcatcgtctataacgggaaaatttggagacatcaaggggacactagcgcccaaaacggggaggggcatgttggacgaaattgacacatttgttgatggaatttgggactggtaaaaagaaagggaagaagtgcccccccccccccgctgcttccaaccccaaaaacggatgcatttggtgaccaacgacgaaaaagaaaggttgtggtgcacccacaattgagttgagtgaaatgcaaatttgaggggcggagggaaaggggggaaatatatgttttaggccggagaaaatgggggaaatgaaataaaaaaaatttggcagtgaataaaccgttgccaatgagtgccaatttgtcatttagcaaaaaagactgaattgttaggttccaaaaaccaataacatatgtacctaagtgtatacatgccttaaaacaggcaaaaaaatggcaaaatataaaagatgccataaaaatgattagtaataaaaagtttaatggcttaatttgcacttttataaatagtaaaatcaccaataagagaaagacccccccctccccactcattggactgacagcgaaactggaaaaattgttaaaggctcgcacccgtttcttttgttttgaccttttaaatttgttttgagatgggagaaaacggggaaagagatgtaaatgggagagagaagggtgctcacatttgtggggggggggaaatggtcgggtaaacacagagaaaggaaaagagaggaataattggagggcaaacagaacagaaaaggcggagaggacgagagatttacagaatcagaacacaatttacatattcattcattaagagttaccagagaaaatttgccaacgatacgctaattggagtgggacagagcaaaagtgatttgagtgttttgtaaaacggttgggattaaagggaaaaatgtgtggttaaatatttgacaaattaactaatttatcaattacgagaagacgaggtcccctgacccagcaagtgaaataaaaaagagaaacatcaaatgtgaacttatcaaaatattgggtgtttagggggaga
